United States Patent Application Publication US 2007/0072175 A1 - sequence listing, part 3

SEQ ID NO: 5429 - DNA, 3729 bp, Macaca Fascicularis
  misc_feature (1)...(3729): n = A,T,C or G
acgcgtttcttgcccctgacacaagtacaaccatctccactttccattttgctcctactccacaactcaggaagccagtgtgatggaattcaacttgcaagaaaaaattttaatcattcagaaataattgttacataattaattttcgcttataaaaatatttgtttacttgacaaaattagcattagaaacagtaattctttggcaaattaaagtaataagtattttgatgatttatcatttttcacagatgttgataaaatttaagaattacatagccgaaatttggtctaattcgacaaaccacaattgactattttgataaggccctatgacgaatggtatgggagagtagagttcatccaatctgactttcattttattgataaggaaactggggcctcatttgttcttttttaaattgctacataatatacatatttatggggtgtagtgtgatgtttcagtacatgtatacattgtgtaaaaatcaaatcaggctgtttagcatatctgtcacctcatatatttatcatttctttgtggtaagtatatttaaaattattctagctattttgaaatatacaatatcgttaaccatagtcactgtgcagtagaacagtggtccccaacctttttggcaccagggaccaatttcatgggagacagtttttccacggacctgtgggggaatggtttcaggataaaactcttctacctcgaatcatcagcattagattctcataaggagcatccaccctacatccctcacatgcacagttcataattcacaacagagttcgagctcctaggagaatctaatgccaccgctgatctgacaggaggcggtgctcaggccctaatgctcacccacccactgctcacctcctgctgtgtggcccgattcctgacaggccatggactggtactgactggtccacagcctagggtttggggacccctgcagtagaacaccagaacttattcctcctatttatccgcaattttgtacccattgaccaatctctccccatccccactgtctctccccttgccagcctcttgtaaccactattctactctctgcttctataagattccacttaactctaacttctttagattccacatataaatgagatcatacagtatttgtcttttggtgcctggctaatttcacttaatataatgtcctccaggttcaaccatgttgccacatgtgacaggatttcattctttttgtggctgaataatattccgttgtttatatatgtcacattttctttatccattcatccattgatggacacttaggttgattccatatattagctattgtgaatagtgctgcagcaaacatggaagtgcagatacccctttgacatattcatttcctttggataaatgcccatttgtggggttgctggatcatatgatagttctacttttaaaatttgagaaatcgccatactgttttccataatggctgtactaatttacattccagccaccagtgtgttagagttctcctttctccacatccacaccaactacaggtggcttttctagactggactttaggttgggacaaaaagtgtctttgagagtcagtagtcctaatactgtctgtaaacgctgtggacttaggcagtttgtttaagcttgtttaaactgggtctgtgtctccttagatataaaatggagggttacactggatctttaagcttctgcccagcatttaaagttctgtttattgtggttgtatcctgtgcttcatgaattcctgattcttcctgaattctgctaagcatcagaatgcagcttacacattcccaacagtttcccaaagacatgatattagcatgacagaaacagtagtagtcctttcttggaaaattatccccatttctggagcttgttttattgctggctgcaattaacaggctctggtatgtcccatccttccctcctccattcccaccccacaggcattaaaaacctgctgtttgtggaaatgaacacttctttgatcatttagaaggggttcctgttaccacaaaatttagcttttgaactcataggactggggttgaaagcttggtactatatatgcttcagattaagcaggatatagagaataaggagtgatcactaaaattctgccttgaataaagatgatgatagatatcctagggccctctgtggttagatagtctccatttctaccacatgctgaggaattgtgggtgttgcgctttttgtgtttctggcctccctgctacttgccattggttggatcactggccaagagctaccgagacctcccattttgcgtcaagattttttcaaacagcaaggaacttttttattttttaacagagagctactatcctgaggtattacaacccccttatccttcctccttacttcccctttcaataattccctttcctccctcttcccacagcaattctttggctgtgggtcctgttttcattgaaatcatgttcctgtggcagagggaaaatgagtggaaaacagttgactgtgtccgagtgatagctgcttaggaaaagcccagtccttccccagaggaggctgtccctataggacttccctccgtaatagctgtgcttccatcagctctagaggatggcttagccccctttgggggtacaccgcatttcactctcactttgttcactgccatcaccacagtccatgccatgagtacattgctggttctgcccctgcgctatgtgcatctctgctgctttaatgctgggaaactccatggttacgccccgactatcttggcgatgttctgaatcagacatagataatggtattaataggtattaataggccgataatacctagtaaagaagagctgggagatacccctgagtagattaaatcaactagaaaacactagccccctccgatttcagtactgattttatttaagtggaaaaatagttgaagtgggatgaagtagagctaacttattctactcattttatatttccatgtcctttcttttcaacctctgtttaacagggcttttatgtatttttaatttatgtgattcccaacagttgtgtgattgtggtcagagtcctgtctgtgggatgctgggtagaatgagattgtagagagcactttgttttcttgtaatagaagggtttggggtaagaatatgtgactcatagaaatctgtatagtaagtattactctaaaaagggagccatcaggatctgggagaatttgctaaaggaaaactaagaaagaaaaaaaggccagtnnnnnnnnnnnnnnnnnnnnnnnnnnnnnnnnnnnnnnnnnnnnnnnnnnnnnnnnnnnnnnnnnnnnnnnnnnnnnnnnnnnnnnnnnnnnnnnnnnnnnnnnnnnnnnnnnnnnnnnnnnnnngggcnnnnnnnnnnnnnnnnnnnnnnnnnnnnnnnnnnnnnnnnnnnnnnnnnnnnnnnnnnnnnnnnnnnnnnnnnnnnnnnnnnnnnnnnnnnnnnnnnnnnnnnnnnnnnnnnnnnnnnnnnnnnnnnnnnnnnnnnnnnnnnnnnnnnnnnnnnnnnnnnnnnnnnnnnnnnnnnnnnnnnnnnnnnnnnnnnnnnnnnnnnnnnnnnnnnnnnnnnnnnnnnnnnnnnnnnnnnnnnnnnnnnnnnnnnnnnnnnnnnnnnnnnnnnnnnnnnnncaaaaaaaaaaaaaaaaaaa

SEQ ID NO: 5430 - DNA, 638 bp, Macaca Fascicularis
tgctttcgactgagaaagagggaaaatatgtcaaaactgatgtcagaaatgcatagtttcatccagatacacaaaaatacaagccagagaagccatgactccaggagcatggcactaccccaggaacggagtcagcatccaaaaccttcagaggccggcacaaccctacctgaaagccgtcccaagactcctcagacgccgccaacaaccccatccagcagttccttcaccaagaaggatgaagcccgcccaggagcacagtcaccgcctgcgaactttagaatcatctcaccaactgcggcccctcctgtttcttctgatactttcaccaaccgccatccagcagttccttaaataaggtcaccaaggacaaggatatcaaacaaataccattcaatctttattccagtgtggaaattttgcctgaagtcctccacctaaaaacctgatgccactggtaatgatgtttatgaagataagatcgaagcacagaaaataatatatgtatatatatatctggttgaaatactatatatatataccggctattaattctaggaaatggagtattaggggtgcattaggggtgcattttatttcattagttttacttttatgcattttcttcatatcatatt

SEQ ID NO: 5431 - DNA, 1714 bp, Macaca Fascicularis
aagctctgtgttaaatgaagaagaaacagaagtccctccaagcacaggaaccactcatgtcaagatatggggcaaaaagagaggacgtatttggagactagagagtaactgaaggctatcattcaatcggtgatagtcttcatgcagggctgagacctcaaccatgggacctgcgtggtgatcaccacaaaacttcttcctgaaagttcttctccaacaacttctcacattcagttattcattcaacaaacattgagcaacaacctaatattctgggctctggagaccgagttcaaaagaagacagcaggcctctgcccccgcttcctgacaggtcactgcatcttgagtgctaagactgtcatcacagagtgaggaggggaactgagctcagaggggtagaacctcctgaaagggcagaacagctcatgcatcctgccgaggtcagaaggtgccagatccagggcaaaaatgaagacatatgggaccttaggtgacaaggaagaagctcccaggcagcatgtgggatggacccaaggagaacgtcagagagaaaggttcagtctggtgtctcctgaagcaggtggcagcatgctgacgaaggagcgtggaactggtgcctccaggactcatgacaagaccttacggagaaagaagtcacccaagggcaagtgactggagtgtggaagagtatggaagagctggaccaaatccacatggtccggtcagttctccaaacatcaagaccctgtgcggtgagggtgagccatctcagcagaaaggttaaaattaagctcggcaggctcgatgtaaatgcgcagacaaagcaaagcaggaagcctcccacactaaaaagggaagataagaatcacagaagccgggatggtttttattgaagggcatttcaaagcaaatacagacatctacagcatatttgtaaatcctccgtatgtgtatggaaacacataccttcacacatcaaaactggatttgttcctgagtaacaaaaggtcctaagaacaaaacgaaaggaaactgaatagcggaaaaatacttccatcgtataccacacaggattatttattaaccacaacacaccaagagttaagaaaataatgcaacaggaacaaagggcaatggatacgtaccgggaagaccacagagaaagaaaatgcaaatggctaataatataaaatatttcctaggttctatagtaaccagggaaagacaaaattacacttttgacctcttagactggcagtgacaaaggttatttgagtgaccaaactttagtcaggctcctggatcttctaggcccatctgggcgcttcctcataaaatacagtttcagcaaacgccctgctaaattggtttaccaagaactcctaccctcagtggagttccttatctcttcacctttcctcaggtgaggcctgatcatcctggcctatcttcagcaagggggccctaaccgtgacgtttcctcttagtaaatttccatccactgacacacacttacaatttatagccaggagcaagctccttggccttaaattattttccctgttatattcagagttgagcccaatccctctctccgactacaaaatctgatagcagtagtccctatacctattgcaatggtcccaaataaaacctgccttactgtgctttaaaaaaaaaaaaaaaaaaaaaaaaaaaaaaaaaaaaaaaaa

SEQ ID NO: 5432 - DNA, 725 bp, Macaca Fascicularis
  misc_feature (1)...(725): n = A,T,C or G
gaaannnnntgtacagtttgtgaggacttttgcactttgccatctgatgtcgnnnnnnnnnnnnnnntttgttttcgaatgccttgttttcatagagccctattctctcagacggtggaatatttggaaaaattttaaaatgattaaaattttaaagcaatcttggcagattaaaaaagtacatctgtacatgactgtataattattatagtaccactgcacatcatgttttttttttaagacaaaaaagatgtttaaagaccaaaaactgtgctgagaaagtatgccctacctatctttggtacatgataggttacataaaaggaagttattggctgaactgaatagaggtcttgatctttggaatgcatgccagtaatgtattttacagtacatgtttattatgttcaatatttgtatttgtgttctcttttgttattttaattagggtatatgaatattttgtaataattttaataattattaagctgtttgaaggaaagaatatggatttttcatgtcttgaggttttgttcatgccccctnnnnnnnnnnnnnnnnataaggactttagaaaaaagcatgtatgttttttactgtttgtaataagtactttcgttaatcttgctgcttatgtgccaatttagtggaaaaaacaannnnnnnnnnnnnnnnnnnnnnnnnnnnnnnnnttcaattctgtgatattgtccaagaatgtatca

SEQ ID NO: 5433 - DNA, 785 bp, Macaca Fascicularis
  misc_feature (1)...(785): n = A,T,C or G
gagtcatgagccagggctcctgccaaccgcctaccttccngnnnnnnnnnnnngaatggcatgtgaatgtaaaatgtgtgcttgcttccagaatcttccggatgttcctacagagggaaagaccctcaggccgctcccctgcaccttctcatgctagggacatgtgtcctagttgtcctcctagcagcatttacagaggcgttcccagcccttcactcaactcctacttagctccaaaacacctgtggccaatttgcattattccccaagttctcagggacaagaccagtgccccagcgtagtggtcagcagggaaactccacctcctgggtggaggcaccatcctaaccatccagccacaacccgagaatcagggagaaagtccctcttcagcagcccctccccctggctgggtagaacggtcccccagcaagcacttgcctgttcattcccgttcatgttttgcttctctctcggactgccttcctgcttctgggctaannnnnnnnnnnnnnnnncctcatgtgacctcgcagtcnnnnnnnnnnnnnnngtggggcattcttttgcctacagcccctggttagggaactttggacgggtcttgctgttcagtgcacctttgtacatttcaaagaagaccccatggctgctccagatgcccccttgctgggtgcgggtggggactgtccaatgcagcgctggtgggacagagtccagccacttcctaggtctccctcttatgactgtctatgggtgcattgccttctgggttgtctcaatct

SEQ ID NO: 5434 - DNA, 673 bp, Macaca Fascicularis
  misc_feature (1)...(673): n = A,T,C or G
actnnnnnnnnnnnnnnnnnnnnnnnnnnnnnnnnnnnnnnnnnnnnnnnnnnnnnnnnnnnnnnnnnnnnnnnnnnnnnnnnnnnnnnnnnnnnnnnnnnnnnnnnnnnnnnnnnnnnnnnnnnnnnnnnnnnnnnnnnnnnnnnnnnnnnactgccttggggaaaaaaaaaaaaaaagatttaatatcactcactatccagaaaagattgtcagaatattcatgattcaggtcttgaaactttgattatgcaaaagaaggtatataataaatatttcattatgattcagtttttaaggctttgcaacttctataagtgttctcagatgccactaggtacttttaaaaacatcatgttagaaatactttaagaagacttatataagaaatagaagattgttgaattttacagaggatttggttcattaagacccagattctgtaagttgtcattctgaaattctagttaaatatattcaccatttttcttaggaatcttatacaataaatccttcaggctgcacaaaagcaaattattagttttcattagaaactctggttctgaattacaatcatagattatatcatttaactgttagatggtctataaaaatgacaaatcttattaaaatatgtgcaatatttgtggaagtcaaacagcttcatatcagt

SEQ ID NO: 5435 - DNA, 720 bp, Macaca Fascicularis
  misc_feature (1)...(720): n = A,T,C or G
gccncagtccaaccacaatagcctcccctctgttctttgaacatgcggagtgctgtccctcttagagtcatgcattggctgctccctctgtctggaaggttcttcccccaggtatctgcagggctcacacctttgcctccattaagtttttagaagccgcatcacctcagagagtcctcccctgaccacattcttaaacacaggaaccctcagcatcccccactttgcttacttggctttactccccagcccattctcagaatctattatttctagtgtgctttacacctcattcacttattatgtttattgtttctctcccatcagaatataaacccacaggccggggatannnnnnnnnnnnnnnnnnnnnnnnnnnnnnnnnnnnnnnnnnnnnnnnnnnnnnnnnnnnnnnnnnnnnnnnnnnnnnnnnnnnnnnnnnnnnnnnnnnnnnnnnnnnnnnnnnnnnnnnnnnnnnnnnnnnnnnnnnnnnnnnnnnnnnnnnnnnnncagctacttgggaggctgaggcacgagaatcgcttgaacctggtaggcagaggttacagtgagccacaatcacgccactacactccagcctggcgacagagtgaaactctgtcagaaaaaaaccaaaaagaatataaacccatagggcagggattcttgcctgtttgttaattgttgagtcagaagaagggtcaaggcatatagcagggc

SEQ ID NO: 5436 - DNA, 3051 bp, Macaca Fascicularis
  misc_feature (1)...(3051): n = A,T,C or G
ccaatttccagtattgtacttagcagacaggatgtggaattttcaaatggtaagtggcaaggaacatcaattaatccagtggagaagcctcatctctctggcaccaaagacagtgacattaggaaataattagtgtcttgaatctaaatggtgtaaaattgaccaataaaaaaaaagaaaatcagaagagtgaaagatggtctttacgaattgaaacataagaaatgtctatcgtggaagagttcaattagattcagagtccaaactggtctctcttagattggtccagtatccagtacctcgtaattttgtataaactaacgttcattaatctctatgctctcaaattctctttaaccattttgtttcctcctggaacagagtggggtactcagacattgcctgctctctctctgccctataaatgctccatgatgtgttggctggagaacttttgtctcttttttcagcaatggtacaacagctccatgaacgtgatctgcacctggttgacggaccggatggacttacagcttcacatttatcagttgaaaacactaattaggatggtaaaggtaaaagaaaaaaaataattcttcttctttgcaaatagcttactgaaatacatttcattggcaagctgcagagcttgcttaacacaaagaatattagtttacatataaaatagtatctcatacaagaaaaacctatgcaattgttttgtgaagcatgataaacgtgttactcagacagcagagggaaatttaatacaaatgaatttgatatcattttccagagaggaaaaatactttgtttttgccgtgcaaaagtactgcggaggccatcgtgtctttgcattagactttcaaaaactggcttttggtgccattatgttaatcacatccattaccagtttcgtttatagtttaattaaataaaatgttgccactattaatttaatagaaatatttacccccagctatttctaaatatgtcctgtgatcattatcagaatgcaaatcaatatcgttctcatagttaattgaagtagttcctcttacaatgcgtgtatacaatcaaatgtaaaggatcgcaaaggtgagataacataccctgaaagtagctttttcccttgttcttgtgtgtgcgccttggactaatgataattatttcagcgtgaaatctcagtggtttacatgaaataataagatcacagaagggggtaaatacatttttgatcatttcagtttccatttgatgcttcaccatagagggttttaaaacattcgtatgcaaaaatctcattcaaagcacaaagtcctttaaaatattttaacaataaacgtagctgaatgtcttatttcttaacagtttaccaaaagtccctgcaacacccactcctgggtaccccacccccaccccatttcttagtctcctttggatcagtaccatttcactttaccccagagcttacggacaaccaattgctgttccgttgtgtgtaattaaggagaattattattatctgcatttgatctcacaaagcatccgcctgggaaaagttatagacagcagtatattacagctcttaaaaaaggaatgtatacactcagactatggacccagcctccttttcacatttttttatttcagttccttaggaccagctcaatagtcaagtggtcgcctgaccacttgaattccattttctgtgcataaatacactttgggaaatttttctgtttgacccttattgggtagacgtgaaaagaagatataattttaatacttaaaaattgtcttcccattatttctatttccagattggtattggaaattaacaatattttacgaaggaaaaatataagtcagaggagaggtttaatcttagccttatgccaaaaaaaaaaaaaaaaaaaatttgatatgaaccacagagaagggatacagaaatgtcactgccaagggaaccccttcactttagcaaaaagtgggttccgcttaactaatgccacaactcagagctatgaagcagaattcacaacctttaaaccaagaacatcacccagaggcctcctcctccagggcaaatttccaaggataattggttttctttctcgcatcaacagccacttcatttcttcatccattcattcattattcagcaagcatttatttattcattcaacattggataaatattaggtgagcctctacttgtatattaccagatggaggattcaaaaatgactagatgtggtctctgcacttaggcattgagagtctagttggtatacacattgctatggagtttgaataaaaaagagaatactcaaatgcttttacctttattttccccatcatattctggcaacaattatgttattctgagtggcaacagaacaaatgattgaaaagtataaaaatttaagttaattgtctggatatctggtccacaccatgcctaacatttactcagtctcttacctgtccccatcaaagtgaaaacacagttcaggtagctgtctagcttcctcttctcggcaagccttgcaggttgatgcatgattgaggataaccttgtaatttaatgtctaaaccagattacttttatgttattggacttcactaagctgaactgggttcactcgttaactctatagtcattacaacatgtgaccttcaagaggggttgacattatgattgttactatcatgactgcattagatggactattaaaaatagaaataatgggccgggcgcgannnnnnnnnnnnnnnnnnnnnnnnnnnnnnnnnnnnnnnnnnnnnnnnnnnnnnnnnnnnnnnnnnnnnnnnnnnnnnnnnnnnnnnnnnnnnnnnnnnnnnnnnnnnnnnnnnnnnnnnnnnnnnnnnnnnnnnnnnnnnnnnnnnnnnnnnnnnnnnnnnnnnnnnnnnnnnnnnnnnnnnnnnnnnnnnnnnnnnnnnnnnnnnnnnnnnnnnnnnnnnnnnnnnnnnnnnnnnnnnnnnnnnnnnnnnnnnnnnnnnnnnnnncaaaaaaaaaaaaaaaaa

SEQ ID NO: 5437 - DNA, 786 bp, Macaca Fascicularis
  misc_feature (1)...(786): n = A,T,C or G
agattcagttacannnngacagcatattcactgattctaaatgggctggtcccatcactgaagattctgtatagaatattaaaaaaaaaatccatctttctttaatttcttcacatgcgacaattcttaagcactttgacattttggtagttccacactattgagagaataatatatttattttgtgacnnnnnnnnnnnnnnnnnntgtaaccttctcgtgataacaatacttaggttcaacatcactgttcaaaccctgtcatgctttaaaactgatgcgagatgattttgttttttgcataatcaatacttaagggtgcaatcaactgttagtaattgtgcagtaaagtaaagccctgtggtgtatcaactactagttaagagtctcagttgatttctgtaatgtttgacctaatattaacccattttgtctctgacctaacagaggaagcacagatcaaatcaccttggagtggtcaccggggggacagggagccccgaccaatgtatcaatgggtgatttatgatgccttctgccctttggcgagtgaatgggtttcccataggggaagttggcctcccttcgtgagctttggaagtgttttctaatacacacagggaggccagttttgtttcagagcaattatcttcccaaattctctgttctggtgttgggactgtgtgccctggtttctgttttcctttctactgctgtaattctctgtctcatcatcctcctttttgtttccatagccttttataatgcatatatgatgctggaaca

SEQ ID NO: 5438 - DNA, 720 bp, Macaca Fascicularis
  misc_feature (1)...(720): n = A,T,C or G
agctaactccagggatatgtatcacctttgacttaattccctttctctaagggaaaggnnnnnnnnnnnnnnnnnnnnnnnnnnnnnnnnntttttataatggaggagagatattgtaaatagannnnnnnnnnnnnnnnccacaaaaaaaaaattgagttcataaatttgacttgtttgaacccataaagcattttctttgcttagaaccactataaaagtgagtgagttttcaggctctgtatacgttttaattccccacgttttatattggagagttcannnnnnnnnnnnnnnnnnnnnnnnnnnnnnnngagtgaactgttgcctatggagaaggaacacttcttcttcctgctgtctgggaaccatctcagtgtggcataatggttaagagtacagattccagaccctgtttcttagatttaaatcttgactctgccacatactagctgtctgacttaaccttagtttctctgtgcttcagtttcttcatctgtaaaatggagataatagtacttacctcatagagctgttgtgaaaagtaatgactgaatatgtaaaagcactnnnnnnnnnnnnnnncacatgctaagtgctttgttcattattgttgttattatgtaattttctcttagactgagagcactgttagtgactcaagtaaatttatagtttttaagttcaggggaaaaaaagccttattttttgttaacagtc

SEQ ID NO: 5439 - DNA, 687 bp, Macaca Fascicularis
  misc_feature (1)...(687): n = A,T,C or G
aactcttgcttcccgctattctgactgtgtggactgtataatcagtnnnnnnnnnnnnnnnnnnnnnnnnnnnnnnnntacaactcagtaaccctggcttggaccactctcaggagtccatccttgagagactgggggtcattaccatatatacagtaatcattgcattttaaaatcttctgttaaaaggaagaataagagtgcaccagaatgagaatgtgccagctaacaatgtgatacagccatgtgtcacttaggatagagatacagtctgagaaatgtgttgttaggtgattttgtcattaaacatcatagcaggtacttccataaaactagatggtacagcttactacacactaggctatttggtatagcctgttggtcctagggtacaaatctgtacaacatgttactgtattgaatacagtaggcaattgtaacacaatggtaagtatctacacatagaaaagggacagtaaaaatatggctttataatcttctgggaccaccattgtacatgcggtacatcgttgaccaaaacattgttatccagcataggactgcatttggttatgaaaggcaactgttatttgattctgcttttagttcttaagaggatcaggtttttaaatactcatttacaagttttctatcctccttgagtgttaaagtagaaagtaaaaagag

SEQ ID NO: 5440 - DNA, 755 bp, Macaca Fascicularis
  misc_feature (1)...(755): n = A,T,C or G
catgggcggggagagggaggtgcgctctgcttatctgtgactgtgnntcnnnngagtgtggctgattgtgtacatccagcagttacaatttttaaaaattttagagttattctatatttttctcacccccagtaatttccttccaaataagttcacatgtaataagtagaaatactgtataggaaaaaagcattaaaaatactattataactgcttcatttgctgggaaccattaaaagtattgtaaattagctttttccagaaggatcctttnnnnnnnnnnnnnnnnnnnnnnnnnnnnnnnnnnnnnnnctatatattagggaagccagtctggagcagaggcctgaaggtccctgctatgcagccgtggccacagctcaccgcaccagcgctgtggagcacccgcacctttgatggcaatgcagagtggtagcaggctccataggcgtgacaaaacagtattaaagctcagcgttttgcatacttttagcatttaaaaatatttttgctttagtgtgaggaaagtaaggatgggcaaagaggcgatcaaaatagctatagctatgacattttagaaaacaaagtcggggccgtatttctttaaaaagataagcctctaaaaatgcttggctgaaaaagtacagtgttaaaataggcagtgatattaatgagaaaatgaaagtatgtatcaggaataaagtgatattgcataggagtattgtatttttatgaattttatnnnnnttgtttac

SEQ ID NO: 5441 - DNA, 2671 bp, Macaca Fascicularis
gtgcgttccaggtcgccatcttggaccatgcgtcaagatggcgccccatggtcccagaggtacagcccaggcatgccggtgacgctacgcacgcacgtattcggcttcgggctcagaatcaggttctgaaaaaaggtgttgtggatgaacaagcaaattctgcagctttaaaggagcaactgaaaatgaaagatcagtcattgagaaaactacaacaggaaatggacagtttgacatttcgaaatctgcagcttgccaagagggtagaactacttcaagatgaactagctctaagtgaaccacgaggcaagaaaaacaaggattgtttgagaatggtgaacacgtagaagagacaagcttctaaggtgatagagaatctgtgtaccttaggatgtttctctaaaggatgaaagttatgtggacataacttattctttccatcagaaaagtggagaatcttcttctcagttgagtcaagaacagaagactgtctttgatgaagatctgcagaagaagatcgaagagaatgaacggttgcatatacaattttttgaagctgatgagcagcacaagcatgtggaagcagagctgaggagtcggctggccactctggagacagaggcagcccagcaccaagctgtggttgacggtctcacccggaagtacatggaaaccattgagaagctgcagaatgacaaggctaaactagaagtaaaatctcagactctagaaaaggaggccaaggaatgtcgacttcgaacggaagaatgtcaattacagttaaagaatcttcatgaagatttgtcaggtagattagaggaatccttatcaatcatcaatgaaaaagtaccttttaacgatacaaaatatagtcagtataacgctctgaacgttccactccacaataggagacaccagctgaagatgcgagatattgctgggcaggccctggcttttgttcaggatcttgtgacggctcttctaaactttcatacctacacagaacagaggattcagatttttccggttgattctgccatcgacactatatctccattgaatcagaagttctcacaataccctcatgaaaatgcgtcctatgtccgccctcttgaggaaggaatgcttcatttatttgaaagtatcactgaggatactgtgactgtcttggagacaactgtgaaattgaaaactttttcagaacacttaacctcctacatatgttttcttaggaagattcttccctatcagttaaaaagtttagaagaagaatgtgaatcctctctttgcacatctgcgttaagagccaggaatctagagctgtcccaggacatgaaaaaaatgacagctgtgtttgagaagctgcagacttacatagctcttcttgccttgccaagtacagagccagatggactccttcgggcaaactacagttctgtgttaacaaatgttggtgctgctctgcatggatttcatgacattatgaaagatatttccaaacattatagtcaaaaagctaccatagagcatgaacttccaacagcaacacagaagctgataacaactaatgactgtatcctgtcatcagtagtggcattaacaaatggagcaggaaagattgcatccttcttcagcaacaatttggactacttcattgcttcactgagctatggacctaaggcagcgagtggattcatcagtcctctttcagctgaatgcatgctacagtataagaaaaaagctgctgcctatatgaagtctttgagaaagcccctcttggagtctgtgccttatgaggaagcactggcaaaccgccgcatccttctcagctctactgaaagtcgagaaggccttgcacagcaagttcaacagagtttggaaaagatttctaaactggagcaggaaaaagaacattggatgttggaagcacaattagccaaaatcaagctagaaaaagaaaaccagcgaattgcagataagctgaagaatacaagtagtggccagctggttgggctggcccaggaaaatgctgccgtgtcaaatgctgctggccaggatgaagccacagctaaagctgtgtccgagcccattcagagcaccagtctaattggcactttaaccaggacatcggacagtgaggttccagatgtggaatctcgtgaagacttaattaaaaatcactacatggcaaggatagtggaacttacgtctcagttgcagctggctgacagtaagtcagtgcatttttatgctgagtgccgagcactctctaaaagactggccttggctgaaaagtctaaggaagcattgacagaagaaatgaaacttgccagtcagaacatcagcagacttcaggatgaactgacaactaccaagaggagttacgaggatcagttaagtatgatgagtgaccacctgtgcagcatgaatgagacattatctaaacagagagaagagattgacacactaaagatgtccagtaagtttcaccatgttgctcaggctggtctcagactcccatgcccaagtgatctaccggctgcagcttcccaaagtgctgggattacaggcgtgaaccactgcgcacagcttcttagagcttgttgataaaataccagccattaataaaactctaagagacccttaaaaaaaaaaaaaaaaaaaaaaaaaa

SEQ ID NO: 5442 - DNA, 752 bp, Macaca Fascicularis
  misc_feature (1)...(752): n = A,T,C or G
agttcaggtctcnnnnnnngcagtccagcagtgacatccctgtgaatgtgaccaactcagaccttgaaaagactccttgatgacaaagtcaaggtagccacaaggtgaaggaaaataacccaagaatggaaaaatccattctagaaggacaggtggtggaacagggaatccatacacacagaacaggccaaacaatggtgggaacgatggttacaggacaggatgtaagtagtataaaccttgacaatgtaaaaatgtgaactcaaaaaatttgggagggggaaggagctaggaagtggtggtgagctcatttccttatcctaaatcgtaggttgtcaagagatgccatctatagttgaaacatgtcgaaagaatgaattcagctgcttaatatttttctttcctttagagaaataatttagcaccagaagcagcagcatcattatttgcagcttggtggtttctttagttacatttaagttgccttttgttctgttaaatttaagtatggcactttttctaaaaagagtaggtattgtatgagcccattttggttaaaaaaaaatccttttctctgactatgtgcgtagagagatgtctccatccatgttctctgggtgtcagccatgattatttctgggggtgctggatttccggaccacttgaaatttttgttttttgtactcttcggtgttacttgaatttcttataatgagcatgcactatttttatcaaagcaaagctttttaaaa

SEQ ID NO: 5443 - DNA, 709 bp, Macaca Fascicularis
  misc_feature (1)...(709): n = A,T,C or G
tggggagagcttaggtnnngagannnngccctacctccaggttcttccctctcnctagctgtcgctttggtctggctgccactggcagcccccttgtccccttggaagcttgccctgccctcatcttgcccatgccttctactgccaggagacttgcacccatttcaaccctagggcaggggcaagtggggcaagggtggaccagcagaaggggggtgaggctctgttcacttcccccnnnnnnnnnnnnnnnaagccacggattccgttatcttcctccagttttgttccttctccagcctcagtttcaccaggtgtcaggactgcatgagggcctagggcagggagaggggtcgggccagggtccctgacggagcagcactcagcatgtgagtgaggccacagaaaactctgccccactgcttcttacctcacaggggtggttttcagggattcttaaggcagcagattaaaatcttgccacagtcgagaaattgacaacaagcttccatgctgtacatggttctctttttctctcttttatttttaaaatgaaaacccagaaagatgcgccagatttgtataaatgagggtatgccagaaggtggccagttttgctttannnnnnnnnnnnnnnnnnnnnnnnnncctacatatatatatacacacacatacatatatatatcccgaaccaacaacgggactttgt

SEQ ID NO: 5444 - DNA, 484 bp, Macaca Fascicularis
aggccagcacataggagagatgagcttcctacagcacaacaaatgtgaatgcagaccaaagaaagatagagcaagacaagaaaaaaaatcagttcgaggaaagggaaaggggcaaaaacgaaagcgcaagaaatcccggtataagtcctggagcgttccctgtgggccttgctcagagcggagaaagcatttgtttgtacaagatccgcagacgtgtaaatgttcctgcaaaaacacagactcgcgttgcaaggcgaggcagcttgagttaaacgaacgtacttgcagatgtgacaagccgaggcggtgagccgggcaggaggaaggagcctccctcagggtttcgggaaccagatctctcaccaggaaagactgatacagaacgatcgatacagaaaccacgctgccgccaccacaccatcaccatcgacagaacagtccttaatccagaaacctgaaatgaaggaagaggagactctgcgca

SEQ ID NO: 5445 - DNA, 1243 bp, Macaca Fascicularis
  misc_feature (1)...(1243): n = A,T,C or G
ttaggaggtagacttgacagtnntaggaaggttgacataaaaataccaaccttaagtaaagctctagtacaaaaaagggtaaatgtcatcattcttatttttaggcctctttcttgagagaggtgggagtgggaggtagtgttataactggcactttaattcgtttttggaactagaatttaggggcagttggatgaaattgcaaattttgaaggggaataagaattttctannnnnnnnnnnnnnnnnggagaaaaaagccttgctttcatctttttagaatttattcttgatttttagcacactgtggggcttttagagctaatatgatctaaattcagaaaatttaattttcataacaggccaggtgtgaattacgtatgtttgctatagaatgcttatttagactaataataaatttactttgctgtctaaggctagtcagagaatgtggggatgaggcaggatgttttcaattagccagagatgatccacaaagtgaacagtccacacagaggtcactgagttggatggttgcaaatatattgacattagagtgaaaactccttcctttgggtaaaccaaagaaagatacagtatattgaaaaatgttaagatggtgttatacaaaaaaaaaaatttgggtctaacgtgtgcatgaagactgtcaagtgaagaatggtggagattctgggcgtttgagcagccagcctagatgagtgacttcagggacagagagcagaggaaagcaaaataaatttcctttatttacccaaagtttgttgactgaatttttgtataggtctgggaaaataagcctaaacaaatagttgtacccttagaaaaactgtttccccatttctttctgagttagaatcagcatagcctgcctatcgccttaaatgtaaaaatcctattttgattaataccccagcctaagagttacagccatacaagagactgaatctatttttgtttcgggtctttacctcatattatgaaattagtaagacacttcataaattttgccctgaacactgatgtgcccaggtatgccgtgctctctgtttccagtggtggtaattttaaggnnnnnnnnnnnnnnnggttaatcctgaagctaagagtaaatgtttcttgcattgattttgttctgtggtacaaataacatctatgaatatcatatctgtatatatatgaacccaagttgcgtgcagagaggttgatataactatattacaga

SEQ ID NO: 5446 - DNA, 737 bp, Macaca Fascicularis
  misc_feature (1)...(737): n = A,T,C or G
gtcccagcacatttccttcattcttgnnnnaataatcatcgttacatccatcagaggactgctgatcactcttaccaagttcttttatgccatcnnnnnnnnnnnnnnnnnnnnnnnnnnnnnnnnnnnnnnnnnnnnnnnnnnnnnnntgtactttgtctcctctgtgctgctgatccgaatgagtatgcctctagaataccgcaccatcatcactgaagtcctnnnnnnnnnnnnnnnnnnnnnnnnnnnnnnnnnnnntgatgtgatcttcctggtcagcgctctctctagcatacttttcctctatttggctcacaaacaggcnnnnnnnnnnnnnnnnnnnnnnnnnnnnnnnnnnnactacagactattagaggccagtggtttcaaaatttagatctaagagggggaaaaaatggaaccagggcctgacgttttataaacaacaaaatgctgtggtagcatttttcacctcatagcatactgtttcccggtcgggtgatactatgaccnnnnnnnnnnnnnnnnnnnnnnngagagggagaagtaactcaagacagtactcagcnnnnnnnnnnnngtgtggatttgaggctggtgcacaggtggagaggagccaagaaactaaaggggaaaaatacactggaactctggggcaagagatatctatggtagctgggccaaacacataggatttccgttttaaggttcacgtggagaaggttatagctttc

SEQ ID NO: 5447 - DNA, 725 bp, Macaca Fascicularis
  misc_feature (1)...(725): n = A,T,C or G
ctccatccactacgtggcatgaagggtacagggaaggagggaggaaaataaccctatgttagtcatgtttgnnnnnnnnnnnnnnnnnnnnnnnnnnnnnnnnnnnnnnnnnnnnnnnnnnnnnnnnnnngtaggagagacaaaggggcttttcctctannnnnnnnnnnnnnnnnngatggacaagtcttctttcataaaaaattacaaagaaggcatccgaatcactgtcnnnnnnnnnnnnnnnnnnattaatcaccgcagctaattgtaaatctttctatgaaacactgaaaagcctctttgtgnnnnnnnnnnnttctgnnnnnnnnnnnnnnnttgaaaagacatttctctgtatgtggtgcatgtcggctttgctttgaaaaataacaaagttagcagaatatgttcaatatattttcttggggaatagggtttttattacatgattcattaaggatttgccttaccctgacatttgtgatataaaggaaaatcagaaaaaaagtaattttcttgatcaaggtatgtttttacttaatgcaaataaatgtagtctgttgcttgcaaggannnnnnnnnnnnnnnnnatatctggtataaactgctaaataggataatacgtgcctcttttgttaaaccagcatttnnnnnnnnnnctgcttctaaatctgtttgtttcttttcatctgtgccatacactaaaaaacaactgtnnnctt

SEQ ID NO: 5448 - DNA, 734 bp, Macaca Fascicularis
  misc_feature (1)...(734): n = A,T,C or G
caggttcaagcaattntcctgnnnnnnnnnnnnnnnnnnnnnnnnnnnnnnnnnnnnnnnnnnnnnnnnnnnnnnnnnnnnnnnnnnnnnnnnnnnnnnnnnnnnnnnnnnnnnnnnnnnnnnnnnnnnnnnnnnnnnncaaaaaaaaaaaaaaaaagacaagactgatatcgcacctaaaatattattatattaaaagaagcagagtatgagacgtaggtacatggtccagtaggaagagaagcagccctgattctaccacttaaggtggtatatgatcttaggctggacacttctatctctcatccattttcctcttcaacataatgaaatagacttgaaagtctctaaggctctatcagttctgacattctaggcttcatatannnnnnnnnnnnnnnnnnntaatcactgtgtaggttagaaacagctgagtattgtannnnnnnnnnnnnnnnnnnnnnnnnnnnntgatgtggctggtgaatacttctgatttcagaaactatcccagatctcagctagaaccatccactgttctgtttgtccagtttcaacttaagggatctccatgtggtccccagaagtacccactgaaacatgcatatctgtgtatagcagaactctgaaataatattttgatagtagttatctctgaggaattgaattatgggtgattttccctttccacattataagtttatgtaatatttgacttgaccataagtatgtta

SEQ ID NO: 5449 - DNA, 583 bp, Macaca Fascicularis
  misc_feature (1)...(583): n = A,T,C or G
ggggcctgggggaacccgcctaaggtgagagatctcgagagactagctcgacgaattggggatgtcagagactgccccttggcgacgcagggggcctagagagcctcatgatggacggcaagagaggcccaccttttccggtgcttggagacaggtcggcgctcctcccccatgagggcttggggcggcctgggacgccggcgggctggacagtgtcaagccgagagctacttgcccgaaggtacggggagccaggacgccccctgctggacagggagagcctgagacacccttctcttgacccctgagaacacacccacctctggctcctcgagtctcccctctcctatatttaactctgagaagtgcagactttttgctgagaaagtattgggaaggttccctgatcaagcggtgagaagcccggaatcccctttgggaaaactttcccccattaattgtgacaagccaggaccacgaggaaggggctagcggtctgtcacnnnnnnnnnnnnactaaagggccctacttgatggttttgaggggcaacgttgactcatttgccccttccctctcagaatg

SEQ ID NO: 5450 - DNA, 767 bp, Macaca Fascicularis
  misc_feature (1)...(767): n = A,T,C or G
ggggccccaggtacntnnnacatggaaactctttggatggctgggcaggtacaagcctgttcatgcagtcagccaacnnnctgctcaggttcagctggactctgccatctgtgggcccagcatcactctgtaagttccttgaaaggaagaacaaccttagagtatttctgatataaaatgagggcctgttctcttgatttaattataaaatgtctacgtctttctccagtttctaagccttatgcacannnnnnnnnnnnnnnnnnnnnnnnnnnnnnnnatcagagaggaacattccatttatttnnnnnnnnnnnnnnnnnnnnnnnnngtacccacactaaatagcaactgctcttcctcaactgtagtccccaacatcagacttggcacgtggtggacactaacacacagttactaaatgaatgagtgaagggaagaaaagtcaccccgttggtgagaggtgctatccctgagtctcagtgcaggcccagtggatgaaaggcaagataaagaggcccaagataggctggcttcccccattcaaggtatagtctgcctttaaggnnnnnnnnnnnnnnnnnnncaagatatgcaaagaaatcttgcaagagcattattgacttagacccaaaacagcctctctcatgtctaaaaaggcacagcattttgcaaatctgaggaagagggatggttgcattacatttttgcttccttttaattgcttagtgtttctaatcatacttaatccgtattaatgtgcacaa

SEQ ID NO: 5451 - DNA, 721 bp, Macaca Fascicularis
  misc_feature (1)...(721): n = A,T,C or G
gcattcggcagctcggctgannnnnnngttggcctaggannnnnnnnnnnnnnnccagggctctgggaggggaggggaggagagttgtgtcccnnnnnnnnnnnnnnnnnnnnnnaagcatccagtctcttccagtcctcccattccctaggttggggtaggggttagaggctggtggcccaggaggtcacctgccttgccctggattccctcttcagtggccaggaggaggacttggcagggccaccagctcgccaaggttctgggcggggctctggtctctcctgcctgctcctttgctctgcnnnnnnnnnnnnnnnnnnnnnnnnnactcagcaaggccataccaggacannnnnnnnnnnnnnnnnnncctaccagcacnnnnnnnnnnnnnnnntttcttggccccatagtcacaacactccacttggtcacaaagacttcagagcaataaggggcgtnnnnnnnnnnnnnnncctcccaggcctgggnnnnnnngtttagagggtgctgcggagcagcatgagggcggctgnnnnnnnnnnnnnnnnnnnnnnnnnnnnnnnttggctaggttggctcaagccaggtctggcctggcagggtgcagtcacaccaagagtgcgtggcaggtgcagcctcggcgatgcctctcttgccgggtgggggctaggagtccctgtgcgccctgtctctagcccatgaggggctgcggcac

SEQ ID NO: 5452 - DNA, 2669 bp, Macaca Fascicularis
aagtgaatacaaccaactgtggccgtctccagagctgctcagaatgcatcctggcccaggacccagtctgtgcctggagcttccggctggatgagtgtgtggcccatgctgggcagcaccgagggttggtccaagacatagagtcagcagatgtctcctctttgtgtcccaaagagcctggagaacgtccagtagtgtttgaagttcccgtggctacagctgcgcatgtggtcttgccgtgttctccaagctcaacatgggcatcctgtgtgtggcaccagccaagtggagtgactgtactcaccccccggcgggatggactggaggtggtggtgaccccaggggccatgggcgcttatgcctgtgaatgtcaggagggtggggcagcccgtgtggtagcagcttacagcttggtgtggggcagccagcgagatgccccgagccgggcccacacagtgggggcgggactggctggctttttcctgggggttctcgcagcatccctaactctccttctgattggtcggcgtcagcagcgacggcgacagagggaacttctggctagagataaggtgggcttggacctgggggctccaccttctgggaccacaagctacagccaagaccctccctccccctctcctgaagatgagcggttgcccctggccctggccaagaggggcagtggctttggtggattctctccacccttcctgcttgatccttgcccaagcccagcccacattcggctaactggggctcctctagccacatgtgatgaaacatccatctagagctgggcaaatgaccactagtgtataagtgatcactggaacggagggaccactgagatgctgcggtcactaggcctggaagaccatcccagcctctgagttctctttgagtatgagtgattacttggactttagtgtctgttctctctgagtctggatggacttggggccagacctttgcctgattcccgattgccatgaaagatcagaactgctttctgcagcagtcagggcttctgcccaacatctgaacccctgtgacccttcatccctggccccctatcttgggcccattagttttggggatggggcacaaggcatagctatgactttgctttctggttggagcctgaccagaaggaagagccctggaggtggttgggggcgaatgtgcactgagtccttggggtggttctgcttattcttcaagtttatctgaatttctgtggggagtgcatgatccccatgttgtgacatggagtctctgccctgagatcttccccatctcagttttccttccatgaatgagtgtgtgtaaatacatggtgttcataggagacctggccacatgtgcatgaatgactgggctgatgcttaggaatatttatgagggatggggtgggagaagattggaataggaatattacctgcagaactttagaccctgtagccatagagggaatggctttcctttctaaaaggaactgaaacactgcccctctccccattgccccacaaccttactctaaatttgagtagagaaaagctcgtaaagtgactttccggctgggaagggcagcagtacacatgactccatatttttctttgtttttgccctttggctgccaccactgccatgtcacagctgctttctctggctagagtgtaggctgtaccccattttcttggctcccattggaaattaacagcattctgatggttagggaacaacagaaggggaacagtcataggatatacaagcagtataaagataggttcacaatcagtgactttactcagggtgacacccttgccctaaagcaagagtcccccctacctggggtccatggactccctgaaattgtatgcaaaatattgtttgtacatgtgtgtctgtatgtctctgtgggggaggttttatggcttttgtcagattttcaaggccttaacaaagttaaaggaccgctgccctgaggtcactgcactgagaccaagctaggatggcatcactctgtggcagctctgcctggccttgccctgcctggaacagggtgattgctggaatggagttaccactgagatgccagaggttcctgggtctggaagacttgttgcctttcagctgtctttgagtctgactgactgtggccagtccctgaactggtagctgctggaggccttcttgtttctccagtccctggaagctgagctctgtgtgtatttgatgacattgtcaactctcaccaaacttcaagacctcttcctgcttgaccactcgcacatgctctaggcttctgctcagtactggtcttggcctgtgaatgtgcctcgttcacccctggtgcttgagcccctcaagctccagtcaatgatccagtcctgcccctttgaagttttctcctctgctttccttggcagcagcctgcaaactactcaaaagagtccccttgggtttggaatgatcagtggctttgccactaataaatgtgtgatctttggcaagtaacctaacctagggacattagtttactcatttgtgaagtggggataacaaaaacctacctcagggttgctacaaggattacatgagaaaatatgtcaacaataaagacctgtctgtaccaatataaaaaaaaaaaaaaaaaaaaggccaca

SEQ ID NO: 5453 - DNA, 755 bp, Macaca Fascicularis
  misc_feature (1)...(755): n = A,T,C or G
gatgtgatgagcaggtacctatacattttatttacttgaaaacattttggccattaactatttctgtnttctaaatatacttgtgtttataaaattttaaaatctatatcacaagccttagacatgcctttctttgcaataaatgatttgcaatgaagtatatatacctttttacaaatgtgaattttattttgaaacttggcattttctttataattcctaagacatctttgggcacacagactacagataaatctatttaaatcaattcatcattatcactggtttaatatttaatgtaaccattggaatttttattcttattccttcacagaattctccttttcttctatgtttctgactgcaatacagcccaatattgttattccctatatcttaatgaaaagcaaactgtcggcaaaatgcatttatagtttccagatgttaagcaatctctttcttcttttcttttttgttattatttttatttatgtgaagttagttagctgaggtaccaaaaaagagacaaagacagtattaaaaagtgtgcataaagcacttatttttgtactttagtacaatgttttatagaactttgtgatctatctaaatatattaagtaaaattacaccattcacttgttgggaaaataatctttggtttggaagatatgagcataatgggcattttagaatcataaatcgcatgaaatgagagacaatgcaatattgtataactcctggatgatgcaattg

SEQ ID NO: 5454 - DNA, 152 bp, Macaca Fascicularis
catttttagcacgtcaaagatgtcacttaccatttgtaagaactcatcaaaaataacattgaacttactttatcttttctagacccttaggctttggggagagaggactcagatgatagtggcgaatgtctggcagtgaggacacattttcg

SEQ ID NO: 5455 - DNA, 1831 bp, Macaca Fascicularis
  misc_feature (1)...(1831): n = A,T,C or G
caaatgcagagccaaggtgttgcacagccagactccttttgctcagcccatcagcgtgtgatggaaacagaggcccagagaggttaggtgacctgctcagggccttccagcccccacagggctggaaccaggatccacagcccccagcccagagtactggacccgacacttcaggggaattgctgtgctgagctcacatgagagaggtcctgctagctgctagcctggggctcacccgcctgctgcccaccccttcaacaccgttagagggactgacaggcacgatggtgggaacttccactgcagacacaaagcacaccaccacctgaggtgcagggtcatgatttgaatcccaccaagtgcccatcatgcctttcccaggttgcagggaaaacaggaccccagccccacacggtccctggccacctgctgctcatggagccttgtctgcccacctttaggaagggttttgtgtgtgaaggcgtttgcatgcacttgtctggacgcgtcttcacagccctgcaaggtggatttgattctcatccccatcttgcaggtgaaacatgttcccagagtctgaatagtttgccaaggccacagagccaggaaggggtgagccaggactcaaacccaggtcttatgactgccactttctctctctgggggttggtacccccagtcccttccctcctggtctgtcagagactcagcggagaccccaggtgtaggctcagtaagctcggtgcatgatggagacctggggtcttgccactgtcctgcctcctcgtccgctggctttgaaaccatctgtgctacttcaggcttccccagaggtgcctaaccaggccccaaaattcagccaccccaccctagcctctgggggctgaggcaagggcccctcttttctccacacagaatgggcatcctcggggggcctaaggtaagaggtggtctatttctaaaaggcctggtgtctacgtaagttctgggcatcgtcttagctttgctttttttgtgggtctcattcagagaggagacttgacagcctctctgaagacacagaagtgaatggcaaagctagaagaggctgcaccctccacccagcatgacttccttataggcacatggggaacttggggcctgtgggcggacggggcctgctggggcacagctggggcaagaacccagagctccagccccccagtccagggtcctctaccgcccaggctgcacaaatggggctgggcctgacagacggggagtcaggctgggaggcgggctcactggccatcccgggggcagcacgggcactcgggcgggaaacccccaggaagttcggaaacttccttccccaggatcccagcacccttctagatcccgtgcagattgtctttctgttaaagcgctttgaggccgggcgggatgcctcccnnnnnnnnnnnnnnnnnnnnnnnnnnnnnnnnnnnnnnnnnnnnnnnnnnnnnnnnnnnnnnnnnnnnnnnnnnnnnnnnnnnnnnnnnnnnnnnnnnnnnnnnnnnnnnnnnnnnnnnnnnnnnnnnnnnnnnnnnnnnnnnnnnnnnnnnnnnnnnnnnnnnnnnnnnnnnnnnnnnnnnnnnnnnnnnnnnnnnnnnnnnnnnnnnnnnnnnnnnnnnnnnnnnnnnnnnnnnnnnnnnnnnnnnnnnnnnnnnnnnnnnnnnnnaaaacccacaaaaaaaactgctttgagaagctgcagaagcggctctgcctttgaccccgaacgggcatctttactggggtccatcagccccacaaagacaggaaatctgatgccaaaaaaaaaaaaaaaaaa

SEQ ID NO: 5456 - DNA, 696 bp, Macaca Fascicularis
  misc_feature (1)...(696): n = A,T,C or G
tgtggaggtaagattgaagaggcggatgccnnnnnngtggctcagcaagaagttgttgaggggcgactcctcgtggaggagcgcccagctctggtgcgccaggcgcggcagcggcgcggccgaagcgcggaagtcggtgccgtagaagagcagcgcgcgcgtccgcgagtccctcagcgctccgcggttccgggacgccacgcannnnnnnnnnnnnnnnnnnnnncgctccgagtctcccgggaagtgggggaatagccctgggctcnnnnnnnnnnnnnnnnnnnnnnnnnnnnnntcctccctccctggtctcggcgttccggagctgcgcgtcacccccactgcgcccagcgccgagggcggccggaaaaccgcgccatcccacggttccgcccactccgcctcaccgccggcctccctctccgccacggacccataggcgctggcagcacagacactgagcacccccaggagggccagcaccgccccagtggggccggccgccatgtccactctggcagccggcgccctcggccggcacgcaccccgcccagtggctagttgtgactggacgaggctctatgccacgggagcacgcggcgcatnnnnnnnnnnnnnnnnnnnnnnnncagggctaaannnnnnnnnnnnnnnnnggagtaaacatgaggctaatggttacatcttaattta

SEQ ID NO: 5457 - DNA, 672 bp, Macaca Fascicularis
  misc_feature (1)...(672): n = A,T,C or G
cattnnnnnnnnnnnnnnnnnnnnnnnnnnnnnnnnnnncccatgggggtgaccaccaagtggttttccaatggactaagccaagggttcgaagttgggacttcccttggtctgggactnnnnnnnnnnnnnnnnnaggagctgacatctggaaactggatcgcattccctgagccatgggagtccagctggatattaacgccagcctgccctccagcttttagagccgaagatcttttttctgagccccaaagnnnnnnngatagtatgcccccagattccnnnnnnnnnnnnnnnnnnnnnnnnnnnnnnnnnnnntgtgaggttggggattttctgccagtaaagccattctgatcaccccacccttgacaggggccaagccaatcacattagccataaatgaccaatgtcctnnnnnnnnnnnnnnnnnggggtgcatttgtgggtcctatnnnnnnnnnnnnnnnnnacgtctctagtccttcctgtaaaggtgaaaacgagcgttgcacatgtgcgcaacacacacacacacacacacacacannnnnnnnnnnnnnnnnntttatgcatgtggtgagatgaaattgtgatctttgtgtgacctccagctgctgtcttgtcttgtaaaatatgtccaaatgtttaagaatttctaagcaaatggtc

SEQ ID NO: 5458 - DNA, 842 bp, Macaca Fascicularis
  misc_feature (1)...(842): n = A,T,C or G
cagactgtttaactgtnannnatagcagccatcgtggatgagaagnnnnnnnnnnnnnnnnnnnnnnnnnnnnnnnnnnnnnnntctatggagcagattcggcgaattatgcgaccaactgatgtaccnnnnnnnnnnnnnnnttgtgatcttttgtggtctgaccccgataaagatgtcttaggctggggtgaaaatgacagaggagtgtccttcacatttggtgcagaagtggttnnnnnntttttccataagcatgatttggatcttatatgtagagcnnnnnnnnnnnnnnnagatggatatgaattttttgcaaagaggcagttggtcactctgttttctgcgcccaattattgtggagagtttgacaatgcaggtgccatgatgagtgtggatgaaacactaatgtgttcttttcagattttaaagcctgcagagaaaaagaagccaaatgccacgagacctgtaacgcctccaagggttgcatcaggcctgaacccgtccannnnnnnnnnntcaaattatagaaacaatactgttctatacgagtgaccgattatgctttctttggcctacattctttattctgcggtgaagttgaggcttataagttaaaacaaaggaactaacttactgtccaccagtttatacagaactcacagtatctatgactttttttaaactaagatctgttaaaaaagaaatctgtttcagcagatgaccgtgtacaataccatgtggtgaaaatgaattcagacttattaaatgatgaacttgtnnnnnnnnnnnnnnnnnnnnnnnnnnnnnnnnnnnnnnnnngagaactgttgatggcatat

SEQ ID NO: 5459 - DNA, 746 bp, Macaca Fascicularis
  misc_feature (1)...(746): n = A,T,C or G
taaagtccagaaacatgannnnnnnnnngagattattaaaaatgtgcctttgannnnnnnnnnnnnnnnnnnnnnnnnnnnnnnnnnnnncaatgacgagatcatcaccatcctggataagtacctgaagtcgggcgacggggagggcacaccannnnnnnnnnnnnnnnnnnnnnnnnngcccatccaccagtccnnnnnnnnnnnnnnnnnnnnnnnnnnnnnnnnnnnnnnnnnnnnnnnnnnnnnnnnnnnnnnngcaactattgagtgagatttttagggactatttttcagtatctctctacctgttaaagggggtgcttttcaatctaaaagcttaattttataaaattatttttctagactaaattgtatatgcttttggtaattaggaactctgagaatactggctgctgattgttgccatcacgttcttacaaaattgtttttctatgggatgttctggcagctctctctcaaaatgctgctgtgttcgttcattcactcattccataagaaacttaataccagcaaatgtattaaatcccttgccagttaccattaactgtannnnnnnnnnnnnnnnnnnnnnnnnnnnnnnnnnnnnnnnnnnnnnnnnnnnnnnnnnnnnnnnnnnnttcccatcccttttttgtgtcagtgtttcagaaaatagtgaacttgattcctctgcttccactaaatccggttgtgacaaaatctaacgtgagatcagatcgaaa

SEQ ID NO: 5460 - DNA, 749 bp, Macaca Fascicularis
  misc_feature (1)...(749): n = A,T,C or G
gtctgttactnnnnntgnngatatgtttgaaagtgtccccnnctccaagannnnataaatattcacatttnnttgtaataattgtgatctaatttttaaaaatatttaactatttaacccatgtggaatatattttcatgttggtgcaaagtagggatataaccttatgttttgttttcctcannnnnnnnnnnnnnnnnnnnnnagagatggctagtcttcatatgagagataactgtttattaatttacttttacaattcagtaatacaatgaaatgagtatatatctcatgtgtttcattagaatagagtacttaaatcattttttttcctttaggtggatttattttttatggaaatagtgtttctcattcctaaacaatgtaagactagcaatctggagatcacccttaacatatgtcactatctaaaggtactgttttcaccaccttcttaattaaaatattttttgcttcatagattttcaagctttaactcttctatctatctatgaatcatttactattcatttttaaaggttaaaaaggcaatctgtctttggaacagatatcctgattttaatgtaagtattttatcttcatctgttttcgttatataatgattaagcatggaatattgcatttcttgattacttgttcaaatacatgcattaatttttattgtcataatttaatcatgaaaattaggggtaatgtagatattacgaatttgtattttattataagat

SEQ ID NO: 5461 - DNA, 445 bp, Macaca Fascicularis
  misc_feature (1)...(445): n = A,T,C or G
gagaggagaggctngngcctcagtttccctctgtgaagtggggggaggcaggccttcaaggaggggtagaggtacaaggcttcgtctcatctgctgtctgagtatccaggcccaaaggcactgagggacacaggagggctcaggagttggggcttaagcacatgcagggatgacagggcagggagcagtcctcctccctctcctccccaaccaaacctcggggagccctcctgtgcccctccctccttgttgtccagtgctgggttccccaccccgaggnnnnnnnnnnnnnnnnnnnnnnnnnnnnnnnaggggcttcttgcctcatttctcccctctgagcccccaggccctcccacatctcaggttggggatggggacatggagaaggggctgcctgctcccacaaatgcttgtgacagatgccaggaggtagatgtgtgct

SEQ ID NO: 5462 - DNA, 726 bp, Macaca Fascicularis
  misc_feature (1)...(726): n = A,T,C or G
attcagcaatactctgttaaaagtttgacagtactcctgnnnnnnnnnaccaaatgctatcatagttttgttttaactatctccttgagggcagagggaaaggtgagagaagatctattttggtgggtatttgtannnnnnnnnnnnnntttcaagtggccatatcaaatacactggtcttactaaccactctctttaccgatgagtagaagaagttaaggcagctgggagaggttctgctctataccgagaagagaatgattctttggaaattgttatttttaagcttctgttaannnnnnnnnnnnnnnnnnnnnnnnnnnnnnnnngctttctcccccaattnnnnnnnnnnnnnnnnngaaattaatgacaaaaacaacaaaccaggacatgtattttaataccctaaggaaaagtggaaccctcaaatacaactcctcccnnnnnnnnnnnnnnnnnnnnnnnnnnnnnnnnnnnnnnggacttctcaatagttcatttccacattctctacaaatcgcatctaccattaaggaatatgttatgaatcctttctgtgaattgagaaagcagtgttattgtctatgatttccactctttgctcattttattatccctgtcaaataatgtaatattggtacctgcagttgaatttgtaatactgtaattgaatttttagttgatctttgannnnnnnnnnnnnnnnntnnnnnnnnnnnnnat

SEQ ID NO: 5463 - DNA, 755 bp, Macaca Fascicularis
  misc_feature (1)...(755): n = A,T,C or G
acctttcctnnnnntgcagtaaagaaaatgaaatatcctttattttccaaatgtatgaagcacaaatgtgatatagttatttaaaatataaaatactttaaaatgaatgtaaagaatgggaaaatatatttttgcatgaaaacagactacttacaaatgtgctatctcaggaaaaaaaagaatgaataaccatatataaaattggtaaactataaattgtctgtatttccttgctggttttaattttaaggaagcatttacatgaaaagaaaaagggatcctagtagtctgaatttcctctcaagtatgctagaaaacactttctgtgaatttacaattaactgcaataagaagtgggttagcattcaagtaaggtcaataccccaaatgagaagctcttcagttagaacacattattggttgtaacacagaagcagtagataaatatttgaaatatgagcatttctaaacttggtcccaaatggaaaggnnnnnnnnnngtgacggtggcttttaaacattcatttgactgattattctaatttaccttgttannnnnnnnnnnnnnnnnnntgggggaaatggatattttttgaagaattgcttattctactttcaatttttaaaaattgaggggattaaaatattactttttaaatatacataaaagtaccttaactgtaattacattttcagttgctttgttataatagcatgtatattaaatataaaatgcatttatgaaaattttgtaa

SEQ ID NO: 5464 - DNA, 284 bp, Macaca Fascicularis
tttttttcctgtaacacgtatatctcattaaggatatcatgcgttttccaccaaaaaatgcagaggtattatctttctcgtgaaaaccaattgaaagcctcccattttcacaaactcacataaaattataaacatttacgtgattaaagtgcccttatccatctggtggtaagaaataaaatgttcacttattttaaaagatgtattagatataaacacttccctctttatatcaaaaaaatcgggtggtcttgcaagaacaatgtctcccatctctgcagagg

SEQ ID NO: 5465 - DNA, 720 bp, Macaca Fascicularis
  misc_feature (1)...(720): n = A,T,C or G
ctcgtacgcnanctccctctgacaannnnnnnncatccagtttgaatctccagtcctttgcttttccaaaggtctgcttctccccgaacctgcagagattnnnnnnnnnnnnnnnnnnnnnnnnnnggcagctgtgagaggagggaactcatggctcaggggagaaggaagctnnnnnnnnnnnnnnnnnnnnnnnncaaacaagaaaaacctcaagaaggcaacggtaacaatgtcatcctgcagatgccacaggcagagaggcgagctgagcctgcagccctaagaccggagtttccttttggggaggctcagagagaacagcttggcaatgccactggaggtccctgagacatcaccttctcaccactgcctgcccctgccaggcagctgtctccaaatccagcggattccttcctccaggggcaaaatggtagcaaaagcgtgggctctgaggtcgaatgggtctgagtttctgtcttggttctgccaccgctggttgtgtgaccttggccnnnnnnnnnnnnnnnnnnnnnnnnnnnnnnnnnnnnatcggaattataataatgcttgctgcaggctgttgagagggttaggggaggtcacacataaagactgactagcgctgcgtgtgtgacacataggaattatctgctgaaagtaagttaccggtgctgtctccctgtggtcaagggtggaacactgagaaccatgcctccg

SEQ ID NO: 5466 - DNA, 1285 bp, Macaca Fascicularis
  misc_feature (1)...(1285): n = A,T,C or G
gatagatggagctcccagaccnnnnnnnnnnnnnnnnnnnnnnnnttgttttttannntctgtccaccctggaaatgtgggtgggggtgtgtccgtggctagtcattgtcnnnnnnnnnnnnnnnnnaagatctgaaggcccatctatgaaagagnnnnnnnnnnnnnnnnnnnnnnnnnnnnnnnnnnnnnnnnnnnnnnnnnncctccacctctggggaaatccttaggcctccctctcccttccctctgtctcatctcctccacttgaatgatgctctagcctnnnnnnnnnnnnnnnnnnnnnnnnnnnnnnnnnnnnnnnnnnnnnnnnnnnnnnnnnnnnnnnnngagtgtccagatctggccaaggtctctagggtggnnnnnnnnnnnnnnnnnnnnnnnnnnnnnnnnnnnnnnnnnnnnnnnnnnnnnnnnnngggtattaaagaaaaaaactacataaaagtcctaaaagtaagacccacannnnnnnnnntttgcccttcttgtagttttcttcatctttaccctgccagaaannnnnnnnnnnnnnnnnnnnnntgctaacattaatgagaaggtggcctctagtgtccacctgtggaacccaggacacaaannnnnnnnnnnnnnnnnnnnnnnnnnnnnnnnnnnnnnnacatagaagatgcacttagcttctnnnnnnnnnnttactcatctgtgaaacagagataagtaacnnnctnnnnnnnnnnnnnnnnnnnnnnngtaaacgaaaacagactcgaactattgtgtaccaccacatagcacatgcacgtctgtcccagactttgacaacctgcacaagacaagcagcctaaagcaggagagaccttcctagggttttgtatgtgtgcacgctaccctcgctccccaactggccattaccctagctctgcccttgtttgtggagttacagcctcaaggttgtagcatgcaatcggggcgcagtgtgttccgcgcttgcccagagctgactgctaagnnnnnnnnnnnnnnnnnnnnnnnnnnnnnnnnnnnnnagtgaaaagcctttcgccctcacgtggtttcttttnnnnnnnnnnnnnnnncaaggctcgcgcgcaggccccgcgttggaaaatggcggggaagctgaaacctctgaatgtggaggcgccagaagccgctgaggaggctgaaggtagtgagggcaagtgggctgtactcctttctctccaaccagggcagaaaggagggaggattcatccctattacaataatgaaataatga

SEQ ID NO: 5467 - DNA, 952 bp, Macaca Fascicularis
  misc_feature (1)...(952): n = A,T,C or G
cactccatacttctnnnntaccccaccatgtgctcctgtgcactcctcagatggtcggaggggtaacccgagtccttagagaatttggggaccaataggatatgtggtgtgtagaactttctttaaaaaacttaaggggcctttgctaccttctgcttgttgagttgttttggcattcatcttaaaagccagcatctcactatttattgacaggttgggctatgtgtgtgcgcatgtgtgtatacatttccaggcgtgcctgtgtcctgtagctttttaaaaggaaacccagtcatcccactatgaatctggcatcttcttatgcttctagtgttttggccatacattaaccaaggggtttaatttatccaatgcttgacgacatgttcannnnnnnnnnnnnnnnnntttgagagggttttgggaaagggagggggagaagaaattgacatttattttattatttattttaaatgtttacatcttctttatgttgtatcaagcctgaatagaaactgatagcattaaaatactccgttcctctctctcttctcgcttccttttttttttttttttaaatttaggataatgcatttttgtttctaaagtgattgtgatttgtgctgtataaactgtataaaaaggttctgtttttaaaggtggatttttattcctctggggacagtggtcgccaagacatctacattgtaagagaacacagtggaagatcctgtcctgattctcaaaattactttctctgtatgattaaaagtttattccatttattttagtttgtgtttacttgattttgaggaagaaaatatttgactttgtatcaaagagtagggtatcagatgtcttttctgccatgggagatgtgtgtgtatatatagtattttggtgtatagtagaaaataagctttgtgcatctgtatctgcgatatgtcaatga

SEQ ID NO: 5468 - DNA, 751 bp, Macaca Fascicularis
  misc_feature (1)...(751): n = A,T,C or G
tgtgagatgtgtccaggaagtngnnntgggcacccattgctcagagtttatattggactcactttctannnnnnnnnnnnnnnnnnnnnctccagaagaataggaggtgttcagcataagccacatgtgcacagacaatttaggcacatgnnnnnnnnnnnnnnnnctgggaacaatgggaaacctcccgaaacctaaagtccagactccagccaaggatgaaccttgcaagatcaaagaatagcagtctctggcctgctgtgttgtttctttttcacagtaacttacacggaaaaatgctgagttagcttaagtttctgtaacattaagcaaataaaattttctataacaaaaataagccatagctttgagatgaaggcttatatacctgtaaaccattgtaaccaaggaaaaaannnnnnnnnnnnnnnnnnnnnnnnnnnnnnnnnnnnnnnnnnntttaattcagtgatgacagggaagagaggaagtcttgtgagaaaggatcttgcctctgcctagtatctttcatagataggcttcaagtggtttgacttgcagatatactctttcttggcctttactttggcaaacatgtgatgggtaggtaannnnnnnnnnnnnnnnnnnnnnnnnnnntcagtttctcatccactctttgttcttgctattgaaagttgtagcttctggctacaacagagatagttgaagaatnnnnnnnnnnnnnnnnnnnnnntatcattaaatgtgg

SEQ ID NO: 5469 - DNA, 717 bp, Macaca Fascicularis
  misc_feature (1)...(717): n = A,T,C or G
gtcaggtgggttcgcctgtggctgccnnnnnnnnnnnnnnngaagaaggnnnnnnnnnnnnnnnnnnnnnnnnnnnnnnnnngttttgcaatatgtaaaattacccagcccacgcccagcgtacaggtgggagaacaagacccccagagtgagcaggtgcctggtgacgtctcagcccatgctccnnnnnnnnnnnnnnnnccctcggtggccctgtgagcggcatagcgagcaggaaggggatctcccatgccaggagggcaggtggggcggcccctgccgctgtctgcgtgccgcacccggggcctgcttctgagcagggcaggcgagggaccccagcttcggccctgggctccggcccggaacatctggatgggaaagggcgtttggtgattgctcctctttctccagatctgccacagcaagagtggggagatcaaccccgtgaaggnnnnnnnnnnnnnnnnnnnnnnnnnnnnnnnnnnnnnnnnnnnnnnnnggcacaagaagccagaggccggcgaggagccgcccacccagggggccgagggctgaggccaggcagtcacgggccttgcccggggagctgttgggagtggtgggaaacgggggcaccagcatnnnnnnnnnnnnnnnnnnnnnctgacacctggtctgtgcgtctgtcttgctcannagttgaaaactggacacttttgtatgtatattatagataca

SEQ ID NO: 5470 - DNA, 711 bp, Macaca Fascicularis
  misc_feature (1)...(711): n = A,T,C or G
taaaaatgaaagctctctgtcaataaatggttttggatggttggaagagctgggggaagaaaaataagtacacctgagaccttcagttagtcttttatttatttagaataaaaaatagtttgataacctaccagagttagtgcttctttaaaaacactcccgggaaagatggggactgtcccttaggaaagccataaaagtgattcccaatactttgcaattgcttttgatttttagtcctttggaacaaatgtgtgatgttatgtctgatgttgtgtttttagagctgtgaaaagtctgagaaatttcaaggggtattatttaaatgannnnnnnnnnnnnnnnnnnngtgtgagctagaatctagggtagctgtccacttctttttctgttgtcctgacagtaaagcaaatagtaagccatgtcttgaaagtgatttgcttgtttcatactgacatctaaagacatcagccttctctttggcaaccctggggatactcctctgcaccataacttattaatgtttttttagacaaggctaaaccgaatgactctacctatctatacgttcactgctcatataccagctgctacaagaaaaacatgatttgtaagtttgtctttactcctaattgctaaagtaactgaaacccttcctgtctagggagaattgctgctagtaacgtcagtttgcaatgttcagctttagat

SEQ ID NO: 5471 - DNA, 783 bp, Macaca Fascicularis
  misc_feature (1)...(783): n = A,T,C or G
tcaggaggagtgcgcagccggtacagnnncctnnnnnnnnnnnnaagtnnggaccggctgagagcagagaggacggttgggcagccccagggtgggcctgcctcagtgttgcnnnnnnnnnnnnntgcgactctagaccaggcctgcagccagaacgccgattccgggagcttgggagccctgtgtcagggccgagagcctcgcacttgctgnnnnnnnnnnnnnnnttgctttactgtgaccacagcccccacccggggnnnnnnnnnnnnnnnnnnnnnnnnnnnnncgtttctgttaccccggccgcggctcctggcggcgggagagacgcggtggccgcaggctgccccctgccggtcacacgggagcagcgtccgcgccgccgcccgccggctctcccgccagcaactcagcccagctccctgggaggcaggctacagaaacaccccgacgggggnnnnnnnnnnnnnnnagcctctccagcgagtcttatcccggtgtgtcctcatctgcagcaggcaggagagggggagcaaacaggnnnnnnnnnnnnnnnnnncagaaacattaaccacctctctctggtcttattggtattttttgtttccttaataaagctccagtctccctcatttgagcaatactctcatttcctctgatgtctggatgatcggcagggcaggaatctgagcgctggccccgtagtgaggccatgttctcataatcaggctccagccagaaaaataagaaacactgcaacaggcttnnnnnnnagggctg

SEQ ID NO: 5472 - DNA, 723 bp, Macaca Fascicularis
  misc_feature (1)...(723): n = A,T,C or G
cagcagagattttgcagnnnnnnnnnnnnnnnnnncaatcatgtaaccttctgtaggggattactgagacagggaagagaagtgcaagaattggttgctggtgctacatggcggcagctttgacattttctctgggttctactttattttgtaaaatctttacaattctcaccatttccacctaccttaatccaatctttataaaagaggcagtctagagaactaggactgctcagccttatcctggaatggagcatttagcccaggtcttaatcctccaagaggaggaatacatagtatggtaaggcaaggaactgggtggaatgttaggttgcctgcccaatgggagagnnnnnnnnnnnnnnnnttgtgtgacacannnnnnnnnnnnnnnnnnnccctctgccagtgtagctgtggctcagagttttctctttgttgtcacttacccccttgtgattgaatcttttctcccggcaggatccccagccagtgtagagacttgattggcatctttcttatgctgcagggactaaaagtattnnnnnnnnnnnnnnnnnnctgctcattctttctgcatcccactgttcccctccaatttgttattttgtaccctatttttcagttccaactctgctctgtcctatagctgtataaaaccagagtgcgtggggctaaggtcaggagtataagtacctgccttaggcactattccttatacaa

SEQ ID NO: 5473 - DNA, 2313 bp, Macaca Fascicularis
gacgcaagactgaaattagaaagttctcccaaagatacacagttgttttaaagctaggggtgagggaggaaatctgcagattccataggaatgctctccctggagcctggtggggtgccgtccttgtgttctggctggctgttatttgtctctgtccctgctttgtctggatctccgcttcctagcatagtgcctagcacagtgccggttctcaatgagtttgtagagtgaatggaaatatacactagaaatatatccttgttgaaatcagcacactggtagtcctgttgaatgagggggacatgtgtaagagtgtgtgtgtgtgcatgtgtttgtgtgtctgtatatgtgtttgtgtgtgtgtgtgtgtaaaatcaggtggggacatagggactattattggggtgtgggtatataaatcgggatgttctttttcaaaagaaactccaaacagacttctggaaggttattttctaagaatcttgctggcagtgtgaaggcaacccccgctgtgcacagccccacccggcctcacgtggccacctctcttttccctcatgaagggctggctccccagtatatataaacctctctggagctcgggcatgagccagcaaggccacccatccggacacctctcagcacagcagagctttccagaggaagcctcacccagcgtctgcactgaggttcttctgtgcacgttgctgcagctttgggtccgagatgatgccagctgtccagctgctgcttctggcctgcccggtgtgggatgtgggggccaggacagctcagctccggaaggccaatgaccggagtggccgatgccagtatacgttcagtgtggccagtcccaatgaatccagctgcccagagcaaagccaggccatgtcagtcatccataacctacagaaagacagcagcacccagcgcttagacctggaggccaccaaagctcggctcagctccctggagagcctcctccaccaccagttgaccttggaccgggctgccgggccccaggagaccccggaggggctgcagagggagctgggtaccctgaggcgggagcgggaccagctggaaacccaaaccagagagttagagactgcctatagcaacctcctccgagacaagtcagttctggaggaagagaagaagagactgaggcaagagaatgagaatctggccaggaggttggaaagcagcagccaggaggtagcaaggctgagaaggggccagtgtccccagacccgagacactgctcgggatgtgccaccaggctccagagaaggtaagaatgcagagtggatatttttcttatagtaaaattttgtctctttcttttaatgcagtttctacatggaatttggacactttggccttccaggaactgaagtccgagctaactgaagttcctgcttcccgaattttgaaggagagcccatctggccatctccagagtagagagggagacaacggtatgaagttaaggtttcttcccttttttcttttctgaattcaccaggatgtggagaactagtttgggtaggagagcctctcacgctgagaacagcagaaacaattactggcaagtatggtgtgtggatgcgagatcccaagcccacctacccctacacccgggagaccacatggagaattgacacagttggcacagatgtccgccaggtttttgagtatgacctcatcagccagtttatgcagggctacccttctaaggttcacatactgcccaggccactggaaagcaccggtgctgtggtgtactcggggaacctctatttccagggcgctgagtccagaactgtcataagatatgagctgaataccgagacagtgaaggctcagaaggaaatccctggagccggctaccacggacagttcccgtattcttggggtggctacacagacattgacttggctgtggatgaatcaggcctctgggtcatttacagtactgatgaggccaaaggtgccattgtcctctccaaactgaacccagagaatctggaacttgaacaaacctgggagacgaacattcgtaagcagtcagtcgccaatgccttcatcatctgtggcaccttgtacaccgttagcagctactcctcagcagatgcaaccgtcaactttgcttatgacacaggcacaggtatcagcaagaccctgaccatcccattcaagaaccgctacaagtacagcagcatgattgactacaaccccctggagaagaaactctttgcctgggacaacttgaacatggtcacttatgacatcaagctctccaagatgtga

SEQ ID NO: 5474 - DNA, 977 bp, Macaca Fascicularis
  misc_feature (1)...(977): n = A,T,C or G
ttgggtaccaagataattatgnnnnnnnnnnnnnnnnnnncattttcaacaggaataaccctgtccactgttgtttgtctgatcctcaaatagcagaagattcaggatcatctagctttaatgctggtggagactttagggaccaannncatccttttacacttgtggctcagagaggttaagcaacctctccaaggtcacacagccagcagaagtaacaccctgcgtagagatcatcaagacagcatcagagccctttagtatgatatcccgagtgtcccacatgcaagccatcggcactgtgttttgtggctcaatatttttcagtttttaagaaagatacactttttggaaaaagaaatgaacacagtgaatgcccacatcagcagaaagacagttttctataatgggttctttttctctttatttcgaagaaggtttaattttgccacagttgctaaagaaaacattacacacnnnnnnnnnnaaaaaacggtgcgacagacttgtcaacaaaaagagtcaaatttgtaaaatatttgatgagatttattctgagccaaatatgaggaccatgattggtgacacaaccccaggaggtcgtaagaactggtgcataaggtggctggattccagcttgattttatgcattttagggggacagaagttacaggcagaaaaaaagaaaagggcnnnnnnnnnnnnnnnnnnnnnnnnnnnnnnnnnnnnnnnnnnnnntctccaaacacctcacggcatcgtatttcaaaattcggctttgtcatttagcagtgtgtggaggtgtacacgttgccagtcgatacgtgtaaggtgtccagtggtttggtccagaaaggtgacacaattccagggatggaggtgggaggtgtccaggtcacaggtggagtcaacgattttctgatgggcaattaattgaaagagttaagttattattgtaaagacctgaatgaacagaa

SEQ ID NO: 5475 - DNA, 648 bp, Macaca Fascicularis
  misc_feature (1)...(648): n = A,T,C or G
gtggttcagaacacagtnnnngcaaatcctccnnnnnnnnnnnnnnnnnnnnctctaaccagacccgcagggacaactgcaatgagaagtggcttgcccagacccagtgccccttctgctgggggcataccagtgcctcgcagcaaacttgcacagcctgttcgcagatccttgccagctcctaaaacctatggtagcatgaaagatgacagttggaaagatggctgttattgaccagcaaagacaagaatgcagaagtccacggcttcannnnnnnnnnnnnnnnnnctaaaaaacaacttttatatgcagactgttcagataagactcttgggatttataaaatcccagccctctctgtcttaattagcacaaactgacagagatcatcaaacagcactttaatgacatttaacatcagatgtgtttggtaatcatacaatcactctccatagaatcacttttagttttgtttaatagaaactaggttgattttttttaacatatttgacagaggccaatatctgggcaaatacttaatggatgccaaagagaaatgcccatttgtaaatgagaaaaatgcccatttgtgcacaagaaaanngtgaattcaagctatccaaaacttcacattcaacctaatttact

SEQ ID NO: 5476 - DNA, 2049 bp, Macaca Fascicularis
  misc_feature (1)...(2049): n = A,T,C or G
cctttcggatctcttcatcaagtgcgttggacgccaatccctgctccatggtgcctcctaactaccctgactacaaatcctacctctgaactatgctaactgaggcacaacaccaactccgataactaggctagactcgcacaggccgcccagggagggtggagcccaagaaccctctccagggcctgatctcctttgccatgttccctgtgtcattttcccgtgcacaagagagggggaggggtgtgcccagaagctaagagccactcccctcctcatcctgtcatgggcactcctctggggtcacaccctcacccttgcccaccctggagcccccgttttgcttcgaggggacccggggcagtgactttcgaatcacacctgaggccctgggtgcatgcacggccatgtgggggcagctagtaggtgtccccagagaggccctgtggtcatcctctgctccggggctgtgcgcaggccccagaggcacaatcagacttcaggggcacagccagaggacacttcccctccaccgtcccctttagactgcagaaccccctggaggatatccaagcgcacacactttatgctccccagccgccccgtgagggctcgccctgggttagtgtgaacaaatggaagctgctcccgtgggcaggtcgagggcctctggcgctccattggatgctgcccataaagatcccggccatggcctcccgcggggctgcagtatcgctctggctgcctccaaatggagagaggactgcagtgacctgggcagggttgggggaggaggtggcagggtagaggaagcaggggcacacaggaggaagagacggtgccctgggccgtatcttctctcctaccctaacatgagccaaattagaacaacctggatgaagaaaagacaagagaagagcagggcagaagagaagtgccccaggaaacaccgtcccggcttttacattccactaggtgggatggaggcgccctctggtgtccaggaggctccaggcgttccatttcacctcttcctttgcataggaatgctttcaaggccacacgggcaccagaagcttccttgatttgaatcccatgccaagacccctccgccactttgcatgcttctgtcctccacgcttctgtcctcgacgaggcctccaggatgggggtgtcagatacacaacagtgagggtgtcttgcccagttatcccatgcagccactggagcccacacgtggctgacctgtcatgtgtttgtagtgttctttgacctcaggaccttcgtcctctccattctaagtgcagaaagacatttgacatggaccctctcaggtgttttgcaatacgcaatacattatcattgactctggtcaccctgctgtgcactggatgtgaaaacctcttcctcctgtccatctcagactttgatcctttgaccaacaactctccattctctccctctttcccacccccacacctgatacctagcccctggtcaccatggatctactcactacttctatggggccaacatttttcgatcaacacttccgtaacttcatgtggaatttgcctttctgaggtgatggagatgctaagatttcatcactccacggtgcacacatctatctaatcctcacattgtaccccataaatgaatacaagcatgatttgccaattaaaaataatttaaaaataaggccnnnnnnnnnnnnnnnnnnnnnnnnnnnnnnnnnnnnnnnnnnnnnnnnnnnnnnnnnnnnnnnnnnnnnnnnnnnnnnnnnnnnnnnnnnnnnnnnnnnnnnnnnnnnnnnnnnnnnnnnnnnnnnnnnnnnnnnnnnnnnnnnnnnnnnnnnnnnnnnnnnnnnnnnnnnnnnnnnnnnnnnnnnnnnnnnnnnnnnnnnnnnnnnnnnnnnnnnnnnnnnnnnnnnnnnnnnnnnnnnnnnnnnnnnnnnnnnnnnnnnnnnnnnnnnnnnnnnnnncaaaaaaaaaaaaaaagaagaaaaaaaaaaaaaaaaaaaaaaaaaaaaaaaaaaaaaaaaaaaaa

SEQ ID NO: 5477 - DNA, 2261 bp, Macaca Fascicularis
  misc_feature (1)...(2261): n = A,T,C or G
tcatgcatgacatacatagttaactaaacatttatctagtattctactaaggtcagacaaatgcaattttgcccagatttctacactagaacaaactggctagagtgaatttctctgctttgctttctagaaatttgtgaaaatgtgtccttgttgtacctgaatcctgattttaacttgtcattgtttcttatgttcagatgagacctgccagagccaaatttgactttaaagctcagacactaaagtaagtgctaccagttatatttatttatctttttagctgtctctttgaaacacaacagtttgtttgtagagaagagttggagaaataacaattatcaaaattgttgttaaaaaaaaaaagaacaaaacagtagttcatagagtttgctatgtgccaaacactattcagagtactctgcatatgttaactcattatggagtgggtgctgtgatgatccccactgttcaaatgaaaaggccaagggactgtaaggttaaggaacctgctcaagctggtgtgagagttggaattcaaacctaggcagaggttgggctcttataccctgtcccaccctgcctcctcctatgtaggggctctatttgcttaagtggtggcttgatctgacccatcttttctgtggaaggatctagaccagtctctagggagataactttacccattttgctacaacatcccaagagattaaaggcttacatgaacccaccagagactagcgtttctctaagtgtgttcctcagagtgctagccctataagatttttctcaaaaagggagttctgttgtagaatgagttgggaaacagtgcatgctatatctatacctcccacccactttgaagaaatactttgttgatggcacgttaatagctctagaagtctttcaagaaaagaacctgaaacacgatttgggaaatgctaccaaagactgggttccataaggaaacagctggctttttatctaattatggatttaaatagtccatgagttcccattggcagctaaaagtacaatggacagtggccaccccattgtcctgcagatggacggtcatgcatctggtgatcagagggagagctccctgtccttagatgctgggaaatgctatgtggagctaaccaaccatggttctgatctctatcccacaaaatgagtgaccaggccacagtgtctagaacctaggcacaaatctggtatagttgggtttgtgtgtattactccagtcctttcgttggtcagctaaaggaggtggctgcgtaccatactgcaaagattgcgagctttagagtcaggaagtcctgtgttcaaatcctgactatgccacttactatctctgtgagtgtagtcaagttatcaacttctcccccactcaattttctttatctgcaagatacgggtaaaaatgcctctctttcagggaagctggggtaatacctgtaaaacattttgcgtagtgtaccaaaatttagtgctcaaaatatgttatcctcttaccaccctttttttaaaccaagataacagagatatataaattaatttgcaatttaattaatacactttttctttgaattgagaaaggtctatgtaagatttattaaatggtctagtgatgataatagtacattttcccagatttcataaagagtcttaaaacaacttttttttagagcaaccccgtcaaatagaacaggtgagaaagcttagatccacagaaattgtcaccttttatcaacattgctaatgccggagagaggtttccttccttctgattccgtgttttcatcacgacatgctgcctccaaaaaaagtccacaaaatttagtgaaaaaagtaaattctagctccatggtcttttaagcccttcagtcacttggttttacatttccccacagtcagttactcaaaaaagcatgctgccggggccaggcgtannnnnnnnnnnnnnnnnnnnnnnnnnnnnnnnnnnnnnnnnnnnnnnnnnnnnnnnnnnnnnnnnnnnnnnnnnnnnnnnnnnnnnnnnnnnnnnnnnnnnnnnnnnnnnnnnnnnnnnnnnnnnnntcggggcgtggtggcaagtgcctgtaattccagctactcaagagtctaaggcatgagaattgcttgaacccaggaggtggaggttgcggtaagctaagatcacgccactgcattccagcctggggaacagagtaagactccgtctaaaaaattttacaaataaaaaaaaaaaaaaaaaa

SEQ ID NO: 5478 - DNA, 688 bp, Macaca Fascicularis
  misc_feature (1)...(688): n = A,T,C or G
agggataaacctnnnnnngattnnnnnnnnnnnnnnnnnnnnttaccaaaatttggggnnnnnnnnnnnnnnnntttcaggtttgttctcgtgtttcagaaaaaagtgctcagggtgaatttggaatgttgttttatgtatcatggatctctcagtgtttaacgtggtgccttgcatatggtaaatgctaagtaaaggggcatcaatgaattctttccttctcaaacatttattttgtaccttgtgtgttcatattattattataaacagagctcaagaaagccaacaaagttatgtgttgccattagtatgagtgtaaaccttaacttatttaggactctttcagacactttttttgcacgtattgttagggcatattgccaaaacccaaagtgaaagcatgatatggagcgcagcattttagggcttgatatttgcttattataaaaattggtgactttcttaattannnnnnnnnnnnnnnngggccataaaaattaagtaatttctaatgcacatccataaaaagagatgcaaaggccatagagaatactagatcttaagtctgtggaactgcacagaccctaatgtatatttaatgtattttaaatgtttgnnnnnnnnnnnnnnnnnnnnnnnnnnnnnnnattattgaaatcatatttgtatgtgtcacctcatcagaatg

SEQ ID NO: 5479 - DNA, 2092 bp, Macaca Fascicularis
atagcgacgtgcacgcagcagccaagccagaccagctggtcccctgctggcccgagggaaaaggcggtaccatgagccacgcagtaaccatccaggagccccaggcccagcctcaggtgtctcaaactcggtaccgggagaggtcgcgggctgggagccacatctcctccaatcgagcgtatgattttctgtacgatccattgtttattgtgtcaagtgagaaagaccacacacaggcaaatatccaagccaccctgattcgcagcagactgagaaaagttcccaggtttaaaaccatgttcagtaacctgatccattatccaagatattctctatattggagcaagtcagatcctgtcccaccgtttatcagtcggcaatggaagggacatgaggagaaacacagagaagccctccggcagcttgccataactgacacttcttttcagatgcctagagaagtttatgaagatcctgaagttactggaaagaatcgctataaatactttgaaaggccttttcttccattttttcagcagatgccattcaatgttgtttatgccatatccaaggcagaaccatacacttttcctcctacttctactaagcagctatccatccctccaaagttgactgtgggcactcagactgattatcgggatgctgacgttcaaacagatccatactctccagaatatgtagtatgtcaggactctatccccgagctcttgaccctggctacgcttacctggggtcggggtctcccagcaggacaagctgaggtggagatgatagaaagagcccgcgagaagcgtgcttgggaagccactctccccgctctgagtgacacctcccagtttgagaagaggaggaagatgatgaatgaaatggagaggaaggagtgggccttcagagagcaggagattgaaaaactgcaggagattcgcctggaagttctaaaagagctgttgaggaagcgtgaagagaatcagaatgaagtgaatatgaagcacttgaatgcacggtggtctaaactgcaggaggcaaaagaggcaaaaatggctgtgatctaccttcaaaagttactccggggcagagtcattcagaacatgatgtttgaagggaaagaaaagcgactggagttgatccaggagttgcgcacctgccacgcactacaagaagatgaaaagctggtgaaaaaagccgagaagcaagtgaccctggccttacagcggcagaggaacttacatgagcacaaggtgtcactggttgaaaaccatttggctggactggaaggaagggcactggcagacatgtttgacttcctgtccaaagagctggtgagactgcaggaggagaggaggatccatgcctttgtcatgctggccgagcgccagcggcggatacgagaggctgaagagagtggtcggcgccaggtggaaaaacagcgcctgcgggaggaggacgagatatttaaggaggtagttaaagttcaccatagtactataagctcctacctagaagacataatactgaatactgaagcgaatactgcagaagaacaagccagggcagaaatagagaagatggctgagaaaatcaatgacattgcttatgaaatggaaagccgccgaacctatcttcagtcagaggagattgttgctgagttggtttatagttttctgatcccagaggtgcaaaaatactttgtcaaagaaaaagtgaggaacgcacagcgggaacatattcttgcagcccatcagatcatccacagttgcacagaaagcatggttcaaaagagattaactgagggacagcaagatgaggcctcaaatgctgccatgttacttgagaaagaaattcaaaatgagaacaacagctaagattgtgattaaaaaaataaaaagaagcagtgcgaatcatcataaagaattccaatggtctgcacttctcccaaagtgtgcactgctcataaacttgccaatgtatgtttcgtgagaaaggagatttgttttccttaaacacccaataatttataatggttttcagtaataataatcaaatgaaaaaaaaaaaaaaaaaaaaaaaaaaa

SEQ ID NO: 5480 - DNA, 977 bp, Macaca Fascicularis
  misc_feature (1)...(977): n = A,T,C or G
tatgggcacaataacatactgttggtaggagttgttcgagctattctggagattatttggtaaagtatactaaaagccttaaaccatgtatgtgcactgtttgaaccagtaagccacttctttgacattagaagacagaagaaataatcagccttgcataaaacttaacagatgaaagtattcatcacaatattatttataatgaaaaattgcaaatgttataaatgaacaattgnnnnaatgttaagannnnnnnnnnnnnnnntgtggtagaatattatgcatatgtttaaagaatcatattttctaagattatttggaaacatgtttggtaatgtcaagtggagtaccccagaaacattttagacatttatcatcatcattgttctgagtggaaggccgttcggagaggctagaggctcttattctggctataaattatgtgagtaaaattatgctaaccattaaaaatactgtacacccatcctcaatatatagtaatggaaatagcaattgaaacatgnnnnntcacaagagaaaatgacagttttnnnnnnnnnnnnnnnnnntttaaactttaagtcannnnnnnnnnnnnnnaaagaggacttggggtgttttaaattgctgtggacacttaaacttagaacccatgcaaccctnnnnnnnnnnnnnnnnnnnnacnnnnnnnnnnnnnnnnnttttaaaaaataaagtattagaaaaatgtgtaataaagatgtaaaattaaaaaatggaattctgcattaactgtggattttactaaatagaattaccggtgaaactaatctatccatcgagactatctggtatgtattacgtatgtagtnnnnnnnnnnnnnnngatgtctgtgtgcctgtatcaacatgtgacttcatgtaaagtttcttcatgttcacagttcttagcaaatgcagtttcaannnnnnnnnnnnnnnnngtnnnnnnnnnnnca

SEQ ID NO: 5481 - DNA, 2062 bp, Macaca Fascicularis
caattcccggtgtgcccatgagtaagagcaaatgctctgtgggactcatgtcttccgtggtggccccggctaaggaacccaacgccatgggcccaaaggaggtggagctcatccttgtcaaggagcagaacggagtgcagctcaccagctccaccctcaccaacccacggcagagccccgtggaggcccaggatcgggagacctggggcaagaagatcgactttctcctgtccgtcattggctttgctgtggacctggccaacgtctggcggttcccctacctgtgctacaaaaacggcgggggtgccttcctggtcccctacctgctcttcatggtcattgctgggatgccacttttctacatggagctggccctcggccagttcaacagggaaggggccgctggcgtctggaagatctgccctgtactgaaaggtgtgggcttcacggtcatcctcatctcgctgtatgtcggcttcttctacaacgttatcatcgcctgggcactgcactacctcttctcctccttcaccacggagctcccctggattcactgcaacaactcctggaacagccccaactgctcggatgcccactctggcgactctggtggcaacggcccgggcctcaacgacacttttgggaccacacctgctgccgagtacttcgagcgtggcgtgctgcacctccaccagagccatggcatcgacgacctggggcctccacggtggcagctcacagcctgcctggtgctggtcatcgtgctgctctacttcagcctctggaagggtgtgaagacctcggggaaggtggtgtggatcacagccaccatgccatacgtggtcctcactgccctgctcctgcgtggggtcaccctccctggggctatagacggcatcagagcgtacctgagcgtcgacttctaccggctctgcgaggcgtctgtttggatcgacgcggccacccaggtgtgcttctccctgggcgtggggtttggggtcttgatcgccttctccagctacaacaagttcaccaacaactgctacagggacgcgatagtcaccacctccatcaactccctgacgagcttctcctccggcttcgtcgtcttctccttcctggggtacatggcgcagaagcacagcgtgcccatcggggacgtggccaaggacgggccggggctgattttcatcatctacccggaggccatcgccacgctcccgctgtcctcggcctgggccgtggtcttcttcatcatgctgctcaccctgggtatcgacagcgctatgggcggtatggagtcggtgatcaccgggctcatcgacgagttccagctgctgcacagacaccgtgagctcttcacgctcttcatcgtcctggcgaccttccttctctccctgttctgtgtcaccaatggtggcatctacgtcttcacgctcctggaccattttgcagccggcacgtccatcctctttggagtgctcatcgaagccatcggagtggcctggttctacggcgtcgggcagttcagcgatgacatccggcagatgaccgggcagcggcccagcctgtactggaggctgtgctggaagctggtcagcccctgcttcctcctgttcgtggtcgtggtcagcatcgtgaccttcaggcccccccactacggagcctacatcttccccgactgggccaacgcgctgggctgggtcatcgccacgtcctccatggccatggtgcccatctatgcggcctacaagttctgcagcctgcctgggtcctttcgagagaaactggcctacgccatcgcgcccgagaaggaccgcgagctggtggacagaggggaggtgcgccagttcacgctccgccactggctcaaggtgtagagggagcagagacgaagacccgggaagtcatcccgcagtgggagagacacgaacaaaccaaggaaatctgagtttcaagagaaaggagggcaacttctactcttcaacctctactgaaaacacacaaccaagcagaagacgcttctgactgtttacacctttccgcgccgggagcacctcgc

SEQ ID NO: 5482 - DNA, 640 bp, Macaca Fascicularis
  misc_feature (1)...(640): n = A,T,C or G
gcacgcggagccagcnnnnctccnnnnnnnnnnnnnnnncagccagccagtcctcctttacctctctcttttccatgccctccaacctatctcggtcccatcgccccaaccccagcgtgtcactgcagctactcccttttcttccaaacttttgcagaaaaacaaaacaaaaaaactacaaacaaaagcagccctttgcgtcctccccaggaaagaccctgaccatgtacataaccatggtgctcgtgccctgccacccatcagatgcgtttgcctctgtccctggggtgtgtctcggtgacattttctatcagatatgctccctcccaccttccagccctgcccatcctccctccattcctttcagttccctccgtgatttcaagaaggaaataaagggataaagaaattcatgcttgcactgagtgcaaggacagacaacagcaggcgcggcccacggcctggcatctgtgtgcgtggctatcaggagttccaggaactcagtgcaataccggagtgacccagctactgaagcggccgtgaacggcccacgagaggcccgaagccgagagtgtacgttaatgtgaatgtatatagtctttgcagaggtccaaataatattcatgatggtaataaagaa

SEQ ID NO: 5483 - DNA, 728 bp, Macaca Fascicularis
  misc_feature (1)...(728): n = A,T,C or G
tggctgctggccaagctttatagccctcatcgttgnnnnaaggaggaagcagcaatccctaaaatatatatagtgaaaactaaaatggaaatatttttataatacagaagaaggaaagtccccctatgtggtaactgtgttgttctagaaatatgctttcgagagatatgatgattttgaaactgatttccagaaaaagctgactccacttctgtccctggtgggtaaattaggaatctgcactattttggaggacaagtagcacaaacnnnnnnnnnnnnnnnnnnnntagttttatagtcctatttgtagccttcaatagcttttattctttagatggttctagggtggggttagagctttttgtacttttacctccaatagagggaaaatgaagctttttatgtaaattggttgaaaagtctagttttgagagcaaaaaagctgtagtaagaaatggatcatatatattacaactaacttcttcaactatgnnnnnnnnnnnnnnnatgaaatcttaagtgtattatatgtaatactgtaaggttggtatttccccaaaactgattataggtaacagtttaatcattaacttgctaacatgtttttatttttcactgtaaatatgtttatgttttatttataaaaattctgaaatcaatccatttgggttggtggtgtacagaacacacttaagtgtgttaactattgtgacttcttcaagtcta

SEQ ID NO: 5484 - DNA, 132 bp, Macaca Fascicularis
gtttaattacagaaaattccaaaacttgtagtattttttttttttttttccgagtagaaaggcaggaatgtttcgttagcttttctggacagcagaagaatgagcggtagctttagttggtatgtaggtaca

SEQ ID NO: 5485 - DNA, 2030 bp, Macaca Fascicularis
  misc_feature (1)...(2030): n = A,T,C or G
gtgtctggcgcttcccctgttttgggcccgggtggctgttgccgctgctccgctcccccttcgtctcgcctgacctggatcgaagtgatgggggatcccaaggaggccggagcagagggtccgccggcgggggccgccgctcgaggagggctcagcctcctgtcccagggagaatccgaggaaccttctgcacagggatcagctttatttcttggaggcaatgaagtgaagagccgagctgtggtgaaatactcttctgcccctcctcgaacagcatttgcacgccttgaagagaaaacagacttgaaactcccacctgccaactggttacgagagagtgccaaactagggccggcaggaactaccattcttggcaacagcaagaaaagcaagccattttcaagctttggcatggcatacgactttattgattcagtgggaaatgatgtggatgttgtctctgactctgaaaacataaaaaaactcctgaaaattccctacagcaagtcgcacgtgagcatggcagtacaccgcataggaaggactctcttactagatgagctagatattcaagaactctttatgagatcatctcagactggtgactggacatggttgaaagagttttatcaaagactaattgaccagaagtggcagaggaagaaaaagagcaaggagcactggtatcaaaaggcaattctttccaagttcttatattacagtatcaatggtgatggagccgctcagcctgtctcatctaccgcagaacagcaggaatcgtccagttcagatcagacaaatgattcggaaggggcttcatggcccgctcccttcgaaatgccttcttcagtttctgaagatcccagtgcttccagtcagggaagtgagcctcttgaaccctcatacatagtggggcatgtggcctcagcacccaaagaacaaaacctgactactttattcaatgacggggagcacagtcagggtcttaaaaatgatttcgttcggaatattctttggacatttgaagatatccatatgttggttggctccaacatgcccatatttggaggaggcagatacccagcagtcagcttacgtctcaggtaaaccaacatcgtaccccttctcaagcttatggtatttaaattcttcctttaaaatctgttccatcnnnnnnnnnnnnnnnnnnnnnnnnnnnnnnnnnnnnnnnnnnnnnnnnnnnnnnnnnnnnnnnnnnttgtctcaaaaaaagaaagaatcagtgttccatctgtttgggcatcttcctctttctctaggttttttcacctccctccttcccttgccagttgaaatggccgcattaaggaaggagctactatcaacaaatgctgaaaggcaggcctatagtcgagtcttcattctagacctcattgaatagagccagaggtttgttggactgaactagtcttaggtctgaacctacgacttgtgagaatattcaagacagtttatttaattagttagagagtttcctactaactacttgtgagcattttgcttaatgctccacatgtatttgttgacattagccagtgtgaattctaacttaagcatggtcttgtatggtattcagtctttctctagttgtgtgaggagcaggcagtaggctgacagtcctttcctatcatattgtcttctattcttactgaaaacttaccagtgtcagttagaaatacaagcaagcggccaggcgcggtggctcaagcctgtaatcccagcactttgggaggccgagatgggcggatcgcaaggtcagnnnnnnnnnnnnnnnnnnnnnnnnnnnnnnnnnnnnnnnnnnnnnnnnnnnnnnnnnnnnnnnnnnnnnnnnnnnnnnnnnnnnnnnnnnnnnnnnnnnnnnnnnnnnnnnnnnnnnnnnnnnnnnnnnnnnnnnnnnnnnnnnnnnnnnnnnnnnnnnnnnnnnnnnnnnnnnnnnnnnnnnnnnnnnnnnnnnnnnnnnnnnnnnnnnnncaaaaaaaaaaaaaaaaaaa

SEQ ID NO: 5486 - DNA, 193 bp, Macaca Fascicularis
ccaaattttgtgtcacgagggatatctttatatgatatataaggggcacgacccccactatattaagagatatatagacacgaaggcaaagctcttgtattttttttcatccaaacaccccaaaatatattataaaaatgttcacatttcccgtgatgtgttatataatatatggggtaaacacaataaaata

SEQ ID NO: 5487 - DNA, 1985 bp, Macaca Fascicularis
cttgttttgtgaatttgccgacctcttcactcttagttggaagtcccctggtaggaggatttttgctagtctgtagaatgtgtttgtagaaagtgtttaggatacccttgcaatgaaagacctcatctttgtggatttgggtctctactccccagaatcccaaaaacccctcctcaaagagcattcggtgcttgaggttctccaatatggcagtgaccagctctgcatactcttgtttcattccttccaccatcagggtgtaactgccaggattccgtctgtgtgtgctcccatcagctttgaatccaggcagctcttggcccattagctgacccaaaggcaacaggtgggacctgtttttggcggaactgttaaagaaaaatgccctagtcatcagcttgtttcactttcatttatctctgtcatctgggaatacaatatagatagtatcaggagcaacaaaaggtacattctgatattattttcagttttttgtctagacagagaagactaagcacttggctatcagaaatacgtaccacaaaaaataagaaagacatgctcagcaaaaggccagaggggggtagcactgcttgttcactttctctctatatattcttttttaaaagaagaaaaaagtttaaaccccaccacccactcatcaggtgattggagactatagtcctgtgattctaattactacaatatactgcctctttgctaaggaaaaacaaaacaaaacaaaacaaacaaatgaaaacaaactccctatgggggcaaactcaggattttccaaactgtgactccccctggctctggaatgttgcacccagcagttttgtgaggttgctgaatggttgcctactttaagggagtggtgaggcagaggggaatgccatgtgttgattccccacacattccaggcactttacatacatgttatttcccttactcttcacagtaaccctctgggacagtattaatgccacaggctctgagaagctaagcaacttgctcatgtttccgtggtgaggaagccacaactctgagattcgaatttatctccctgtgattccaagtctagtgctgctgcttttcgttactacctcaaggaagataccatttcggggtctatttctttcattccttcactaattgatttatttaatcttaattgagtgcctactatgggccaggcactctgctggtccccagggattagggccagaacgagggtgaggcaggaagggcgcctaaggcactgcatcgaaggaggcactggctcccaggcactcaccctgtactcccacagccccgaagttgagtgcctttttaaattttgtgccataggcacttggttgacctcaccctagttccatccctgaaggaatagtgagcaaaccagacatgcactctgccctcagagagctgacgattcagtagcagacatgcaagctaaggagattccagttaccacaacagatcacccccagcttcttcctggaaaaccaccatcaccttattatactcgcagagtctatggtcaagagctcagacaggcccagagggcatggcttgtctctgttctacgtgtttccggaatcggctggaaggtgtgcaacttaggggtaatgaggataagtgggatcacctgcaatcacctggcacttcgtcactcatgcatgtggtatctgggctgcgatgagtggagggtcaggctaagctgggactgtgcagtggagcaccgcatgtggcctccccaggtggcccgagcttctcagagcctggtggctgtgtccccaggggatacatttcaaaagggagcacccagagaataatgggcagagtcacaaggtttcatttatatctcatacccaattggccaaagcagccaccagtctgcctaggtctaagaggaggggacaaagtcccaccttttggtggaaggaatatcaaattattggtgaccattttttaaatcattc

SEQ ID NO: 5488 - DNA, 995 bp, Macaca Fascicularis
catatgcccatgacactggggtactgggacatccgcgggctggcccactccatccgcctgctcctggaatacacaggctcaagttatgaggaaaagaagtacacaatgggggatgctcctgactatgacagaagccagtggctgaatgaaaaattcaagctgggcctggactttcccaatctgccctacttgattgatgggactcacaagatcacccagagcaacgccatcctgcgctacattgcccgcaagcacaacctgtgtggggagacagaagaggagaagattcgtgtggacattttggagaaccaggttatggacgtctgcattcagctggccagagtctgctatggccctgattttgagaaactgaagccagaatacttggagggacttcctgaaatgatgaagctcttctcacagtttctggggaagaggccatggtttgttggggacaagatcacctttgtggatttcatcgcttatgatgtccttgatataaaccgtgtatttgagccaaggtgcttggatgccttcccaaatctgaaggacttcatctcccgatttgagggcttggagaagatctctgcctacatgaagtccagccgcttcctcccaagacctgtgttcacaagggtggctgtctggggcaacaagtaatgccttgaaggccaggaggtgggagtgaggtgcccatactcagccctctgcccaggctgtggagtgaagctggactgtgcatcccagcacctggctccttgttgttttctcctgtttattcccatctttacccccgagactttattgtacttacttcacttcccctaaacccctgtcccatgcaggccctttaaagcctcagttacccacttttcttcatgaacatctccctcccaacattacccttcgcggcactaaagccagcctgaacttccttcctgttagtggttgtgtctgctttgaggggcctgcctagcccctcgcctgtggagctc

SEQ ID NO: 5489 - DNA, 485 bp, Macaca Fascicularis
  misc_feature (1)...(485): n = A,T,C or G
cacggacttaactactaacatgcttctgaagatgggagataactagcctcctgccgcgggtccctgagtcttccttcatggagagggttcattgtagggactggccatgggacaacctnnnnnnnnnnnnnnnnnnnnnnnnnnnnnnagatattgatagtagnnnnnnnnnnnnnnnnnnnnnnnnnnnngcactgcttgcttgctctcaaattactatcctctgtaacaaggttcagattgaaaattatatactcagggacaaaatataaacttgtgtttggattaaacttttcttcctgtttaaaaagagaagttagaatacctgtgttgtgtatgcctagaacttagaaaaattacaatgtacaagaatcttttctgctgtgttttttgtaagtggtcttgtgagttaataaagaagcaatgtgattggatgggaagaatagcggattgggagtctacaatgtcaaatgttagtcctaact

SEQ ID NO: 5490 - DNA, 741 bp, Macaca Fascicularis
  misc_feature (1)...(741): n = A,T,C or G
gcatgggtgctggagtagaatgtggctgccaaaggaaaggcaggcaggaaaggtgactcagctaccccaggagtnnnccctgtcttactgatgaggagactcagggagacctgacatgccgagggctgaggaactgtgacttagcccctacccttccacacccatcctgtgcctgcaaacaggggtgagccctgggctgtgtcagggagccccaaagagaaggcctgaagtctggcaactttaaaggggacagtccaggccctgagcccctgagcgcccttcacaacccctacaagctcccctcccaaggctgggccagcagtgcctgtgggggactgcccaggcgtggtcctgccatgtgggactgcctgtgtggcccagtgggacccagattagtcatgggacagctggggtgccctccctccagctccacatgtctccctggcttcagaggaaaccgacttagggcccaagtttcttcacaactgaaaaatgttccaccccaaaggacatgagcaacagctcgccgagaaagaaagagaaatgaagtaagtggcttttcagcattgggagagacgcttggccacgcacagctacaggcagagatctgggaaacagaatgccggggaaagcaagtgaggaacaggagaactctgcaaatcaggacactcatcataaaataactctgtttgtttcacaaggacacatatacctccagggacatatatcatgggccccggt

SEQ ID NO: 5491 - DNA, 729 bp, Macaca Fascicularis
  misc_feature (1)...(729): n = A,T,C or G
agacccagaaacgnnnnnnnnnnngtnnnnnnnnnnnnnnnnnnnnnnnnnnnnnnnnnnnnnnnnnnnnnnnnnnnnnnnnnnnnnnnnnnnnnnnnnnnnnnnnnnnnnatacagagtctcttgttcaaaaattattaacaatctccagatggtgatagcagagcattgaaccaagtgtggggctcttctgggtgcagggccatttgcaactgtagaagttaannnnnnnnnnnnnnnngtttggacaacatctttagattggtggagccctctgcctttgcaattactggtgctgtggagctctcagagttttaacatctcaaccaagccacatggatactatttcctcagaaaagacaaaattgattcaagcagaagagtgaactcactgaagaggactctccacccataactggggatgcctcagccactcacacttactccaagattagtgtcattgattatggaaagaattgacttcttcccctggtcctgctcatttttctagagccaggaccataaatgtgttttatggcagagaaaagtgaagaggggtgggatagtgtgtgttgagagagaagcagataggcaatcttatgctttggctcctagattatgcaggtgcctattttctatcatctccataaatctacccttactgcacttcctatttggcagggatattttnnnnnnnnnnnnnnaactcctcctctgtctgtaaagtta

SEQ ID NO: 5492 - DNA, 721 bp, Macaca Fascicularis
  misc_feature (1)...(721): n = A,T,C or G
aagatattcagtgctctgcagaagcctctnnnnntcacagatctctgcggnnnnnnnnnnnnnnnggaagcttgaggannnnnnnnnnnnnnnnnnnnnnnnnnngaatggggttccaagggcccctgggctgggaggagctggctatgaatgtgcatgaagacataatagctcaacctctaggattttgcatgcagagcggatcctgccttgtcactgacttcatctgggattgcttttccactcactggggcttacagaacaaagagcccggttcacaggcagagactcgggggtgctcagcagcagcccagatttaggggacatttgagggactcggggccgcagccaaaaactgtctctcctggctacacctgcttaacttcagttcctttttctgtcaatatgtccctgcccgctgcctctcggtgttgccttcatgtcttgtgtgtgttatgtgtgtctacttgtgtagtagtgtgtgagccctcagggtcagggcttgtggctctgatgttaggttcagggggcttcagacccttctatgagctccaagctatcatggcgcttttccctccctcttctcccaatcagggcatggagcatgtggctgtcctgaggttcttttactgatgtgccgccctcccacctcctcaagtggtgactttgtgtgccctccccctcctttctgtattccttctcaatactttccttggtgtaa

SEQ ID NO: 5493 - DNA, 744 bp, Macaca Fascicularis
ccatttacagttcaatgaaataagtgtctgtgcattgctgtctgtctctattggcaaagtcaaataaatggcttctcagctgctgtttacaacaaacttccctaacaaaacagaacctctaatttagggctgggaatcgaagtcttttggttccagtccccgggacagttttgtatgctatatcttgtacacaggttgtaggttggtttattgccattttgttttatttctgctatataaaaaccaagagccatacaattagacaaatatggaggaatgaaaggcaattcaaccatctgcttgatttccaacccccgcccccgcccgccgccctaattttggagagaataatggttagagaacatttcatctcacttgaaacatcctttgggagtaaattattcttaggtgctcacttggtctgagctcagctgaatgcagggaagatgggacagagtaacatttctcctctgtgtggcctccagctgagcctgtccctggattgtcctctcccccgcactgtgggcatttaccgtgttccaggcacactggacctcaccatgtccccagtcctcttgctggacatggttcataggtcacagaaggcagcaaagcactgactgggccacatcttgaaaactcgtggaaagaggaggaggaggaactttgaccacacacagtgatgcctcacaccctgaaggtgggggattttatacctgtttgtacaactttggtcttgatggg

SEQ ID NO: 5494 - DNA, 1841 bp, Macaca Fascicularis
atgagtaacgtgaatttgtccgtgtccgacgtctggagactgatgatgcgggtgtgctggttggtgagacaagacagccggcaccagcgaatcagacttccacatttggaagcagttgtgattgggcgtggcccagagaccaaaatcactgataagaaatgttctcgacagcaagtacagttgaaagcagagtgtaacaagggatatgtcaaggtaaagcaggtaggagtcaatcccaccagcattgactcagtcgtaattgggaaggaccaagaggtgaagctgcagcctggccaggttctccacatggtgaatgaactttatccatatattgtagagtttgaggaagaggcaaagaaccctggcctggaaacacacaggaagagaaagagatcaggtgacagtgattctatagaaagggatgctgctcacgaagctgagcctgggacagggctggaacctgggagcaaccataaccaatgctccgtgcctccaaagaagggaaaagatgcacctatcaaaaaggaatcactgggccactggagtcaaggcttgaagatttctatgcaggaccccaaaatgcaggtttacaaagatgagcaggtggtggtaataaaggataaatacccgaaggcccgttaccattggctggtcttaccatggaccgccatttccagtctgaaggctgtgaccagggagcaccttgaactcctcaagcatatgcacactgtgggggaaaaggtgattgtagattttgctgggtccagcaaactccgcttccgattgggctaccacgccattccgagtatgagccatgtacatcttcatgtgatcagccaggattttgattctccttgccttaaaaacaaaaaacattggaattctttcaatacagaatacttcctagaatcacaagctgtgatcgagatggtacaagaggctggtagagtgactgtccgagatgggatgcctgagctcttgaagctgccccttcgttgtcatgagtgccagcagctgctgccttccattcctcagctgaaagagcatctcaggaagcactggacacagtgattctgcaggccctgagctgctgctgcggtgtggcccactggagcaaactgctggcatctattctgggttgcttgtgaacttctactcatttcctaaatgaaaacatgcagctttttcacagagtttattctgttattgagtggccacaatgtagagtcgctcgaagtagttcaggattaggaattggggtttgtcatagatatattctttggtgagggtggctgggatatacctgactcaccatcttcaggacccatgtcaggtctgaccattgggagcaaagctatgttcacactgacctaagggagaatatgaaagcagtgggctggttataaatttatgtttcttagatttatcctccacctctgtaggcatggacacgctttaatcagagcacctagagtggcctcttgtttatcctaaagatactgatgggccttgttttctgttagtctgttatgtaatattattcttttcccttccttcgtggggaggcttactttgtccagtccttccattcccttctatcttagattacctaaatgttcccttctcaggaattctgtctcatcagttcttcactgtgagcaaagaggctagatgagggtgtggggggttggagttttcttctaatatcaagggttcctggctgtgaggaaacagccacatgttcgtcatgattcagctgtgaagtcgttttggacctgttgtctgaaaataaagttaatttgtttgaggcatctctcttaaaaaaaaaaaaaaaaaaaaaa

SEQ ID NO: 5495 - DNA, 229 bp, Macaca Fascicularis
atatggtacctgaaaatggtagggctaaacctttcttattgtaagtgcccttattaagggcacttgtcttaattaaagatgggtcctcccttttttggggttttttttttttttttaagtatacggatgaatgagatcttacctattaaatatattattggatcatggttcctgaaggtcattaaagtttgagtgtatgtgtatgtgtgtgtgttttatgacttaaata

SEQ ID NO: 5496 - DNA, 472 bp, Macaca Fascicularis
cgcaaagagccggcgcggtgcgcaggggcgggcgcccagcgggcttggcatgcgcgcccccgcccggggctataaaagcatcgccacctgctgccactagccaagccgcgcgtccagttgcttggagaagcccattcacagcctccagctgctgctcgcttctacatggaccctgagacctgcccctgcccttctggtggctcctgcacctgcgcggactcctgcaagtgcgagggttgcaaatgcacctcctgcaagaagagctgctgctcctgctgccctgcggagtgtgagaagtgtgccaaggactgtgtgtgcaaaggcggagagggggccgaggcagaggcagagaagtgcagctgctgcgagtgaggaagcacccctccatggagatagtgccaggtggctcagtgccacctatgcctgtggtgaggtgtggctggtgtccccttcccctgttgaccttagggga

SEQ ID NO: 5497 - DNA, 782 bp, Macaca Fascicularis
  misc_feature (1)...(782): n = A,T,C or G
taaatgtcaaattgcattgaatatattagacgagaatttattctatgattctggaataggaagnnnnnnnnnnnnnnnnnnnnnnnnaactcttctgcttataagacagcgcaaggaatannnnnnnnnnnnnnnnnnnnnnnnnnnnnnnnnaatggaagctttacagaataaagacattgaaaaggtcttgagtgcaggaagcagacgattcccacaaaatgcattcatttgtcaagccttagcaagacatttctacatcaaagannnnnnnnntaannnnnnnnnngactgggcacgtcaggccaaaatgaaagcacctaaaaattcctatatttcagatacccttggtcaagtctacaaaagcgaaatcaaatggtggttggatgggaacaaaannngtaggagcattactgttaatgacctaacacatctcctagaagctgccgaaaaagcctcaagagctttcaaagaatcccaaannnnnnnnnnnnnnnaaaactatgaaaccgannnnnnnnnnnnnnnnnnnnnnnnnnnnnnnnnnnncatgtataatacagcttgtttcttgggtgaaatagaagttggtctttacactatccagattcttcagctcactccctttttccacaaagaaaatgaattatccataaaaactatggtgcaattnnnnnnnnnnnnnnnnnnnnttcctcctgatcccagaaacgaatattatttggctcttagcaagttcacatcccacctaaaaactttacaatcnnnnnnnaaaaggtgct

SEQ ID NO: 5498 - DNA, 690 bp, Macaca Fascicularis
tggagtatcagcagccatcatttgaggacccgacaggagccgctgacctcctggatgaggaggaggatgaggacaccggatggagtggggcctacttcccgtccgccatcgagcagactcaccccgagcggggagtcctagcgcagactttgcggctcatggagagtctctgggagacaggcacctgcggacgctgcagataagttacgaagcaggtgaggacacctgagcggaaattagaagcaaaaatgatcaaggaggagagcgactaccacgacttggagtcggtggttcagcaggtggagcagaacctggagctgatgaccaaccgggctgtaaaggcagaaaaccacgtcgtgaaactgaaacaggaaatcagtttgctccaggcgcaggtctccaacttccagcgagagaatgaagccctccggtgcggccagggcgccaccctcactgtggtgaagcagaacgccgacgtggcctcgcagaacctccgggtggtcatgaacggcgcacaggcttctattaagcaactggtttccggagctgagacactgaatctcgttgctgaaatcctcaaatctatagacagaatttctgaaattaaagatgaggaggaagactcctgaggacccctgggtgttttcagcatgaagctccgcgtatgccctgagatcaccaccgcttgat

SEQ ID NO: 5499 - DNA, 793 bp, Macaca Fascicularis
  misc_feature (1)...(793): n = A,T,C or G
caaaccatgccccggtaaatgnnaaaccacatgctctgtgccntgagagaaaacctctgaccagcaaggaaaatgtattgatgcattcctccattttggcatctgaaagagagtcttggagaactgcaggagagggggaaaactggagaaaagaaaatttaaggaaagatatggagagagatttgaaggctgactcaaacatggcactcaacaattctagccaagaggtcacaaaggatctgcttgaaatgatcgaccatacaagcatccgaactattgaagaattggctggaaaaatagaatttgaaaacgaattgaaccacgtgtgtggtcattgccaagattcacccttcaaagaggaagcctgggccctgctcgtggacaagagccctcagaaggcctcagatgccgaccctggcagnnnnnnnnnnnnnnnnnnnnnnnnnnnnnnnnnnnnnnnnnttctggacttggaagaggactacaatgtgatgacctctttgaaataccaaattgagtaaggacagttgatttaagctttgattccttacagcaggaggctgcccttcagcctgagcagaagcagccacagtggccgtcaggggccacatttctcaaaagattggcagaacctgaattaccagacccttttaaaatcccagttatgtccctttttaagctgtgagaccagttttcttgaattccattgctttgaaatgtttcctattactgattttttttttttttttaactttccttgacatctctaatgtgttttttgatcgacgttcaa

SEQ ID NO: 5500 - DNA, 1634 bp, Macaca Fascicularis
ctttttctggaggaggagcccagagcgtacgggagggggcggacctttgcccctcccgaacttgggccggagtggtgcgggcggcgcgaagcggcgattcccacgtgttggccttctcacgctagcccactttggtcctccttgaggtcccgggcctgtgggcccgcttcctgccaagatgccgaaggtcaagtcgggggccattggccgccgccgcgggcggcaggagcagcgccgggagctgaagagcgctggaggactcatgttcaatacgggaattgggcagcacattttgaaaaatcctctcattattaacagcattatcgataaggctgccttaagaccaactgatgtagtgctagaagttggacctggaactggcaacatgactgtaaagttgttagaaaaggcaaaaaaggttgttgcttgtgaacttgacccaaggctggtagctgaacttcgcaaaagagttcagggcacgcctgtggccagcaaacttcaagtactagtgggtgatgtgttgaaaacagatttgccattctttgatacttgtgtggcaaatttgccttatcagatctcatcgccttttgtcttcaaactgttgctacatcgaccttttttcagatgtgctatacttatgtttcaaagagaattagccctccgactggttgcaaaacccggagataagttatactgcagactctcaattaatacacagctgttggcacgtgtggaccatctaatgaaagttggaaagaataacttcagaccaccgcccaaggtggaatccagtgttgtaaggatagaacctaagaatccaccaccacccatcaattttcaggaatgggatggtctagtaaggataacctttgttaggaaaaacaagacactctctgctgcatttaaatcaagtgcagtgcaacaactcttggaaaaaaactacagaattcactgttcagtccataatattataataccagaagatttcagcatagcagataaaatacagcaaatcctaaccagcacaggttttagtgacaaacgggcccgttccatggacatagatgacttcatcagattgctacatggattcaacgcagaaggtattcatttttcctaggtgtttggaacacagaatttttcaaggtcaagaaaagaaatgaagtttgtattttttgtatttgagaagataatgcttttgctttagagacataatttacttgactgtttttggttcgatactactactgttgtcaccatttatgattctgaatttttaagttggaaagttctaagtatccaagtttttaatgtatagagctggtccaatctattcacaataatcttcaagttcaggagccgcagagacgcacaactttacacttaaacttattatttctaacagtttattgtataaagatgttactcttctatttactgttatatactgtgaggccttctttaggcctttagctctgttcctccagtagtaaaacagttaaaatatgcttcactagtcacacattccccataccatttcatgttattcacattccctgtaccatttcttgttattcacatgtacagtaaaatcattgttttttaaagtaaaaaaaaaaaaaaaaaaaaaaaaa

SEQ ID NO: 5501 - DNA, 607 bp, Macaca Fascicularis
  misc_feature (1)...(607): n = A,T,C or G
gatcattaactactagaatttgagattatatttctatacaatatttttaaagttatnnnnnnnnnnnnnntgttnnnnnnnnnnnnnnnnnnnnctattcacagattgcttcnnnnnnnnnnttatcttccnnnnnnnnnnnntaaagttagaatctgtacacacatattgattatnnnnnnnnnnnnntctagaaattgtaacactcccacataaacgccagaagactttttcagaatgcaatgttttctaaatatnnnnnnnnnnnnnnnnnnnnnnnnnnnnnnnnnnnnnnnnnnnnnnacttttagattatgaactgtgcaaactttacccaaaactaccttgcatgattccctcctaaatatgttccttgannnnnnnnnnnnnnnaaatcactgtttgagctagttacataaaatttgttgtcaagagaaggcctttctacaagtttccagattaacaaagaaaagaggaaatcagggcatttaagtgcaccttcccattactttccttaaatcacctcatagnnnnnnnnnnnngnnnnnnnnnnnnnnnnccagcactttgggaggccgaggcgggtggatcacgaggtcaggagact

SEQ ID NO: 5502 - DNA, 748 bp, Macaca Fascicularis
  misc_feature (1)...(748): n = A,T,C or G
acatgcactcacnnnnnnnnnnnnnattcaatgacaggttgattactagttancttctaacagtgggcaccctatannnnnnnnnnnnnnnnnctgatttaaagttgggtgacttgtaagagaatgttgagtaatgcagaaatacaggtagagatgtatgtatgtgattggtgcttatacccacacaccctccacaccacaggaaaaaacagataaccatactctgacaattagggccaaggccaaatagcaaaataagcttgcttttaatctatcttctccatatctaagcattggaggtcaagcgtgtggacagaattgaagacacagagtttttttatcctgtgaccccaacatcctttgttcactgtctgatctctggaagaaaagtggacaacaggtggccagcagtggtctacgtgcagttattttattcctgctgccacctgctctttnnnnnnnnnnnnnnnnnnnnncccttagaactgaagaaagatgttggtagggagaggctctgccttcacttctggcagaaaaggaatgttcagttcattcacccccctgacatcagagctgcacttcaatgtggcagctattggccatgtgtgcctcctgagtgactggaatgtggctggtctgaactgtgatgtgctagaaaggtaatatacagagttagtttcaaatgtttatatacattattaataattacacattcctcacacattacaatgataatattatggacata

SEQ ID NO: 5503 - DNA, 723 bp, Macaca Fascicularis
  misc_feature (1)...(723): n = A,T,C or G
actgacccagcaagatatacatagcaataaccttcttgatcataaggaatgtgagacattggagtgtttgagtgtcagctcctccaagaagccttccctggacctcagtttgagcctggagatcccttctcaagtacccaggataggctatgcacttcctcaacttatataaagattgttggccttacccactagcctgggctccttgacgatgaaacacctgggtcgcagagtggttnnnnnnnnnnnngggctcgtacagactgtaagcctcgcttctgggctttgagctcagcactgtagccccagagcctccgctgaatccaacgactgcttcctggggacttgcaacaatgccctgtgacttctgagaagatgagtatcctatttgccaagttggttccccactcgaccctgcagtggccaccnnnnnnnnnnnnnnngcccgccatttctgtttcctcctcctaagactgctcgccctctgataggagcagctgatcctctggaaggcccatgtgggcatggctggagctgacctgcccctgtcaagtttgtagcagaggaaacgatcccagtttcccatctgacatcgcccttcatcaccctagttcctgtgttccaggcacacctgtcatgtttccacagattctaaagccatccaggccaaatnnnttatttgcttcttcaatcctccagtgtttttcgcagtaccagacctac

SEQ ID NO: 5504 - DNA, 1856 bp, Macaca Fascicularis
aaactttttgaacatgctgtttagtttatcctaatgaatctattaagaggtgacacatacatcctgcttcctctctccaaagagacatttgtggattcaattccttgcttgttgctaatgccactttgtaatctcaatactgatctaattctgtcttctgtctgtctgcaacaaatttaatcagaaaaatcattatccaaatgtaatgttctgtgttgatataattactgataaagtaagctttacatctgccattttgccacatatgggttttttttttatggttgttttgatttgggttttttttttttcgagacagggtctcactgtgctacccaggcttgtatgcagtggtgtgatcttggctcactgcaacctctgcttcctgggcttaagggatcctccagccttagcctccaattagccaccatgctcaagtaatttttgtaattttgtacagatggggtttcaccatgttgtccaggcacatgtgttctatatgtctttttttgtttgtgtctctctttttccattattttcttcttttatgctaaatagatgttttctagtatgatattttaattcccttaatgttaatatttcttgaattgtatttttacattcttttcttaattgttgctctgaggattataactagtatcttaacaatttagtttagatcaataccaatttaatgtcagtggtatacaaaattttgctgctgcatagctctactttttcccctttctttgtgctcttatacattataagaagaaatatttacagattataagtctatcagcaccattttatatttgttgatttgtatagttaccttttaaataaacagagcaaaaattacaaaccaagagtatattaatactatttcttatgcttatttatattgttatgtctactggtgctgttaatatttcttcatgtggattttatttattgtctattgtcctttcttttcagactgaacaactctgtttagcatttcttatagagtaggtttatgagtgacaaattatttcagtttgtttatatggcaatgtcttaacttttttttcatttttgaagaatagttttgaaaactatagaattcttatttgacagtatttttctttcagtacttggagtatgtcaccccattgccttccggaaaccatagtttctgataagaaatcaattgttcctcttatcaaggacccctgtatgtgatgagccacttctctattactgtgttcaagattctctttttatcttttactgttgacaacaatttgtttatgatgtgtctgggcatggatgattttagttgatcttacatacattctgagtttcttttatgtacagtttaataattttcaaatgaagttttgaaaattttggccattgtttcctcaaatattttttctagtttttctcttttacttcccttctaaagttttcattttcattatgtggctattggtacacttgatagcatcacagggacattgaagactttgttcagttttcttcattattttttctttttattccacagactagatagtctcaattgacctatattcaagttcactgattctttattctgccacgtaaaatttgcaattaattctccctagcaggggaacagcacactccctggcaggactgggacctgtcggggggcagtcggagggagagtatcaggataaatagctaatgcatgtagggcttaatacctaggtgatgggttgatatgtgtagcaaaccaccatggcacatatttacctgtgtaacaaacctgcgcatcctgcacatgtatcccagaacttaaaattaaatttttaaaaaaaaaaaaaaaa

SEQ ID NO: 5505 - DNA, 733 bp, Macaca Fascicularis
  misc_feature (1)...(733): n = A,T,C or G
cacagggacactgggttnnnannnnncagtgctcaacagaatccactgnntctaggtaaaatagagcatgtcaggaagtgagtgcagtcttcccaaccctcaaagtagccgaaggagaaggtggcacaccaaaagctggagccacgcctcctgtgaagaaagatggagtggaccttctttgtttcaggtaccagatcacaagtgtcttctcagtcagggatgcctcatatctaaaaccacaggacacagggatcagtccccacatgcccccacgccctctcnnnnnnnnnnnnnnnnnnnnnnnnnnnnnnnnnnnnnnnnnnnnnnnnnnnnnnnnnnnnnnnnnnnnnnnnnnnnnnnnntttgagggagtgttgatgcaacacagaccaagacaggtcactgctcttttggggccacattatacaaggataaaaataaacatacaaaattgttctaagcatgcannnnnnnnnnnnnnnnnnnnnnnnnnnatacacagcatcgtacacagaaaattacacagcacagcacgatatagaggttctgtatgtgccacagacatcacagggcagagtgtcaccaggaaacacccatctcagagaatgaaatcggaacaggaggaaaagcagccagtcatacagacaccacgtagagaatcatcccagcaaggggaaagacagttcaaaagtcctgacaaatatcaaggctgtaagtagacttttggttctgt

SEQ ID NO: 5506 - DNA, 591 bp, Macaca Fascicularis
  misc_feature (1)...(591): n = A,T,C or G
tgggggctccaaagggttctgtggcccnnnnnnnnnnnnnnnnnnnnnnnnnnnnnnnnnnnnnnnnnnnnnnnnnggctgtggnnnnnnnnnnnnnnnnnnnnnnnnnnnnnnnnnnnnnnnnnnnnnnnnnnnnnnnnnnnnnnnnnnnnnnnnnnnnnnnnnnnnnnnnnnnnnnnnnnnnnnnnnnnnnggctgtgggnnnnnnnnnnnnnnnnnnnnnnnnnnnnnnnnnnnntgttcccagtnnnnnnnnnnnnnnnnnnnnnnnnnnnnnnnnnnnnnnnnnnnnnnnnnnnnnnnnnnnnnnnnnnnnnnnnnnnnnnnnnnnnnnnnnnnnnnnnnnnnnnncttcattgttgagcctcaaaccactgctcagagnnnnnnnnnnnntatagaatggagccatatnnnnnnnnnnnnnnnnnnnnnnnnnnnnnnnnnnttaatgtccattgtctctactaacaaattctcttcccaagtcacnnnnnnnnaggctgaatcacccctnnnnnnnnnnnnnnnnnnnnnnnnnnnnnnnnnnnnnnnnnnnnnnnnnnnnncacttgcagtcctgtcttttcc

SEQ ID NO: 5507 - DNA, 1744 bp, Macaca Fascicularis
cactcatttttattcctctggttacaatatttcaacagttccttgttacttacaaggtatacatataggcactcttgtgaagtgaccccagcctgtctcacctcatgccactgacctcctcttgactttccccagtgcattccaggttccagataactccaatcagttattgtacacactccccaaatgtgccacaccctttgtatttctaccctttgttcctcctaactggaatggctttcacatatttacaggaggtgctctttttttacccttttactctaaatatctgagttcaagcatcagagcattcctgaacattttctgatcctcagagtgtttcttgtgtgcttgcttaacacatactgcttagtttttccttgccaaaccatgagctcttcaaatgtaggagctgcactttctcttcttttccagtgtgcagcatgtggcaggtgttcatggttggctgagggaaggcaggcctgttggggcctagtgcactaatcatcatcatctgacgggtagtgtggaaacttcatccagctgtgagatgatgagggtctaggacggtggtgcttgtggaaaggaaaagatattaaacgttagagaaaaaacaggatccagtgacttagatgggtccgggggccaaaagagaggaaatcctctcagatgagtcctacaagtttagttaaatgccatttgttattgttagtactgcaaaaggtaggaaaggaaggtgtacagacaagtgagggagctagggcgaacagtctctgtcatattgactattctactggagtctaagctccatgagggaaaggacttcacctgtcttattcagggctttgtacagcgcctagtcagaaacacagtagatgcttaacaaacttattaagccaaagggagggtaagagataaaattgttgataattgtactaatacaaatattacatggcaggatataggttgagcaatctttgaaatttcttggatgagggactgtctttaaaactattgagagtgtctagtacatatttgttaaatatatcacagttgactagttgacagttgactaataccatagtaaacagttggttaacagttgttgatttgagtccttagttttggtagagtttaattacagtattttcctagcaattgacgttatagcaggatgtcttaacaatactatttgttaccagtatttgtgtatgtgtgatttctgtttctttgattcattgtgcaagtggagtgaatagttagtcattgcatgcattatctttagaactgcatttgcattttctttgacaattcttgcaggtatcctttcttaaaacaaaaagcaagggaacaccatttatgcagtgggaggattcgatggcaatgaatttctgaatacggtggaagtctacaaccttgagtcaaatgaatggagcccctatacaaagattttccagttttaacaaatttaagaccctctcaaactaacaggcttagtgatgtaattgtgtttagtagaggtacacttgtgaataaggagggtgggtgggtatagatgttgctaacagcaacacaaagcttttgcatattgcatattattaaacatgctgtacatactttttgtgtttatttagaaaggaatgcaaagatgaaggtctgttttgtgtatttttaagactttggttattttactttttggaaaagaataaaccgagaattgattgggtaaaaaaaaaaaaaaaaa

SEQ ID NO: 5508 - DNA, 729 bp, Macaca Fascicularis
aagtgctgggattacaggcatgagccatcacacctgaccaaaatataaaagttatatgaaattgtataaaatgtcaggtggtatatgtgcttgtattctatgggaaatggggtctctatgaaatggggcatctcattactatgtatgtgataatatacaaactcctttgtatggtatatacagatcttgtttatgtaacttacaccaattttctggtggttttccaaccaggtaagagtctgtccacaaggggacatttggcaaggtctggagacatttttattaacacgttatgatggtggtggtgggagcacgcatctagtgggtgaacagcatagatgctgctacacatcctacaatgcagaggacagccccaacaacaaagaacaattaagtccagcatgtcagtattgccaaggttgagataccctggatggcttttttctactgccactttccaaatcttattcagcttcttctccatattaaacctcttgccatttccattctctctaccatgctcttcatctttgaccacatgaacacttgtgtttgaagtatttccttttgggtgactattcatcagtgtttggatagaactctgctgagaatgtccccattgtaatattatgatgtttactagcatatatatcctgcccatcagaccttaaactccttcagggcttctgaaacccttgtgcctggtagacagtagccactaaataatat

SEQ ID NO: 5509 - DNA, 744 bp, Macaca Fascicularis
  misc_feature (1)...(744): n = A,T,C or G
gtacatggaacgcncnnnnntgacagggctggcgttgcggcacatggtggagcacagnnnnncagaggcacagggtgcgcggccccgtgccctcaacgtgcctcgcgttggcctggtcnnnnnnnnnnnnnnnnnccaggatgacatctcggtgtgggcagcgcgtgccaaggaggaaggcatcgccatgtatgccgtgggcgtgggcaaggcgatnnnnnnnnnnnnnnnnnnnnnnnnnnnnnnnnnnnnnnnnnnnnnnnnnnnnnacgccccggacttcggcaccatgacgcacatgatnnnnnnnnnnnnnnnnnnnnnnnnnccagaggagggcatcagcgcagggacagagcttcggagcccatgcgaatgcgaaagccttgtnnnnnnnnnnnnnnnnnnnnnnnnnnnnnnnnnnnnnnnnnnnnnnnnnnnnnnnnnnnnnnnnnnnnnnnnnnnnnnnnnnnnnnnnnnnnnnnnnnnnnnnnnnngagggccacgggcggcccagacccgggctggggcgcggcaccatggacagtgcgccggggccaggcagaacctgggcccatcgggcttgggctgtcggggcggaggcgccggcgggcttccgacacagagctgagctggcctcgcccggaccattaggcggactgctgggtcagggggatagcgggtggtggaggaaggggcacgtgctagaccggcatgccctcgccgcgtgctgcgctcngttct

SEQ ID NO: 5510 - DNA, 718 bp, Macaca Fascicularis
  misc_feature (1)...(718): n = A,T,C or G
tgnnnnnnnnnnnnnnncctgcctcagcctcccaagtagctgnnnnnnnnnnnnnnnnnnnnnnnnnnnnnnnnnnnnnnnnnnnnnnnnnnnnnnnnnnnnnnnnnnnnnnnnnnnnnnnnnnnnnnnnnnnnnnnnnnnnnnnnnnnnnnnnnnnnnnnnnnnnnnnnnnnnnnnnnnnnnnnnnnnnnnnnnccgcctggcctagaatgacttaaaatatcaaattaaatcaggtcactcctttgcttacaacccagtgcatttagaggaacaccccatgtctccacagggcatacagcatctgatttaatctggatccattccagcgccttcctctcccagtcaccttgagggccctgaccccggcggccctttcttcctcaaatgtcctcggctctatactgtgcctgggtctcttctccttctctctgcctggaacattccttctttccccttttgtcttgcccactcctctttacccttcaagtnnnnnnnnnnnnnnnnnnnnnnnnngaagttttcctatgcccgtcctgtttctctcagggagccttgctcttttctgtcatgcctcgaatcacaatttataatcagatatttatttctgtgtctacagtctcgccctgcgagactgtaagccccatgtgggcaggcactcatgattgtttctgatnnnnnnnngcctgctgctaacccagagcctgggcccaaagct

SEQ ID NO: 5511 - DNA, 768 bp, Macaca Fascicularis
  misc_feature (1)...(768): n = A,T,C or G
tgtgctgatgctcgaagcagatggttttgactgtctacttgctctttcctgtataatgaatagatgagtgaaagcagttttctttttctctttagtacatatgtattgggattcctgtgtcttacagctctccctctccaaataatacacagaatcctgcaacttttgcacagctggtgtctgtcaggtagcagtgaggccccttgtcttggtgatccttannnnnnnnnnnnnnnnnggagtcacgtgattaaaatcgctaatagagttgttgtttggggtacaagataagaagaaagaaaaacctacagcctttctacattctgacatactaacagtggtttcagtttctaaagtgtttaccagatgccgaaggcaaggtggggagcaaacgcacttatgtttacggatattttaaactctgttagagagcagcctttgaaaatccccaattttgttctactttttgacctctctctaccttttcagggtaatctttgtggnnnnnnnnnnnnnnnnnnnnagctttnnnnnnnnnnnnnnnnnnnnnnnnnnnnnnncgtgagccctgagcgatcttctatgcagttctgccatgtgtcctgtttggtctctctgtgttctttgttacttgnnnnnnnnnnacttccctactccgtgcattccatctttcatgttgtgtaaagttcttcacttttttctttgagggggtgggggtggggggagtcagcatgattatattttaatgtagaaaattgtgacatccgg

SEQ ID NO: 5512 - DNA, 232 bp, Macaca Fascicularis
gaggacataaaaccagggtggctggctctagggtctatatcttaatttgccatatagtattaatttaccatattgaattatacacatgttcaccaagttaggcattttggcagccatcgtgtacgtttttattttggaataaattagagaagtcgccagagtaatatgaaagttcttgtgtgatctttaccctcatctttattattttgccacgtttttttcattttctctg

SEQ ID NO: 5513 - DNA, 751 bp, Macaca Fascicularis
  misc_feature (1)...(751): n = A,T,C or G
ccgggatggggagttcaaggagacgggggagacgcggctgagggctnnncntcggggtcggggctgcagccgtcatgccggggatagtggagctgcccactctagaggagctgaaagtagacgaggtgaaagttagttctgctgtgcttaaagctgcggccnnnnnnnnnnnnnnnnnnnnnnnnnnnnnnnncaaggagtttatgctctgccgctgggaagagaaagatccgaggcggtgtttggaggaannnnnnnnnnnnnnnnnnngtgctttggacttctttnnnnnnnnnnnnnnnnannnnnnnnnnnnnnnnnnngaatattggacttgcattgattatactggnnnnnnnnnnnnnnnnnnnnnnnnnnnnnnnnnnnnnnnnnnnnnnnnnnnnnnnnnnnncaaattgggctgggtgcggcctgacctgggagaactgtcaaaggtcaccaaagtgaaaacagatcgaccttnnnnnnnnnnnccctatcactcaagaccaagaccggagcccaaccctgnnnnnnnnnnnnnnnnnnnnnnnnnnnnnnnnnnnnnnnnnnnnnnnnnnnnnnnnnagtaaagatgggtccgtggcccacactcggtcatgtgcccagacnnncaannngatgaaaacnncccannnnnnnnnnntcgactgatagtgtgttctnnnnnnnnnnnnnnnnattaacaaaaaagttaatttatgtgacttggnnnnnnnnnnataccatt

SEQ ID NO: 5514 - DNA, 766 bp, Macaca Fascicularis
  misc_feature (1)...(766): n = A,T,C or G
ctggccccagtgcgtgccccagctcatggggactcagcaagcaagcctggcaccatcttggannngagccggtcgagcccctgtccccaccgttcctgacctgtccttctcccacaggccnctggggcaggtggcaaggcctggcctggccttccttcctggcctcagccacctggctctgtctgcagcaggggcaggctgctttcttatcccatttccctggaggcgggcccccctggcagcagtattggaggggctacaggcagctggagaaaggggcccagccgctgacccactcactcaggacctcactcactagccccgctttgggccccctcctgtgacctcagggtttggcccatggggccctcccaggcccctgccccaactgattctgcccagataatcgtgtgtctcctgcctccactcagctgcttctcagtcatgaatgtggccatggccccggggtccccttgctgctgtgggctccctgtccctgggcaggagtgctggtgaggatgtggagccttttgaggggggccttccctcagctgtttccccacactggggggctgggccctgcctcccggttaccctccttccctgcaggcctggagcctgtagggctggactgaggttcaggtctcccctcagctgtctcacccccactttgtccccactctagagcagggaggcagtgggggaggagttgtgtctcgtcttctgtctccatgtggtttttgggtgtttttcttgtgtcctggat

SEQ ID NO: 5515 - DNA, 164 bp, Macaca Fascicularis
gataaaaatggcattcaaattgcgactgtcgatggcgtcttaaacttattgcaattacaatctgcaggtaaaaagcctatgtctgcacaagatttattaaatggccgtttaaaagggtttactattggtaaggtgcttgcataatgaaaaaattctcttctaaa

SEQ ID NO: 5516 - DNA, 695 bp, Macaca Fascicularis
  misc_feature (1)...(695): n = A,T,C or G
cccaannnnnnnaacacgagtacagtggcagacgcctaccgctggcgcaaccacaccgtgggcaacaggaccgtggtggaggaaggctactattatctcaataattttgacaacatcctcaacagctttgtgaccctnnnnnnnnnnnnnnnnnnnnnnnnnnnnnacatcnnnnnnnnnnnnnnnnnnnntcagacctctcactggagccgcctctacttcatgaccttttacattgtgaccatggtggtgatgacgatcattgtcgccttcatcctcgaggccttcgtcttccgaatgannnnnnnnnnnnnnnnnnnnnnnnnnnaannnnnnnnnnnnnnnnnnnnnnnnnaggaaatctccaaagaagagctggttgctgtcctggagctctaccgggaggcacagggggcctcctcggacgtcacccggctgctggagaccctctcccagatggagagannnnnnnnnnnnnnnnnnnnnnnnnnnnnnnnnnnnncaaggaccaagagcgacttgagcctgaagatgtaccaggaagagatccaggagtggtatgaggagcatgccagggagcaggagcagcagcgacagctcagcagcagcgcagcgcccgccaccgagcagccccccagcagccgccagcgctcccagactgttacctagcccagtgcccgaaagctctctctcct

SEQ ID NO: 5517 - DNA, 711 bp, Macaca Fascicularis
  misc_feature (1)...(711): n = A,T,C or G
atgggctgtaactaagggtnnngatggaggtagggtccttgtattctgcacgatactttcctgtgtcattctctgaagctgaattccacctctgttctcccaactgaatggtgggatccaaccatgtatgaatagatctcccagagtgagctgagatctgacgttaagagccccttgtcctgatgtcatggccagtccctnnnnnnnnnnnnnnnnnngtacttactggtttctcttgcagttatgcttgagannnnnnnnnnnnnnnnactctgcacctctgtcacttcaggactaacctctacagccaggtcgtttccaccacggcttccccgtgtggcccagtgcactttcctcccttgccacccagccacccctgtgtgtgttccaaggagcacagatggcaatctnnnnnnnnnnnnnnnttttcctcctctaatctgtaaatgtggtggaatatcataaatttctcacgttaaaatatccttnnnnnnnnnnnnnnngatagtcatgatggatttgttattatnnnnnnnnnnnnnnntctctggtattttggcatccaggtgtgtaggtgaaatggtttaaacttttccttttctgtagtgcccccaccctttgttttgtatcaaggttataccagcttcataaaataagttgaaaaatgttttccctttattttaattacaagagtttgtataagattgaatt

SEQ ID NO: 5518 - DNA, 2330 bp, Macaca Fascicularis
tgacagcagccagctcaggcggcagaggacgagagagatcgggctgcacacacatggatgaggctgacttttcagaagacacgacttataagcaggaggatttgccttatgatggggacctctctccgattaagatatgcaatgattacagttttacctcaaaaaatgatgcctttgaagtctcaagtcaaattattttcatagcagatgaccctcaagagaaggctatgcataatgagacttgtggaaatacagctatgaccatgcccctgggtaaaactactgaaaatgctgccaacaaaaaagatgagaaagagaaacaatgcactgcagctcttcatattccagcaaatgaaggagatgcttctaagtcaagcatttctgatattttatttcatcatctttccaaagagccattcttacgaggtcaaggcattgattgtgaaaccctcccagagatctcaaatgccgacagttttgaagaggaagctattattaaaagtattatttcatgttgtaataagaattcttggccaaaagaacaaaccctagaactcactgaccaactcaaccccaaaaaggatggtgaaaacagcaataaacctggttctcccaccatgacagaagaaaatacctctgatttagaagagacagtggctgctggagatagcagccatcaagaaaatgtaaatattctaactaaaaccaagggtccaggtgataaacaaaacagttatcaagggcaagcaccccagaaacagcatactgaaaaagcaagttcgggcaacaggttcaaatatggccaaggtcaagttcattaccagctccctgatttctctaagattgctcccgaagtgaaaaatcctaaaaacaacataattaataaaccacttgcaatagctaaacaagtcagcttttctaagttgagagagaaacccgctgttgtgcaagatattttagaaaccatgcctgagtcaaactgtgttgaaaaacaacatcaagagcagaaaggggaaatcactgaaccttcacaacaaatccagatggagcccacagtacatatccaccaagaacttctcacaggaatagaatctgaggcaagtatctctaagttgtcaccaacctctcagaaaggaacttcctcaagctcttcttacatatttcagaagatatcccaagggaaacagatgtgtcagaagttaaaagaacagactgatcaactgaagactaaagtacaagaattttccaaagaataaaacaggagtctccttatcatttgcaagacaagaagctggtcctggagaaactgcagggacaccttgaactgctggagcagaactttctggccaccaaggacaagcatctgactttgcagcagcaagtccacaagcacgaatcaacaattgtcagtgactttgatccagaaagaaaagtggaaggtgaaatcttcaagttggagatgctacctgaagatgttaaagataaaatggatgaaagcaaatatacttcagctccttctcttcctgtgagttctccagttaccctagatgacttggcctccacctcctcttcactctcaaatgaggcccccaaggaggagctctgtgagctgaccccgcagatttacctaaatggtcattatggagatgcaactgtccagaaccagccagaccaagtggccatgaggctgtcttctaactctggggaggaccccaggtgcactccaggaaggcaggattgtgcagagacgacggcacccagtcccagctgtgccttctgtcgcaggctccttgaatggaagccaaaagtggagaaaaagggccacagaaggatccactgtggaagattttcaactgtccatgaaaaggcaccacattcagattccactcccaattctgatacaggacacagcttctgttctgattctggcactgaaatgcagggtaacaaatgtcaggactgtggcactaagattcctacctcccgaagagcctgcagaaaggaaccacctaaagaatttcattatagatacaacactccaggagagaattactcaaatcatagcaaaagaggtgcctttgtccagccccattctttacatgaaagcaaaaactcttcaccctgtcttatgtactcacctgacacttccaaatccagccctacacctggatggcaagaggctgagctggggctagaaaatatgaaatcacagtgatcaaggactttgaaagttattaaggactctaccagtgcaagttggtagcaacccataagtttgctgaacaaataaatgacttattggataatcaaaaaaaaaaaaaaaaaaaaaa

SEQ ID NO: 5519 - DNA, 735 bp, Macaca Fascicularis
gtactctaaattcaagagatctgaatcaaattactcaaccttttggaatttgatcgtctactgtaatactcatatgtgagattacttaattttcagagtaaaaaaaattgacagggtaatacataggccatattatagtgaagatcataagtataaatgtccttgtttaatctttccatacttaggacagcctctgtatataaaatgttcattgggagaaaaattatttttaaaactaaatttttatagtagtcctccattactggcaattaaggagcaacccacaaaatgtagaatatttaatgtcatcatgtggttctttgattaggcgtaaaaagtattgcaagcagcttttctattcctttggaatacgaatctttttaatgtctaaagttaacctgcaacattttctagtaggataagtcaatgtaaattaggtaatttttgcctgttttataccttctgttgcattttgttcaaatgaaaacatttttaaaaacatgtgattgaatttttacttctcagataattggtttgagtgtgaaatttcttttttaacactttgatatgtaagttagtgtaaattaatacttttataacactattaggctttatatttttatggaatgttttaaaatttgaaatttttgaagtgttaatttagcagtactttaaactatcattatgtgccaatactgacaagaaaaacaattttttatgtatttaatttactat

SEQ ID NO: 5520 - DNA, 717 bp, Macaca Fascicularis
  misc_feature (1)...(717): n = A,T,C or G
gatggagtgcacnggtgtgannncagctcactgcagcctcaannnnnnnnnctcaagagatcctcctacctcagcctcccaagtagctaggattagaggtgtgagccaccgtgcctggccgtgtgctctttgcttactctgttgatggaggagggctgtggaattggagagtgttcacagccatagggaaagcacccctgaatgggcctcccatgttcagtggcacccacacctcaccacgctgaccctggtgtagatatactatcnnnnnnnnnnnnnnnnnnnnnnnnnnnnnnnncccagcctggctgcaggcacacgcnnnnnnnnnnnnnnncagtcggcagtcacaaccacattcttcccgtgacaggcggatggctcgannnnnnnnnnnnnnnnnnnnnnnnnnnnnnnggaccccagaagcccnnnnnnnnnnnnnnnnccgtttggtgggcagaggcnnnnnnnnnnnnnnnnnnnnnacctccacattttccacatcaatatcttcatctgacacatcatcnnnnnnnnnnnnnnnnncctccaccgactccactgtcccgttcttggtcagctgccaggagacaggaaaggttagcctcacagacatgagcnnnnnnnnnnnnnnnnnnnnnnnnnnnnnnnnnnnnnnnnnnnnnnnnnnnnnnnnnnnnnngggaatatctgtgctgtccaaaatgatggcag

SEQ ID NO: 5521 - DNA, 2265 bp, Macaca Fascicularis
ctggaactgcttgctgcgcgccgccctggacggggcgcacagactgcgcgcgcggcttcgggcgaacatcgggagtccagcctcagccgcctctccgcagacgctgcttctccagcagcagcttcgggtttctcccgcaggagcttcgggcttctcttggtagagacgtgggaactttccttcttctggcgaggctgcagaggtgatgggccgctctccgggcgcccgcagggaggcggcacggtgagcgtcctctggctccggtgtggcgatcggtgcctagttccggagtcgccggtccgacttggatgccggctctagtcgagtcttctgagctatgataattttttggaacggcagaaatgattggtttagctacagatgggaatttggagtcactctgaaatacatcctggaataattgtgtttgactagaaccaaatcttatgaggtccccaaggatgagagcctgtgctaagtcagtgttgctgtcgcactgggtctttctagcctacgtgttaatggtgtgctgtaagctgatgtccgcctcaagccagcacctccggggacatgcaggtcaccaccaaatcaagcagggtacctgtgaggtggtcgccgtgcacaggtgctgcaataagaaccgcatagaagagcggtcacaaacggtcaagtgctcttgcttcccgggacaggtggccggcacaactcgggctcaaccttcttgcgttgaagcttccattgtgattcagaaatggtggtgtcacatgaatccatgtttggaaggagaggattgtaaagtgctgccagattactcaggttggtcctgtagcagtggcaataaagtcaaaactacaaaggtaacgcggtagcgaagagagaggtgtgcttcaatcctagaggggcagcagattgcggagcacttttgcttggattcccatcctggcccctttgcagaaaattgtctaggatttcagcaacttcatatttgtatatgagagctgtgagaggtggcattcatttaactggcccagccctctctgcttcgtgatttttatttcgtcgaattataatcacaagccaccacacatttgacatcctatctggattcccaaggagcatacctccaacatccgagaagagcaaatcagagtcttcaaaatggatcaccactaagggcatgttcattcttcactttctttctgcctttacaaaagaacttagatgtatgtttcaaagggtcctcattctgttcctcttttgaacttttcctttcgcccttgtattaaagtggttttaaaggggtctaaaaagactttggcaaaacatatttgcagatgtagattaactggtgaagaaaattactgctagagatcaactggttaactggtaacgaacatttattttataatccttgaaaaatagaaggacatagttggattattgtgtgtcattgtatttttactttccattgtccagttagcagagagaaaatgagagcgttttaacttcaatgtaccattttactgagtgctaaggaagcatatcaattccaatattttataaccaaagctctatcagaacatatttataaaacttgttggaatttttatggcttttgtatagtcatgtaggtaaatcatttaaaatataaacaaatctcaatttagatcaagggttatttcttagatcaagtttatgccaattatatgaaaatattttaactcctagacaggagtctttcagtgctgaatttttagactgtaaatgagttcttcttaacttggctgtttccctatttctgtgttatttcttatttctttaaaatctgagtcctgattggcttaatgattttgcaacagacatgtctccacatattctcagatgctgtcacgtggaaacgtatgaaacagatgaagaatgactgacccagattttaaatgtataaggtacatactactgtaaaaatatgggatgaattttatatattaagaaataccaaaaacatagtttgtgcaccaagttaattatccctgtcctttcacatttatggggggaaaataaatcaatactttaatgttgtttatagcataatggttatttgattttattcttgcagaaggaatggaaagatttgttggctaaatttttgaatttgactagatgcttactacatttgttatgattgtatggataagtaaaaaaattcatcctgctgatggcaaaaaaaaaaaaaaaaaaaaaaaaaaaaaaaaaaaaaaaaaaaaa

SEQ ID NO: 5522 - DNA, 760 bp, Macaca Fascicularis
  misc_feature (1)...(760): n = A,T,C or G
tttaagaacatatatgaggggggtggggtgggaggagacaggttgtggttatgcaggaaaatcttgtcctaaaaatatatgagtttgggggtaaggggtgggatagccaagcaaaatcggtattttaaaatgagcatatgtatttttactaacttttagttaaatacagattttacaacgaggtcagcataagcctacatctatatagagagctaactcaggcattgtcttgtttatttgtagactggattaaaaacaacctgtcctgttttgtcagttcccagcttcttcgtttagaataaattagaccaaaagaagaaacgtgtctctgtataaccgcagaatgaagttactgttgttaaaactggatttttcactttactaggttccgaagagnnnnnnnnnttggttagatgttcaatatgtgatttttttaaattgaatttgttcatttaaaatcctccttaacatttctagaaagacttctttcaataaataatggaatcttagaggaaaagtgattttttaaaagctagggaactcctccactaaaagtaaccattggaaacctcgattgagggctaaagttttaatcgtaagagaaatggcagcataacgaaatatgtacacatgcatagtggtccattttaggnnnnnnnnnnnnnnngataaagaaatgttagagtagtgaggtcggggaaggaaattgtggggatttgtaatctctttacgttgtttctcttctgagtcatggaaaaca

SEQ ID NO: 5523 - DNA, 927 bp, Macaca Fascicularis
  misc_feature (1)...(927): n = A,T,C or G
actgattanganntttnaattttagaaaaaaatatatgaatcagttggaacaatctgaatgtgnnnnnnnnnnnnnnnnnntgtgttttggtagtaaggaaaaaaaaaaaagaaaacattgggaagcttttcaaaggtagctttgataggtagtaaaactactggattcttcttcctcaaatacttggggctaacacttcacagagggtcatagtccatgatctgaccaattgagttttttaaaatcaactattaccactcagaaaacaatcctacgtgatcatgtggccagggcatgcctgagtcctccaagggtggcgggtggctgaggtcacaacaccactggagtggatgggaagtgccccacatggacatctgttccccaggctatgaagtgacataggcctcctccatggtgtctgtgtacagagcctggtaacttctctaggagccttctggaatcctgcagagggtcaaggnnnnnnnnnnnnnnnnnnncgcctatcacagagttcagnnnnnnnnnnnnnnnnnnnnntcacagttttggttcagacttgacacgtttgccaacagcttgttggctccctttgtatgatatcgtggtcttctcctagcacatggtgcccagnnnnnnnnnnnnnnnnnnnnnnnnnnnnnnnnnnnnnnnnnnnnatatctatatctctaaaacattttgttatattgaaaaaaaacagtaatagaaatcaagatgtgttgatgaaataaaatctgtatctgagtgagaaaacaagtatggtgaggtcacttgaatgtttcacagcgatctcagatctgggcctcaggtagaatggaagctgttttgcannnnnnnnnnnnnnnnnnnnnnnncttggtgaggcatgagctgccagccaattgctcttcatcacagctgtctactac

SEQ ID NO: 5524 - DNA, 755 bp, Macaca Fascicularis
tggagcattgtctgtgagtgactgatcccaacatgtatgttaccaagccccaaaaggaacctcaagctgggtgtggtggcacgtgcctgtagtcccagctactcgggaggctgcggcaagaggattgattgagcccaggaattcgagtccaacgtgggcaaaagagtgagaccccatctctaaaaccaaaaaggtaccttagaaggtcacctggttggctaaccttttaaaggcaggggtgtgacacatggggcatctagtgtcttgggaatgtcttggccacacgtagccttctgggatatatgtgcccagagggagaagcactgagcctgaagaaactagatgagactcagaaccacagaccggccagaaatctctcccaccattatatcagcgtggtacaggttgccattcatttctacaaacaggaacaagttcctagcagcaataatattatgacttgtatttttactatactcttcctctgaggtttagttttcatcacatcgtgttcaagattccacatctccgtaaattacagctaattccagggcattgttccatggttatgaaaaaccagagtttattaaaaatcctgagtctaagggctgccttatctttcacttccattgtgctgtagaaacagattgagctgcaaaccatggccttcatctcttgttcattttcttgcaactctttggctctgatcacctgagcagtgcgttcatcacgcatgctctctcttgcgttcctcg

SEQ ID NO: 5525 - DNA, 2001 bp, Macaca Fascicularis
  misc_feature (1)...(2001): n = A,T,C or G
agtggttcagacctttgcgcccattttttttttcttccctctttaccttcttctacccgcaaccctccacaccagtcttattttagcaaaacctagagaaggaggaggtggagggatttggagggtggaggggcattgtagcatccaggggcagcgattgagtggctaagcggagggcgcatacctctctctctcttttccccctgttgggaattttcaggatttcactgctgcaatttaaccccaagatgaggcaccattgagcgaaacgctgtgtgtgtgtgtgtgtaagtgtgtggatttttttatcatttttttaaaatgcagtactctttgtatcagtctgtcatgggtctatagctgtttcagatttttttcagctgtacttgagcatctgaaactgcaagaaagaaactcattaaatgtgattcttcttactaaacaggcctgactgctgtagctgtgtaacttccccatccccacctactcttccccatcccttcccaactttggagaagactccccagtttagccccctgccctgcacgctgtgtcctggcaggtgcgggagggaagcccacggccgggtaccgggggggcagcgaatgtcttgctcatcccatgggtacagcccacagcttcttggctgaacatagaacttctttttctcacccagtataccagcctcttcctagtgattctgttttgctgttttggcaagaattacattttgttttgtttttaagagaaatttctgaatatgaatgtggagagcaaacacaaaaagatttaggttacgcnnnnnnnnnnnnnnnnnnnnnnnnnnnnnnnnnnnnnnnnnnnnnnnnnnnnnnnnnnnnnnnnnnnnnnnnnnnnnnnnnnnnnnnnnnnnnnnnnnnnnnnnnnnnnnnnnnnnnnnnnnnnnnnnnnnnnnnnnnnnnnnnnnnnnnnnnnnnnnnnnnnnnnnnnnnnnnnnnnnnnnnnnnnnnnnnnnnnnnnnnnnnnnnnnnnnnnnnnnnnnnnnnnnnnnnnnnnnnnnnnnnnnnnnnnnnnnnnnnnnnnnnnnnnnnnnnnatcccaaaaagatttaggttgcaaatgtttcaagcatgtacagttttgtgtgtgtgtatacatatatatggtcagcatatatattgttgtgcagctagggcgaagccagcagaggtgtgtgtatgtctttatgaaatgtttgaaaagagataagctgactgcttgataatcattctcaggtgtaaagctccaagtgtaaataaaagtggcatttaacaaatctttcagaacaaagtacagctgactatatataccaagaactaagctaaaggaacagctgagagctcctgatctccacaagagaggaatctaaaagctctgctttgtgcttcttcaccctgcttttgtacaaggaagggggatgatgggaaatcatggacttgtaagttgtatttaaacataaaaatgaacttggtaacttctgggtttagtagagcctcagtgtcgctttaacttagtttacttttttaaagcagcaatggatggttttaaaggagtattatgactgtaaaattgctaaatacgactgtaacagctatgtggtagctgtgacacagttcagttgggcaaaggagtggtgatggactcgttaaaatcatatatacttgaatagtccattgaccgcaactctttatagaccattatgtaaatgtggaatcacagactgttaacattgcctggacttcagcagagtcctggagctgctgggacctctcctatcatgatgaacttggactttttttgatttctggttttaaaagacatgaaattatagaatccagataattcgctggagtcattttgatccaccatgtagatctgtatttagtatcatttggatttggagaagtgttgattacattatggctgtgtaataaaatttttattaaaactgcaaaaaaaaaaaaaaaaaaaaaaaaaaaaaaa

SEQ ID NO: 5526 - DNA, 541 bp, Macaca Fascicularis
  misc_feature (1)...(541): n = A,T,C or G
gacagataggcaaagcgactcccagcttgctgccctcagtggccannntgggcatgggcnnnnnagggcgcttggctggtggtggccactgcatcccttaatttatttgtgagctgtttctgttcatgagaaattgagggagggagtcctacacagaggctgcccctaccctcannngagttgtacatttttttgtgatgggttttattttttattttattatttgattttttttttgatttaagatgactccacccctcttcatcacccccgctcccaggccaggctcagcgattaagtcgagcccttgcgtcctaggaaggggcctcgccaacctcagccctcctgccccacactcctactgcggctcagaccaagggctccccctccctcccttcccccctcctgccatatggaacagcccgggtgctctgagggggccgggagggcatggcttggctcccaaagggggtaggggcccggggcacccaggcaaggtggcccctccccggctagccccctcctccccaaccctgcactt

SEQ ID NO: 5527 - DNA, 755 bp, Macaca Fascicularis
  misc_feature (1)...(755): n = A,T,C or G
agtatgtataaattgtacaataattnnnttgctgttgtactcactgctaatagtggattgtatagggtggtgtttttatttcatttattgtagacaaaaataaatgaatttagtatacacaaacccactaattcaagtatgtcagagcacaaagttggcagctggttatatttaattcagcccctctgaaaagcacatacagtctatactttgtttataaatatcttaggtcctccctgcccctaaatatatattttggtgaagctgtggtgcactattannnnnnnnnnnnnnnnnnnnnnnnnnnnnnnnnnnnnnnnnnnnnnnnnnnnnnnnnnnnnnnnnnnnnnnnnnnnnnnnnnnnnnnnnnnnnnnnnnnnnnnnnnnnnnnnnnnnnnnnnnnnnnnnnnattcttggatatttagctattgtcctccaaagagtcatcgtttcacgttttcaaagatgtgctttgtgctgaagattcttgtcagatatcctgtgcttccagagtatttttatcttcaattttatttaattttcattttgttttcataagacaatgtttcagatatgtaatggggcaaacnnnnnnnnnnnnnnnnnnnnnnnnnnnnnnnnnnnnnnnnnnnnnnnnnnnnnnnncccttcgttgactatcagtactgttgatacatttattagaatgtatgtctcagaagatggtttctgtttaaatttatggtcaagtaaaaacaactgaattctaatacgg

SEQ ID NO: 5528 - DNA, 133 bp, Macaca Fascicularis
ccggcacagaaacagagtctgagagggggccagtgttgggcatcttatgtgtgatgatatgcactgatatcacaggagtgccctttcttgagaagatatggggtttggtgtggaggggtggagagctgtgata

SEQ ID NO: 5529 - DNA, 2489 bp, Macaca Fascicularis
  misc_feature (1)...(2489): n = A,T,C or G
gggaattgtaggccccagtgggcacccctttgtctcctgggcaagtcctttaccttccaaggcctcctttctcccatcctgctccacttttctcggcctcctgaatgaggatggaggcttaatagacatgagaggattttgtttttagctcaatgacatggagttaagtgagctgtcagggcagatgagaggcacagctgccgtgagctcccgagaccctgaaaatgctggtttgcttgacaggtaccatctagaagttaacaggcactttaggaaaaagttggctgaggaggaacctgctgtggtattagaagctgccaccagcgggttggtgactgatgtcctttggggccacggcaaggcatctttttcattgaagtggggctcttcgtcctacaagtgctttgagtttggagaaaagatgaatcgaaaatgaagaaaggaagtggctcttgctccccagcaaagagttacttgccttctgaaatataggccttattgccacgtaggaccagcccccgcagcactcctcaagttctgtgagacactgcagaggacctggccatggccttgatcttatctagaccttgggaacactcctcaaccatcctcacctccttaatgtagcagaatggctgtctaggactttaaaaatgaatgtttacctttttcgtgccttacatcttgggaaaacatgtttcataagtttattcttctcagggtgaaataggcctttttatttgtccttagcctgtctttttcagatttcaagggagattccctaattcttacattccaggagtcagtgagacaatccatgcttcccctccctgaccctttttgtgtttctaggtgttgatatctcacatgcttggtccttctctttgaactttttagtgcttccaggtcatgatcctgatctctctgtggcaatgccttcctccagctcccacttctaaatcatcttggcttcccattgcctagccttttctaaaagaaccccaatcttcattgcctttaaaacagccagatttgagtcaatttcatattggtggccaaagtgtttaaacacaaattctctagctatttacagggcttagagctgaggagaaggaaactgaagtctccaaatcatgactaatcacaattcattctcaccagcaagagccatgaaattctaaggagctagaatttgggatggcttcaagcggccagtacaattgaagcatctggcagacaggcaaggaagcctaccttctgccctccccatggtgccatcaatggaatcactttcttggcccctcacttaatatgaatcatatccacctggggcaaccaatgcctgacaaggttgtagtgcagaaggcacctctttgaagtgaaaaccaggagatcttttatcacttccccagccctgcaggctcagtcacatgtcaaatagataatgaataaatgcatcaccaatgtactctattcatttatttttgacaagtgagttggtgacagtgcccccttgcatgctaataaaatatacaggagccgcacttgtaaagtctttgaaatacaaggcttcatgtgagtactccactattaaatctttgctggaaaatggggtaaccagactgctgggactcttgaaaaatgattacgtttgaagattagtgcccttcccctgtacacaggctatggtttcagacagcaccacggctttgataaagtggctcccagctcataagaacttgataattaatgtcctctgtgttgcatagagatcaggcatcaaaaacttggtggtgctgagaagccaacagaacaggattctttggtatctggaccactgagggctggttgtcaaggagttatcttctcttggtcccacctagttcacacgagggagaggaagcgttcacactgcctttctcaggcccctgagattctaggctttagacaatctgaggctgttagacacatcagtcaggctctctctgaccaagaacaacccaagaggctccctagaccagcctcacctgtctggatcgccattctcctccagcttcaaaagtacgtccttcctgcaaatttcatcaagactcttggctcttaaagattaccctctccttcctgcagcacttctctgcttgaagggcagggggctggcacacatctcctctgtgcctcctgctcctggacacacggcctttttcctgggccctttccttacactgttgacatgacaagggatctgaaaagggaataagtccaggttagagcctcaaatggcacagatcaaaacccactctttctacaannnnnnnnnnnnnnnnnnnnnnnnnnnnnnnnnnnnnnnnnnnnnnnnnnnnnnnnnnnnnnnnnnnnnnnnnnnnnnnnnnnnnnnnnnnnnnnnnnnnnnnnnnnnnnnnnnnnnnnnnnnnnnnnnnnnnnnnnnnnnnnnnnnnngctcaaaaaacaaaaaaaaaaaaaaaaaaaaa

SEQ ID NO: 5530 - DNA, 964 bp, Macaca Fascicularis
tgattttaaaaaacaatttaaaaatgatccttagaagctctgttttattagtgtttatgaacatgtgccacagaaagccttctgtggttttatttgattgtaagaattaagagagcatgaatcaaagcggtcaaaagtgagtggtattgtaagtacacccatctttttagtattaagatagatgtctttgttttaccttgcaggtaagaaagagagtgattcttatttgttgaaaaggactcagggacatcccttccatgctatttcttttcattaaccacttaaaacgtttcagatttattattaaacatctagaaattcatggcatttgagagcagaatagtgtttatgataattgccccctttccccaggtatttatggtatttcttttgcgcagactgtatcttctgcatgggctgtgtactttcataggtgtttgtgtggaaattgagaggatgtaggctttgtggaagaaatcagaaaaagaagaatgttaaaccattatagcagtagttctcaaattttaagttacaccagaaaaatctggagagcttcttataacacagattcctggccccccaatcctattgtctcattcagtagatctcaagacgaaacctgagaatgtgcatttcttgcaaattccaggtaatgctgatactgactgacttctgtcttagaaatttaaagagcagagataaggatgaaccaagaaaaccggaagaaggacttcactttgggaggctgaggcagaaggatcacatgaggtcaggagttcaagaccagcctggccaacatggtgaaaccctgcctctactaaaaatacaaaaattagctgggcatggtggtgggtacttgggagactgaggcgggaggattgcttgaacctagtgagctgagatcacggcactgcactccagcctgggcaacaagagcgaaactgtctcaaaaaaaaaaaaaaaa

SEQ ID NO: 5531 - DNA, 2565 bp, Macaca Fascicularis
tattacctagctggtctccctgcttcttctctttctgccctctaatctaaaaaaacaccacattgttaaaatttagatcatgtcaccgttttccttaaatgctgtcagtacttaaagcagcacaaaatctaaactacttgtaaagcccaatgtaggctggcttctgccaatcttattgacacacaccatttgattttcagtattgccatattttgatcacttctgaagagtaaatcaaagataaatcacccaagcagaaagtgattaaactacatgcagtcacttgaacatgcaaaggccaggtgcttttgcaccagtagttcccgggaaggcttgccctcctcatccgcttaagtcaggccttccctgatcatttaagctaaggtatctacttgattgttctacaacacgacctcctaaaaattgctctccaatactgcctgatttttttgttcactgctgttgcattgcaatggccaactccttgtgtgtcagaaactaatgacaaacagtagccagaatattgatttcattttgctctccacatatttgcctagagggttgatgggttgtcaaaaaggtggatacaaggataaattctgttttatattagctatagctttaattcactggtcaggtagaattcgttataacgttattctgattcctctttagctgtcatgaaattgaagaaaacttatactcctaccctctttgtaagatgactttcttagactaggtgactattagagaaagtcttgtcacttttcaccgatgaggataatatttagaattacaggaagaaccattagctaacattccagtggtgcacaaaacatttgaaactctagattatcatcttcacctgggccagcatgcccctgtttacaatgtaacattgtgtatttctcctcttagttactgtttttgttgttggttgtgtttattaatggttttctgttatagacagtattccttaaaagtagaactcccattgtattcatgtttatatccccttgtcttactgtgggttggtctcagaagcaacttagaatagaaataaggattcaaatgtgagtattctattacagaagtgctaggggaatggggaagtgagtcaggaaagagagagaagctaaaaaagagtatatatctagcaagttacaccataagcaattcaacttcagttccacttgggaactctaggaggctatatacaacatatcttagagttatcctgtcctaggggaggcaagccagagtatttatcaactcgtcagtcattggttgagagttacttgggaaaatcccccagtatcttctggtatgacccatgtgtaggcagagtaggctctggctaccatagaaagtattcagacagaattacagtctctggcagctgaaagtggagctctgatggtaaatgatgaagaaataagggcagggcaccaatcgcatctgctacatcacttggtgtgtcttaaatatttgctataaagtgaatcttgaaaccattgaatcaagagatcagaatgatgattggcagaatcagcatagattagtaaacagtagagaccttttataacagtgagagatgggctttgccttcctttttgattgtgagtcacaaatccatgtaataagtcatttcatatctaattggttgtgcctagacaatttaaaccttatatcctgccaaaagaggtcaatcgaatcactaacgactaagaaatatactttttttgttgctgcctatggtgaaatgtctttcagaaaaatcttcattgctttttgctttgactaaaaatcatttatcatttataccttaatcaaaatatgactaaaaatatggcatcattaaagctcaataactattcaacaaatcgatcaccaagattaatcccttatttaaggtataaatgatgtgcttttgtctatgttagggttcctaaataaagatttaacaaagatgttttaatttttcaaagctcgtactcaaaaacaaagactatggttggtattttatgtatagaaatccatggtccaagttaataggatgtgtcttaatgatttcgatgatgatatttcaaagtagtggaatggacgggacagtgattttatgagaagagcaattgcttctttttgctaaagctaagaaggccactacaatgagccacagagatgacaatttgtgtttatgtcttttatatctttcagcagttacttctttggtgattaaaaaaggcatgtgcaaaattattttggtttcagagacatatacatcattcctcttaagtaagacagctgaaaaaaataaagctattgatttatatattgaagaagtttcttcatattttataatttaacttgttaaataagtcttgttttggaagctaagttttcaccatttgatacaagtctatataatgctagttcataatgtagggtctagaccaagactgttttatcaaacaatgctgctcgattttattttgctttacaaattaaagtttattgttgtagactaataaaattgtctttaagtcaaaaaaaaaaaaaaaaaaa

SEQ ID NO: 5532 - DNA, 703 bp, Macaca Fascicularis
  misc_feature (1)...(703): n = A,T,C or G
gcaagagattcattaccgctacggctcnnnccaagaacaccatgggaaatctgaagataaagcaatcannnnctatttaaaaggtttgaaaatagaaaaaatgtccctttccagggaaaaacttctcaatgctttagagaaattggctaaaagatgtgttcaccggaaggtacgggttgtggaaagtgtcagcctccttgggctcatccacaaattgaaaggagaagtaagtgatgccttgctgtgctatgagagggctctgaggctggctgctgacctgaaccctatgttttaacacagaggtcaccattatccatttaatggtcttataactaaatagaacagctatgaaattaaataatgcaaacttaaagctgttggaactttaccttattttgagccttgagaggaatgtggctgtgtggcctgagttatgtagcatgcaactgcaacttctgctttttcctgtaaatgatcaagaaaggccttgtggcaccagacacaagaccccctgaaagtatcattcctcttgatggaatggtaaagcaatctttcttggaatgtagcaagtaataactgatcaaatagctacaatgtatgtaccgaccttatatggaaaatgctgcaaccctgtttactgcctgtgtaagttaaaccttaacttccccactttggaatgctaactccaatcattaggtgtctg

SEQ ID NO: 5533 - DNA, 693 bp, Macaca Fascicularis
aacagaattgaacattttattggtgctaacttgtggccaaactgcactttgccaattatctgattccctggcttctgctaacacttaccactgtcattactgtctttttgctgctgctgttagacctaaaatttctcataataaattattaagagtcagtaaacccctggataaaagcaaaagggactgattttaatgatctttggtggtcagagacttaaaacaaaaagtcgtttctgttttatagaagagtagtatccaaattttttgattagataccctgatgagtaacaaatttttggagtgtgtagccttaaaaatatgtacatatattcacaaattttacaagttctgtactaatgcatattgtacattatgaaacacagcaaaaaatagaaaaaagggtgagataaaaagttattaatagaaatttaaatattttctttctatgtcgtagtggtttgttttctctgtaccctagaatgtatgaacctgatttggagaccacttggttaagaggctaagattaaacaggcaggggacgtagaatgttaactaagttggtcccttgaagtaagtatctgttattataagtggcaatttctcaaaaaattgttgggaaattttcatacttacagaaagattggaagagtgataacactaacatctaattacatcatctagattgctatc

SEQ ID NO: 5534 - DNA, 289 bp, Macaca Fascicularis
ctatggacccctgaccccgtggggtcgctcggactcttaacgtgtggactgaccgctactgactgcaccgcctatccccccgtctctgccggccccttagcatgagcgagggggacccagccgggtgacattgtgcccgttggcgaattctcgatttcccctcttacccgtcctcgtcctcctcctcccccatgaagtgcttctgagtatcgggggggctctggattattgttctgacgaacccctgcttgtggttggggggtatttaatctgaggccttagggtcctt

SEQ ID NO: 5535 - DNA, 328 bp, Macaca Fascicularis
  misc_feature (1)...(328): n = A,T,C or G
tcatttttctatagctgnntaatgggccctctctcctataataatgtattaaatcaaaccaaaagctgttgtaaaaatggaatagacatgaaatggagagagaaatgtttctgattcatcaagatcatttcattatgtctgagtttattttcactatagaagtgacagattcccaaaacaacttacaagatctcacattttttgcaggctattaatttatgttatgactgacacttttcctgggcacaattgcctaaatttaaggatnnnaggtnntgaattttatcacnnatnnaaaanatgtttttttaaaganaattnnntagtt

SEQ ID NO: 5536 - DNA, 728 bp, Macaca Fascicularis
  misc_feature (1)...(728): n = A,T,C or G
gccacatcccactnnngccctttcataagtcccctggggaaagcaccngncntctgttccaggctggacagccagggtcctatgggcgcagtcagggtcctatgggcacagccagggtcctatgggcacagtcagggtcctatgggcacagccagggtcctatgggcacagccagggtcctatgggtcctctggaagcaagaaagggggccatggaaggagcccagacagtttgggttcactcagagaggacccaagtcccagtcccttcctttcagtcaaagcacggatatctttgcctcaggtcacagggcaccagggggtcctgtcatgaannnnnnnnnnnnnnnnnnnnnnnnnnnnntggtcccctaagaacagacgttggggtgtggaatggggattcatttgggtttcagaaaaacaggggagtctggacaagaggggatgggctacttggtatccagacacacgcactcacacaggagccaaccctttgcaactgaacaagcagagaaactgaggctggaaaggcccctcctnnnnnnnnnnnncactgggaccctgccacacctctcctcgccactgtcnnnnnnnnnngcaccactgtacagtgcaacaagtcaggagacctaggtcctactcctgacacttgctaattagctctatgactctgggcaaatcgcatatctgggcctcagtttcctcatctgtaaaaatgacacttag

SEQ ID NO: 5537 - DNA, 1041 bp, Macaca Fascicularis
  misc_feature (1)...(1041): n = A,T,C or G
attgaggctgttcagttnnnnttctctgtatctatnnnctgccctttttgagcaaaatgaaggtgtttttataaagcttggatgccaatgagagttattttatggtaaccacagtgcaaggcaactgtcagcgcaatgggggagaagaggttagcggatcatgggtccctggctcaaggtctctgggctgtccctagtgggcatgagtggctcggctgccttcctggggtcccgtgcaccagccctgcagctagaaagtcttgtgtttaggctcgtccgacctatttccttcagttatactttcaatgaccttttgtgcatctgtaaaggcaaaacagagaaactcacaacctaataaatagcgctcttcccttcattgtgtgcattgtcggcccttcctcgggttctcctcctccagctgcctgggggctttttaataaactcgtctcacctcgtcagccactactgtctgcagcccctttgcaaagtggatgcactgaacacagtccggacagacagcgtgggggtcttttttattaaatcaagaacattgttaaattcaattaaggtttactctgctgcctcggcagacttatgatctcaacagttcatacgagcaggtgaaagaattacacatagaatttcgttaaagtggaacagacaacaacaaagccttttagcaagagggcatgctcactagtggttagtacgctgttgactttgtaaaaaagttaaaaaggaaaaaaaaaggaaaaatgaaattgtatatttaatgaatgaacatgtacaatttgccactgggaggaggttcctttttgttgggtgagtctgcaagtgaatttnnnnnnnnnnnnnnnncattgtgtgtagttttatttcagtcgcagccccgtttccttttcttttgnnnnnnnnnnnnnnnnngtgtctagttttgagtgcagtaaaatagaatcagcaaatcactcttatttttcatccttttccggtattttttgggttgtttctgtgggagcagtgtacaccaactcttcctgtata

SEQ ID NO: 5538 - DNA, 747 bp, Macaca Fascicularis
  misc_feature (1)...(747): n = A,T,C or G
taggaatgcattttgcagaatctaacaatacccttaaaattcatactggacaaccatcagtatgatgtatagtatctggtgtaaacaaatnttattcagcatattaaattattctgtgttttgcttttccttgatatgtaggaggtgcaccagtaccagtttttctcttgtggcttaaaacgctgattgccatttgccttgtctactgaaaagctgtggcagcgagtggtgttattgaccatgtgttctaatgtctttttgcagatttaaaggttttattgtagtgtccatttaatatctgcatgtgtttaatctctgaatactgtgtaattaaactgattaacttgtgatggtgatggtaattagcacacactaaaaatccaatgaagcaattgtttccctcttcttaactggaaatcacacttgtgaggtatagtatccattatcaacagtggagtcatgattgacttcatatttcgtgtatcttgttataaattttgtatagcatttaatttggcacttaatataaatcaatttgatttaaatagtgtgtgtgtgtacatggtgtgtgtgtgtgtgtgcactgtagtttcatgagccttgggaaattgattctacaaatatatagagataaatgtatcaggcatatttttttgcaaagcgnatatatacattcctcctatttattaaatcactggctttggtgttatgtagagatatttgtagatctcagagcagaattaaaat

SEQ ID NO: 5539 - DNA, 584 bp, Macaca Fascicularis
  misc_feature (1)...(584): n = A,T,C or G
gttcacagtgtaatgaggtcaaggttgatacagaaaatgtaaataggttgtgataagtacgaaatgcatgctggtaatggcatcatggcgtctggctgttctcagtcgtgcgtttcgcacgttgtatcgtgcaccaaaggtgtcacggtgggcttttgtcttcatctgtggtgccacgtgtgatttacttgcaccaaaaaaaatttctgaactattgcagcccctcccaacttatctcactgcctcattcccctgcctttcaaaaccagcccacctcctgctgcccaataacctgatgttgtcattctcatatttaaaacccataaatgcggccannnnnnnnnnnnnnnnnnnnnnnnnnnnnnnnnnnnnnnnnnnnnnnnnnnnnnnnnnnnnnnnnnnnnnnnnnnnnnnnnnnnnnnnnnnnnnnnnnnnnnnnnnnnnnnnnnnnnnnnnnnnnnnnnnnnnnnnnnnnnnnnnnnnnnnnnnnnnnnnnnnnnnnnnnnnnnnnnnnnnnnnnnnnnnnnnnnnnnnnnnnnnnnnnnnnnnnnnnnnnnnnnnnnnnnnnnnnnnnnnnnnnnact

SEQ ID NO: 5540 - DNA, 740 bp, Macaca Fascicularis
  misc_feature (1)...(740): n = A,T,C or G
tgagatcaaatacacttacaggtagtntgcagtacaaatagtttgcagtgtaaagaagtattatatgatagagtctaaagacagcacaaattcccaagacactgttttctttttcttcaaatgtgaaacttttaagggttattttcagtaaacttcctcagaagttcacaaatttataattgaaaatttcttttcccagttttaaggtcttaaaatcttcttaaactgctaaacattaaaatctactgagtttcgcatcacatctacaagtagataactgactaggaaggcattttgcttatgtagtaaccacccagagaatttcaggacatactgtgttttcatagcatgctctttgtgaaccatacaacatgttagattctatgctaagtgctttaaatatgcattaacacatctaattctatgagatatgtcttcttatctttattttacacatgaggaaactagtgtagaatacttaccctggatgaactaccattgtggaagaaaccaaaggagaaaatgacatactatactattgtttgtatgggagtccagaaggacagcttgtcaggaagaggttagagaaaactttttagggcaagtaatagtctgtgactgcttcagaatttctacggcggagttttactagctgcagtctagttggaagttaagccaagggacttggcttgaagaagcacttgtatagcgagtactnttgcttttacttagattgtatg

SEQ ID NO: 5541 - DNA, 763 bp, Macaca Fascicularis
  misc_feature (1)...(763): n = A,T,C or G
attaactttttgtgaaacaaaaagaattactgnnnnnnnntatgtcttggcatattgccaattcaccactttctacttcgtactggaacagaactggctttttggacgtccctgaggagtggaaatacaaaacgaatttcaagttctctaatctttgtcctatgacaaaggataaaacctaagttatctggtcagtgttttggagatttgacaacacagcaggtgaagagaattagcttaaattccctcctccnnnnnnnnnnnnnnnnnnnnnntccttcactctgtcaggaaatggtgtggtttccacgcatgagccccttcatgatctgtctggtgcatctctgtgctcctgggatcgccaagtgcaggcacnnnnnnnnnnnnnnnnnnnnnnnnnnnnnnnnnnnnaggggaagatgacacacccaatttaggtaatgctgcacttcttgttataattggttattggaaaatgtgcctttattatcagaacagtggtgtgcgcatttctgattatgtagctaacctttggatatctgacttagatactaaaaacatttgggtgttgcagttttgcacttgtagatacaatttaaaagcatgaaattggtgatttaattagatgttttctataaaatgcaccttgttacatttctgtgaaagggnnnnnnnnnnnnnnnnnnactggctcaagggttgagaaannnnnnnnnnntctaaacagttaattgtttaaaggactatacatgtaagtctgcag

SEQ ID NO: 5542 - DNA, 668 bp, Macaca Fascicularis
  misc_feature (1)...(668): n = A,T,C or G
accatgcctggatatttttatattttagtagagatggggtttcactaagttggccggnatnnnnncnnnctcctgaccttaagtgatctgcccannncggcgtcccaaagtgctgggattacaggtgtgcgcaactgtgcccttggctacctcttaatcactttagctctacctggtggccattcctaggtaggtgccccctccccagcccaaccccaccggtttccttggaggaaaccatccatggtggttggctgctgggccttgactctccgcccagcgcgtctagtgcatggatggggttcctgccctcgacgcagacatcttctttttctgaccttccaaaagtagcggagaggcaggaggtgcgtcgtgaggtctgggtgcaggacataggaagaagaggttacannnnnnnnngcgccaggagcgtgcagtgccctcgggacagacctctagccccagggccagtgggtgtatattatttacagtggacattcccacccttttcacacagcccatagaaaaatgaannnnnnnnnnnnnnnattgagggacataaaatgaaaataggtttagaacataatttaaaaaaataaaacagcaaaagtagcaaaaaatatnnnnnnnnnnnaaaaacatttttcttttttttcttttttctttgt

SEQ ID NO: 5543 - DNA, 706 bp, Macaca Fascicularis
  misc_feature (1)...(706): n = A,T,C or G
gaaaaggggacactgggactcagtctggataatggtagaatcactaggaagggaaagaacaaatagaacttaacagcacatcagtctggtgacattttaaaaacatgataannnnnnnnnnnnnnnnnnctgtcattagctaaagtttagcttgtgtttagtagactatttactaagacagcagtatgtnnnnnnnnnnnnnnnnnnnnncannnnnnnnnnnntttaggaaactgtcacagagaagttttaccttgaattacaagataattcaagacccactaaacctgtgtgaattatttccactcctcaggaattccagttggggaagcatctatttcactgggtccttgccccaaaaagttcccccaggggtttattcttacaactttaagttttttgttttttgttttttaaatattatttggtgtgatttacactagatatatgtggccatttataagaacaaaagaaggccnnnnnnnnnnnnnnnnnnnnnnnnnnnnnnnnnnnnnnnnnnnnnnnnnnnnnnnnnnnnnnnnnnnnnnnnnnnnnnnnnnnnnnnnnnnnnnnnnnnnnnnnnnnnnnnnnnnnnnnnnnnnnnnnnnnnnnnnnnnnnnnnnnnnnnnnnnnnnnnnnnnnnnnnnnnnnnnnnnnnnnnnnnnnnnnnnnnnnnnnnnnnnnnnnnnnnnnnnnnnnnnnnntg

SEQ ID NO: 5544 - DNA, 766 bp, Macaca Fascicularis
  misc_feature (1)...(766): n = A,T,C or G
gggtgtgctnnnngngnnngatgggagggaggctcaggtccctggggctggggcagccnnnnctgnncagcnctgggctgttcacagcaaccccaggcgggagcaggtttccaagctcagaggcccactgtgaaccccggctctggcctgtcctccaacatcacgcacaggagcctggggctggcctcccaaatgagccatgagataatccaaagcagacagctccacgctggccaagtccaagctgggagatacgagggacctgtgagttggggtctggcagcctcccatccagggcccccatctcacgcccccggctgggacttggctcagccagcacttgtccagctgagtgccaggatggaacaaggccacgtcgaagaggctgaggctggcacaggacacgcggcaggcagcgcacagggcagtggggaagggctgccatctgtgcactgcccatggacaggctgtctcctaggaaaacccacatccttgccctccttgggactgaaggggacacccggggtgcacacaggctgccctgcaggcgaacaaagcagccacgaggtgcgacaaggtcctctgtcgcagccacccctgagatctggcagcatnnnnnccagtcattcgttgtgtggagggacaagtggactcagggcnnnnnnnggctgaccacagcacgccagcacatacctgcctcgggactgtgacgaaaccggtggggctggttctataactgtgtgtgatgtgaagccacttcagacaa

SEQ ID NO: 5545 - DNA, 741 bp, Macaca Fascicularis
  misc_feature (1)...(741): n = A,T,C or G
ctcactgcagttattctaacatattgtttacactgaaaacattaagattgtcaatgaaacttatgtcttggtccaaccccttttttaaaaatatgnnnnnnnnnnnnnnnnnnnnnnnnnnncacccccatgtattctaaaaaagcatnnnnnnnnnnnnnnnnnnnnactggaagtctgatataaagttcagagatacaattactcccttaattagtagtcaagataaaatcctccataaataatctgtattaatggttactttttagtggtcatttgtctcctttaggaatatgaggctttcctgtgaaaagtatccaagctcaaagtttacatccttgggcgccagctgannnnnnnnnnnnnnnnnngtactttcaaagtgaatctaacatgaaaaacacttggagccatcagtacttgatccttcaagctcatgtgcttatttcaacaaaatacatttgattttgcatcattttccttgtctttattatgtgaatatgtatttggaaatttgtaattaaatacactacagattcattatttgctggagaatggatggtacctgttatttttttactttgactcattttctgatatccctttttgttttgtaaagcatatgttattctcatttgcctgtgactactgtgggatacaattcaaaatatgtgagtaatcttataatgatgagaaaaagtagaaatgactttggaaattagcatcaaaaattttttccta

SEQ ID NO: 5546 - DNA, 764 bp, Macaca Fascicularis
  misc_feature (1)...(764): n = A,T,C or G
caaactcaggacactganncngtggagaccaggccaggaggagatggaaccttccagaagtggggagctgtggnnnnnnnnnnnngaaaagaacagagatacacgtgccatgtgcagcaccaggggctgccggagcccctcaccctgagatgggagccatcttcccagtccaccannnnnnnnnnnnnnnnttgttgctggcctggctgtcctagcagttgtggtcaccggagctgtggtcgctgctgtgatgtggaggaggaagagctcaggtggaaaaggagggagctactctcaggctgtgtccagcgacagtgccnnnnnnnnnnatgtgtctctcacggcttgaaaaggaaaagctgaccagcatttaccaccaacacagaccnnnnnnnnnnnnnnnnnnnnnnacaatctattctctctgaagcctggcacctggaggaatcatctgcatgagaaaattttggactccacaacctcttatcataatccagacgttcctttctattgatagtaactcaaccaattgccaatcagaaaaattaaaaatctacttataacccagaagcactacccccgcaacccttgcttgctacaaattgttccaactttctggaccgaaacaatgtatagcttaaatgtatttgattgatgtctcatatcctcctaaaatgtataaaaccaacctatgccacaaccactttgagcacatgttctcagggtctcctgagggctgtgtcataggctgtggtcactcactt

SEQ ID NO: 5547 - DNA, 724 bp, Macaca Fascicularis
aagtattttttagttcttaaattttatgcttgtatttgatgatagatgtcagtgacatttcatagtttcaaaagtccttgctgctctgagaagtgtagattctagtgaaaattacatagtcataagagaaatgtgtttttgtttttgtttttgtttcatttttttaaagttgtggtattattggttctatgctccctggaatattactgctttgtgaaagtccagactgaacgcagcaccctctgtgtacctagtacagttataaacctgggtctctcactacttgatatttttgcattagttaagacagaaatttgatagctcggttagaggggaggggaaatctgctgctagaaatgtctgaactaagtgccatactcgtctgggtaagatttgggaaacataacctctgtacataaaaaaagatcagttaaacatcacatagtagacagccattaaattataaaaaaaattaatttatgaagaaagaccttttgtacagattgaaaaaaaaagattttcatagagatatctatatgatcaagagagttaattttttatttttgttttactagtgccacagacttgccagtggtaacttatttgtccggttcaagataactctgtagttttctttcctaggacttgttgttaaacgccaaaagacatttttgaactgtacatttgatcagattgttagcttttctgttttatttcttttgag

SEQ ID NO: 5548 - DNA, 1156 bp, Macaca Fascicularis
  misc_feature (1)...(1156): n = A,T,C or G
cagagataccatcaaagaacaaacactaatgttaattgcccaattgagtgcttcatgcctttagatgtacaggctgacagagaagattcccgagagtaaatctttccaacccagaggaacaagcgtgtctctctgccaagatccatctaaactggagtgatgttagcagacccatcttagagttcttgtttctttcttaagccctttgctctggannnnnnnnnnnnnnnnnnnnnnnannnnnnnnttctccaagcatcaccctgggagtgtcctgagagttttctcgtaaatgagggctgcacattgcctgttctgcttcaaagtattcaataccgctcagtattttaaatgaagtgattctaacttgtgatttggtgtgggatcaataggaaagcatatgcagccaaccaagatgcaacatgtattgaaatgatatgaccaaaattttaagtaggaaagtcacccaaacacttctgctttcacttaagtgtctggcccgcgatactgtaggaacaagcatgaccttgttactnnnnnnnnnnnnnnnnnnnnngtactcactttttccaaatgatcctagtaattgcctagaaatctttctcttacctgttatttatcaatttttcccagtatttttatacggaaaaaattgtattgaaaacacttagtatgcagttgataagaggaatttggtataactatggttggtgattattttttatactgtatgtgccaaagctttactactgtnaaagacaacgnnnnttaataaaagatttacattccacaacgtgaagttcatctatttgacataagacactttgcggggaaataattcttgtcaatgttctttttcaattcagcaaacatttgaaaatctatgatgtgcaagtctctctaattgnnnnnnnnnnnacaagattttctaagtcagttgctacaaaaacggattcgtttttgtcacttccatctctgcactaatggagacagccttatactttctgctttaataagtttaagtgaacccaaatatttatnnnnnnnnnnnnnnnnctcttcagaagtataatcgaaataatctttagttactcttttctaaccattataattctttccttcctccacctttccttcctttactgaataaacctct

SEQ ID NO: 5549 - DNA, 1710 bp, Macaca Fascicularis
gctggctgcctgagagtggagagtgacaggtaagggctctgaaccttcctgcgtgctgcccaaggagcgcctagggctaccaagaggcccagggaggagccttgagacctgactgggaaaggcttttcttccccagaggaccactgctcaggctcagaggcacacaaaagtgggcatccagccatgctctaagccccccgaagatgaagaccagggagcagcttcctccaatgaaacaggagcaatcagggtaccaggaggctgaagccgtgagcccagccagaggcaggatcagccaagtctgggacaggcttcattttaggcggggacatctatcttctgtcttcaaacatcagagcttctggttcctggggcttcagacttggactagaacttcactaccagccttcctgcgtctccagcttgcagatagcagatcgcagaacttcttaacctccataatcacgaggacgtggaaagaaggacgtgtttgctttcccttccaccgtaaagaaggacgtgtttgctttcccttccaccatgattgctttgaagaagaccactgcgttggtatttgcaaaatgttttgagcctcgaggtttaaataagtgtatgtcctctgccccgcataccatggtgtaagccccaggagagcagaaacttcctctgtctacccgatggtgctgaagcctcagagcctggatcagtgtcaggtacggagaaggcactctggtggaaacctcagtggcaacattcagctcacagtgggaaactcggaccttcagaccagggaagggggcggtttgaagatgtgagtctggagtgtgactgatgaagccaaaagcaggcgcaaactctctttttatgaccaactttggataatgagctcaagccatgtataaaaacgttccccaaaaaagtgcttttctagatgaaagggaaaaaatagctaaagtgatccatcttcctttctttgaggaaggttggctccgcttctgttgcttccaggaagattgcatacacatgtaaagctgggaaaactttaatgaagggaaaaactaagaagtaggagggtgtactcaaatatcaagttctcctccacatagtagctgcccctgccttcattaacagaaccattaagatccttgttgctccctgtgcatcgatatgaagggagctcaggatatagacttaaatcaaaacgaaggacacagaacagtggaagccaggggtgcccaactttttggcttccctgggccacatcggaagaagaaaaattgccttggatcacacgtaaaatacactaacgatagctgacaagctaaaaaaatcgcttaaaaactcataatattttaagaaagtttacgaatttgtgttgggactcattcaaagccatcctggggtgcgtgcggtccgtgggccatggattggacaagttaagtataaaccgtatgttatcttttgcattaaaaaggtggggtagaataaaaaatacacttacatttacaggaacactgtggggtatagaagaagccgatgtaactggctatacacttcaaggccagggaagtggagagcaggcaccagtataggaatgacatgccttgattcatactttccatgttgtcttgattcttcaaccatgtgaatgtattagctgtttttaaaataaaaaatgtaatgatccttgtttaaaaaaaaaaaaaaaaa

SEQ ID NO: 5550 - DNA, 461 bp, Macaca Fascicularis
actgtctactagagtactaccatttgcttcttaagtcctccgcatttttttcagcattaggattactgtaatagattctgtgtctataacacagtggtaaagtcatgtaaacataaatgttaattgaattctgtaaaacaattacctagtttgggggtgttttttcttacgttagacatatttagggaaaatgcacttagttaacttgtgagtcattgaaaatatatgcctcatactgaatattgacattgaaaaaaaggtatatacctgggtgaaaacctgaatattcagtagtttgtatgtattaacaggtgaatattaaactctcaaaatctggagtgttcttaaaagctttatccaagaaaatgtataaaatgtgagtgcaacaaatgaactgcaaattgtgtattaaaatacttcaggcatcaaaaaaaaaaaaaaaaaaaaaaaaaaaaaaaaaa

SEQ ID NO: 5551 - DNA, 706 bp, Macaca Fascicularis
  misc_feature (1)...(706): n = A,T,C or G
caagtatagagtnnngaaatgagcagctcaaaattactnnncagctgtgtcannnagggcttgcttcctaacctttcttagcctcagatgcctcatctataaatggggagtgcaatagcacaaaaggctgatgtgaagattaaagaaatatgcatcataannnnnnnnnnnnnnnnnnnnagttttnnnnnnnnnnnnnnnnnnnnnnnnnnnnnnnnnnnnnnnnnnnnnnnnttacttaaaaatagtgacaccaggctgggtgcggtggctcacacctgtaatcccactttgggaggccgaggcgggtggatcacctgaggtcagnnnnnnnnnnnnnnnnnnnnnnnnnnnnnnnnnnnnnnnnnnnnnnnnnnnnnnnnnnnnnnnnnnnnnnnnnnnnnnnnnnnnnnnnnnnnnnnnnnnnnnnnnnnnnnnnnnnnnnnnnnnnnnnnnnnnnnnnnnnnnnnnnnnnnnnnnnnnnnnnnnnnnnnnnnnnnnnnnnnnnnnnnnnnnnnnnnnnnnnnnnnnnnnnnnnnnnnnnnnnnnnnntagtgacaccaaagacctaaaaactcagtgctactgttttgcttagcactagggtnnnnnnnnnnnnnnnnntacagacagctatttttatcatttctgagatgaaaccccaatcaacatatcaggaaaaaaggaaatacctcaccaaagattg

SEQ ID NO: 5552 - DNA, 771 bp, Macaca Fascicularis
  misc_feature (1)...(771): n = A,T,C or G
attttattttannntnttttattttatttttgannnnntgtcttgctctgtcaccagcctggagtacagtggtgcgatcttggctcactgcaacctccnnnnnnnnnnnnnnagcgattctcctaactcagcctcctgagtagctgggactacaggtgtgcgccaccacgcccaggtaatttttgtatttttagtgaagacgcagtttcgccatgttggccaggattggtctcaatctcttcctcgtgatccgcccannnnnnnnnnnnnnnnnnnnnnnnnnnnnnnnnnnnnnnnnnnnnnnnggtcaataaatttatgaatattacattaagatgaactacaataagacctttggcatgtcagtttaacataagtgaaaggtcctttttatgccttttgagccttccttcaccttccatccaacacacacaggtaccagtaaattacagatgccatttctgagctttgcacactttctctggctttccatgttctgctcctgaccaactcttctaccacctgactcctcccagcctggctgcctctgttgctttcagtagctgggccattgctgggaacactctgttacctcccnnnnnnnnnnnnnnnnnnnnnnnnnnnnnnnnnnnnnnnnnncctgcctcaacacaataaggtaatcttctaaccagtccatgacctgactcctgacgtcacccttccctgcgtcacccttccccgcatatttggaggatgaggcttgattgnnnctcnnnnactgagctccct

SEQ ID NO: 5553 - DNA, 2267 bp, Macaca Fascicularis
tgtaatttaaagcaattcatagatttccatccatgaagttacccattactgccccgagccagaaggctgtaaaccccagggctgtaggaaggacttcctgttggttatttcagccctttccttctgcccttgctgcctccaccccttggagtttacagcacctttttcattgttcacatctctttctccctctcccaggggcccgggagctggcagaccctggcccaatcctaacagtgctaactcagtgagtacctaggtcaggtggggtggcgtttgtcaggggaggggttctgggtgcaggggagctaccgtccctaggtgtaggtgtcatggggaaggggagatgcagcgggactctcctgatgcttctagggagaaggccgtgtggagatggaggcctggcagtaatgtgcaggggtcagcaagggctccacccctgcgctgaaggagtaagctaagaacctgggctcagagagtactgttcagagtggaggcccctacctcctccccagcagggctggaaggtgcgggtaaggggctcagcacaggcagtggagtgaaggccagaggaatgtggggtaaagctggttactgtcctctcaaaccggagggcctcctaccctgtgtctgtggctccctcccaggactggggagtaagagaccagggtctcagggtcagttcgatatagcagagagaactgggcttcagccatgtcccagccctcccaggggaaccaagcaggtggccagctctctgggtggcgaagtctttcctgtgaagagtgggtcgtgtcctcagggaggtgtggcagctgagggcactcagtgactctgacgtggggctccctgacatcttgtttttagattccatactcctcctcatcacctggtacctatgtggtaagtgtgtgggtttggggccttgtgttgtctagccgcgtgggactgagtgtgcaagagaactgctctggggtccccgtttctttccctttcacacactcttctgagcagaggttctaacctgctagaacttgctgtcaatattcagtcatctgtacggacccgaggtggcccagaaatccccaaaccagacctgggggtggaattgccttctggggagctgaccagtgggccccccggcgtccactgctggcctctccagggggcatgcctgtgagcacataatgcagttacacacacccacaggggcctcttggtctgaagaaaggtacgggggacatccaagtccccttctcaagcttaagtactttgtccctgagtgagcgctgggggtgtagcaagatgaacagcggctgggcccggggtgagcagttgctgctgaccagggagggaggatgctggcccctttccacgttcgtcaccactatgggcgtctgatgtcagtttttctcatcttcagggaccccctggtggtggcggccctccaggaacacccattatgcccagtcccgcagattcaacaaattccagtgacaacatctacacaatgattaatccggtgccgcctggaggcagccggtccaacttcccgatgggtcccggctcggacggtccgatgggcggcatgggcggcatggagccacaccacatgaatggatcgttagggtcaggcgacatagacggacttccaaaaaattctcctaaaacataagtggcattagcaatcctccaggcacccctcgagatgacggcgagctaggagggaacttcctccactcctttcagaacgacaattattctccaagcatgacgatgagtgtgtgatccccccttctccgagacgctgagagagcgggcattgcaggcgggaagatgccagaaattatgcaagaagtgaggtgtcattatccaggagctggtggggagggcatctccctgctcccctcaaccccctcccaccccatccacgccccccacctttcccaattttagtttcatgcaataaaaaggccgaactttttattccataaaacatgaaggacaaaactcaaaaatgtatttcaagtcagtgaccagaaaaatcgcaccccttgccctttccccaaaggaccttttccgtacacgacacttttttgttttgttttttgtttggggttttaccgttgggattttttaatttgttttcagggggggttttttggggaaaatttttttaaaatggaagcttctagcaagccccccaccccagtcaacctctatgctttcttcttaaaaaaaaaaaaaaaaaaaaaaaaaaggccaca

SEQ ID NO: 5554 - DNA, 718 bp, Macaca Fascicularis
  misc_feature (1)...(718): n = A,T,C or G
ggaagccgcgaacgggactnnnaaaatggcagcaatgnnnnntccccagcatcggtgcccgagtacacaggtccacggctgtacaaggagcccagcgccaagtctaacaagttcatcatccacaacgccctgtcacactgctgcctggcgggcaaggtgaacgaaccgcagaagaaccgcattctggaggaaaatcgagaaaagcaaggccaaccacttcctgatcctctttcgcgactcgagctgccagttccgggcactctacacgctgtcgggggagacggaggagctgtcgcggctggcgggctacgggccccggaccgtcacgcnnnnnnnnnnnnnnnncatctacaagtacaactcggaccgcaagcgcttcacccagatccccgccaagaccatgtccatgagcgtcgatgccttcaccatccagggacacctctggcagggcaagaaacccaccactcccaagaagggcggcagcacccccaaatagccccacccgggcagtccacgggccgggccctgtgtgctgtggccgccaacccccggaggacagtcggtcggtattcctgggtcctgtctgtccccagccgtgtctgggtggggctggagtctccaccctctgactttgagtccagtcctgctgtgggggctgagctgggaggttcagggactcagggctcagctcagtccccttgtcttcctcccccacttc

SEQ ID NO: 5555 - DNA, 2519 bp, Macaca Fascicularis
atttgtgggcgaggcagggcggagactcggccgaggctgccacctcccttccatcgcgctttccgccggcgtgacgtagtggctgcgccccattcatgccccctcagtgctagagtcttgcggcttcgctcacgcgccgggggcgtaagaatcctttcgccggtcccggaggtggacttgcgctcaaaaggggcgaccgtcgccacggtggcggccactgcatcgcgtcccacctccgcggccctgggcgccgtggtgtcggtgggccccgagcctatgacgggccagggccattcggcgtccgggtcgtcggcgtggagcacggtattccgccacgtccggtatgagaatctggtagcgggcgtgagcggcggcgtcttatccaaccttgcgctgcacccgctcgacctcgtgaaaatccgcttcgccgtgagcgatggattggaactgagaccgaaatataatggaattttacattgcttgactactatttggaaacttgatggcctacggggactttatcaaggagtaaccccaaatgtgtggggtgcaggtttatcctggggactctactttttcttttacaatgccatcaagtcatataagacagaaggaagagctgaacggttagaggcaacagaataccttgtctcagctgctgaagctgggatttgttcctgggctgtttggaacatcacacggtgcccttcagtttatggcgtatgaattgctgaagttgaagtacaaccagcatatcaatagattaccagaagcccagttgagcacagtagaatatatatctgttgcagcactatccaaaatatttgctgtcgcagcaacatacccatatcaagtcgtaagagctcgtcttcaggatcaacacatgttttacagtggtgtaatagatgtaatcacaaagacatggaggaaagaaggcatcggtggattttacaagggaattgctcctaatttgactagagtgactccagcctgctgtattacctttgtggtatatgaaaacgtctcacatttcttacttgaccttagagaaaagagaaagtaagctaaaagaggacaattccagtatatctgcccaaggcagcaacaagctcttttgtgtttaaggcataaaagaagaattctgcatagaaatgtggctcatattcgaaattggtctatagttatcagaagccagagaactgctaagtcttccgcaatgtatttctgctttttgccttccccatatatatggaacttgggtacctctgcctgaaatggctgccatcaacacagtgctaaaactgacacgaagtatagagtttcacagatttctgcgttttattggtggaacctgattcgcaacatttgctaaatggattagatgaacgtacttctttttgtgaacttaattgcctggattgctttaaagttaaccttcgtgcaataccaagaaaatggctccttaaaagaatgtctttgtatgtctcaaggtgaattaaggatttactgaataaggtgttgaccaaatccagaccattttagaattgggaaattttagtgagaaaaaatccactgtaaatatgctttagttttaattcaattgggatgcactacctagcgaaaatggagaaactatatacttctcagagaaatatctgacatctattgtcattccattgctattttttttccccagagacttccatagtttaaaataaaatcctagatcaatttcttgttttttggcataaatactttattgtaaatttataaagtctgagcttctaggatccagctgtgtcaacctttatttagcatatatagttataaatcacttattacaaatgctaaatcaccttttacagatgctgaaatgtttggcatgtgtttgtcgacaaagtgaatggaaatgagaaactttatactttagttttcagatatatggatctagatcccaaatgaatgattttcattggtttctcaaattcaggttgaaacacaaattaatagcctttattgatttttactcttatgagttattgtagacgtctataaatataaaagggcctgttcccaaaggatgccagaatactagtatttttatttatcataaacatccacgagtgctgttgcactaccatctatttgttgtaaataaaacagtattgttttcaaagccatctttaagtagttctttaaaaataggtctatttttttaaattttggaagtggcattgtttttaaagtaaagagaaaatgataagtacttagttgtatttactgtaatatcttgtaacatgcagatgaatgctttatcagttaaatgtgatgtattttttcatacttctggattatactataattcatatgaaatcttgatattagtccccatatggaaaaaatgaactgcagttgatatttggtgtttaagacagcaccattatttaaaaacctatgtactcccaaatgaataaaacataattcttgtcctctgagagcataaaaaaaaaaaaaaaaaa

SEQ ID NO: 5556 - DNA, 1647 bp, Macaca Fascicularis
actctggacacacgcccaggttgtaggtacgtggagaagctttcccctttctactgtcattctagaagcttctgggaaaccagggaaagacagcttgagtgtaggtaaaagtcatagtaaccagactgtaaagccctgtcctagtccaggcactagatgtgcatgatctcgaatccctgaaaagcatgtatcactacgcccgttttctagaggaaaaaaaagtggggattgactaggtcaagtatcttttctagggtcatgcagctaataaatggaacccaaaatgtgaatattagtttgtctaataccaaaatttcccccaggcttagcactatgatcaccagcctgcgggacaaatgcagaatttgaaggattctccccgccccttaccaaccccaatgggcatttccagtgctcaccatacttgagctctcagctgcagtgccacaaacttgcctggaaaggtcatgatgctcatcaggcttctgttcactgccctggacacagagctgtggctacaggagcaaaggcaggccctgagctagctttacagaaccatgactctcaaagccccattccagggtggacggcctccatctatcttccctgcccagcgtgtaagaccaaggaacttgtgctcctgtccaacgagaaaggactggagagatcaatgggggtgtgcctgtgaccggagaaacaccccatcattttcatgtccatgcttctgtaatacacaggcattttgctgtagcttctaggacatacattcaataatattacgaagtgtaaatacaaatcagaaccaggtgaattctaaattcaaatagatgttcaagactggaagttaaagatagactcaattctacagatagtgaggtcccagaactgtgaggtccaatatgggagccacaagccacctgtggccaccgagcatttgaaatgtggctctcccaagtggagatgtgctggaggtgtaacgtgcataccagattttgaagacattacgaaaaaaaacctcattaataattttatttgattacattttgaaatggatgtattttggatacattggcttaaacaaaacatgattaaaattaacaccggggatttctttttgcttgctcaacatggctactagggaacctaaaatgacatctatgggcagcattctggctcacgttgcattcctgttggacagtgctgtcctagagggttgttcttatgacatcacaaattgggtttttctgagtccaaagtgaaaaggaagtcaggtcagtttaagtgttttcattattcatgaagagagaggacgtccctttctcaggagagtcaagtctttcctatcacttggcataaaaaggcctcgttgggagttgtcaagcactgaaatcctcgtgattaggcatgcattcttgtccccattttacggatgcagaaatcaaggctcagagaagtcaagtggctcacaagtggacacaaggacacagaccgaaaccccagggcctcctccatcactgcaggcccaggcaggatagagaagacaggtgctccagggtcctgacatgacccctatcctgaagggccttatgtcttccaggtgaacgctatggctccaagaagagcatggtcattctgaccagcagtgtg

SEQ ID NO: 5557 - DNA, 709 bp, Macaca Fascicularis
  misc_feature (1)...(709): n = A,T,C or G
tcagtcatgtatgtttgtgaagagaaagtaagaannnnnnnnnnnnnnnnnnnnnnnnnnnnnnnnnggctgtggagtgggagcatgtccagggtgaggttaaggtggcagctgcagatggctgatcctccaccagcctcaggaatcaccagcttcttttcccatgtggccctttgctgccctgagtaggagtccagtgtttatacatgtttttacaatattgaaagattaacatttcccctacaatttgacctctaaatacaaggaaacggcttcatctggttcccaaccaaataataacgtggaatcaactggctgggcaggacttactgtattgagagatgatctatggatggccagtgtagctgcttcccatgggacttgtgagggaattttgggatatatgtaactgtagggttctctagcgggacaacactaataggatagatgtgtatataaaggggagtttattaaggagtattgactcacacgatcacaaggtgaagtcccacaataggccgtcnnnnnnnnnnggagccaggaagtcagtccgagtcccaaaacttcaaaagtagggaagccgtcagggcaaccttcagtctgtggccgaaggcctgagagcccctggcaaaccactggtgcaagtccaagagtccaaaagcagaagaacttggagtccgatgttccagggcaggaagcatccagcaca

SEQ ID NO: 5558 - DNA, 741 bp, Macaca Fascicularis
  misc_feature (1)...(741): n = A,T,C or G
tgacaggatgtgtcattatnncntccggtaccaatcacagtgcnnnnnnntcacagaccctgccagccagcatggaaccgtgcctcaccacagctctgcccaactcacaggctgccaaagtgaggccacaggtccacctagggcggcagatgctggtgctannnnnnnnnnnnnnnnnnnnnncatgtacactgttgctcacttctttcagaagaatggttgacactaaggggccatggaaaagaacttttaaaaaattgtggtggaatcaaagtcacagaggcagaaatgttagtgtcatgctctaaccaaggaagcttatgttccccgcagtgctctgtatctggcctgggtctcctcaagcggcagcccccactgtccagcatgtggaaggtagattcttatgacaacaccagacccatagttgccaggaaacaaaaaggaagctgagtgttgtgaaggggaagaaatcctttttataaaaaggaatcatttttaggccnnnnnnnnnnnnnnnnnnnnnnnnnnnnnnnnnnnnnnnnnnnnnnnnnnnnnnnnnnnnnnnnnnnnnnnnnnnnnnnnnnnnnnnnnnnnnnnnnnnnnnnnnnnnnnnnnnnnnnnnnnnnnnnnnnnnnnnnnnnnnnnnnnnnnnnnnnnnnnnnnnnnnnnnnnnnnnnnnnnnnnnnnnnnnnnnnnnnnnnnnnnnnnnnnnnnnnnnnnnnnnnnnnnnnnnnnncgcaa

SEQ ID NO: 5559 - DNA, 734 bp, Macaca Fascicularis
  misc_feature (1)...(734): n = A,T,C or G
gaannnnnnnnnnnnnnnnnnnnnnnnnnnnnnnaagnnnnnnnnnnnnnnnnnnnnnnnnnnnnnnnnnnnnccnnctgacannnnnnnnnnnnnnnnnnnnnnnnnnnncgtgggcagccacaactttgacaccaccaagcgcttcgccaagcgcctgnnnnnnnnnnnnnnnntggcgggcaggacggaccccgcccacgacgtgcgggtggctgtggtgcagtacagcggcacaggccagcagcggccagagcgggcgtcgnnnnnnnnnnnnnnnnnnnnnnnnnnnnnnnncagtgctgtcgnnnnnnnnnnnnnnnnnnnnnnnnnnnnnnnnnnnnnnnnnnnnnnnnnnnnnnnnnnnnnnnnnnnnnnnnnnnnnnnnnnnnnnnnnnnnnnnnnnnnnnnnnnnnnnnnnnnnnnnnnnnnnnnnnnnnnnnccacgcccgcggccatcgagaaggccgtgcaggaggcccagcgagcgggcatcgagatcttcgtggtggtcgtgggccgccaggtgaatgagccccacatccgcgtcctggtcaccggcaagacggccgagtatgacgnnnnnnnnnnnnnnnnncacctgttccgtgtccccagctaccaggccctgctgcgcggcgtcttccaccagaccgtctccaggaaggtggcactgggctaggccgccccgcacgcaggccccaaaccctgtcctcccacccctccccacccat

SEQ ID NO: 5560 - DNA, 721 bp, Macaca Fascicularis
  misc_feature (1)...(721): n = A,T,C or G
attttagaaggaaagannnnnnnnnnnnnnnnnnnnnnnnnnncagctgctgtgattcaaaaaccaacaggacaggcagaaacgtcttgcttctaattggccatcttggcttgtgccctccatgtcaccttctatnnnnnnnnnnnnnnnnnnnnnnnnnnnnnnnnnnnnnnnnnnnnnnnnncaacagaatgctcatttcacttatcgcgggctcttttacttcacttataatgaacgtggnnnnnnnnnnnnnactggatgtagtggttcattttctgacagatagaaaaatggtttnnnnnnnnnnnnnnnnnnnatgtctgaaaactagcaatgagannnnnnnnnnnnnnnttgaggttactaatcaagaagatgcttatctatgtactcaacaatgcaacttcccttgcttatgagctgctgtaannnnnnnnnnacaacatctcatatnnnnnnnnnnnnnnnntgcctggacaactggcacaagttgtcaaggattactttctcttcataaatccagcatgatattcgaacgattgtcaagaaatcttatcagttaatgagtcctgcacctttcctttaattttagaaggaaagagtaatccgtnnnnnnnnnnnnnnnacccagctgctgtgattcaaaaaccaacaggaaattttgatgatggtgattttccaagctcctcccactcccnacaaagaaaaggcatgaaaa

SEQ ID NO: 5561 - DNA, 747 bp, Macaca Fascicularis
  misc_feature (1)...(747): n = A,T,C or G
gatttatgaagtggcacagaatctaactttgcactgaatatcttnncattcacatctnnnctgnnntagtcacaannnnnnnnnnnnnnnnnattctatcaaacctcagaatatagtagaaataattaagctgttgaatgagtcttaaaaattatactactgttaagtggaccaagtttggtgaagcagaatgtgacaaaggttgattaaggaaggaacaactcaaggacattgggaatgataacttttccacttgagaactactttatgttttactgtaatttttaaaaattttttgtcctttttgttattttgcaaaagaaaatagtatttacaggtggcttcttttaaaatataaaaatataaagcaggaatgtatatgaaatgtcagattttattgtatttgcagagtattagctttgaaattgaataaagaaagctgtttgtagttttaaaatgccttattggtatcaattagaaatttcttctattttttgatgtacttagagctttttgagtgtagaattttaaatggcaggattttacagtgtttacatgcaagtgcattttataagtgttctatatgtgtaaaatagtattttcaactggaaagtgttggctagtgcaannnnnnnnnnnnntttctggttcccatgatgttgcctacactgctagactacagtttagtattgctttgcatcacgaggccaagaaatcccatgttgtttgtaaatagaataatccacc

SEQ ID NO: 5562 - DNA, 687 bp, Macaca Fascicularis
  misc_feature (1)...(687): n = A,T,C or G
cacatacagacaattagtttcttttcagcaaatatttaacatatctttcaacatactttcaccagtttttggtaaatacacattgctgtaggtataccaagtttttgttatgtttagtaactaatttcatgttttctgtatatataagtatagctattggaccctgcattgaaaaccttcttagtactaacaacactccttttattattaccttcatagttgctttaaatgacacattttattttgagttctaattctggcagagttgcaaagtctatgagaatgttacctcctgtctcagaagcttgttagatattgctgccacctaaatattgtaataaaagtgtttaaataaaaatcttcttaaaatttaaaatgagttatgtttaaaaagaaaaatgaactttgtatcaagaaaaaaacaccattgtcccaagttatacaaatatatttgctttgatgtaggtcttgctactgaagagagaggaaacttccaannnnnnnnnnnnnnnnnnnnnnnnnnnnnnnnnnnnnnnnnnnntttgctctgtacaaatcaatgtatttaaatcccttttcaaaaagttattgttaaataatgtactaaaataatcaaaatacatttatttnnnnnnnnnnnnnnnccaacaaaactcatatcatacataaaatcacaactgttttaaa

SEQ ID NO: 5563 - DNA, 652 bp, Macaca Fascicularis
  misc_feature (1)...(652): n = A,T,C or G
aagtggtggctgacagtgcannnnnatgagaatttcataatacaccgctannnnagacctttatttggtcagaaatggaaaagaaaaagccccctttcttcccttttctgttttacttcaagggcataccttggaggtgctcagaaaggggtgaaggttgcactctggtggaggatggggaaagagttctaaactgtctccagctgtgagcccaggaggtcaagtgggctattaaaatttaacgttgagtaaacgtgatagtgatgagaaaggaattttgtgtactgtaaccttgcagtagagatgcagctgtccttggtgtgctgaaacacacctctcctttatgtagttgggaacctcattagaaatgacctcagctgcccatatctccgttcctttcagcagttgtccaagtaggagcgtatccaatgaggacatatcacatcacaaagtcattgtcattagagtgtacttgattactgggcatccttgtaatataatttcataccactgacacattatacttataagagaacatctttcccagagtgcctcagaccttattgctttaaaatataataatgttttcattacttttattatttgaatgatttagtaaagttgactgaatctggtatagactttgggagta

SEQ ID NO: 5564 - DNA, 747 bp, Macaca Fascicularis
  misc_feature (1)...(747): n = A,T,C or G
agcaaatagtgatacaaataaaaccctagctattcatatgtcttgatttcaataatctaattcttaatcattaagagaccataatagatactcctttccaagagaaaagaaaaatcattagaattccgttactnnnnnnnnnnnnnnnnnnnnntgtagcatacatgagtccatccgtcagtcaaagaatcgttccatctggagtcttaatgtagaaagaaaaatggaggcttgtaataatgagctagttacaaagtgcttgttcattaaaatagcactgaaaattgaaacatgaattaactgataatattccaatcatttgccatttatgacaaaaatggcactaacaacaagcacttcctttcagagtttctgagataatgtatgtggaacagtgtgggtggaatggggctgaaaccatatacgagtctgtgtcttgtcagtccaagaagtgatgcctagatgttaattttagggacctgtgccttgtttcctagcccataagaacgcaaacatcaaacagatactcgctagcctcatttaaattgattaaaggaggagtgcatctttggccaacagtggtgtaactatatgtgtatgtgtgtgtgtgtgtgttttgtgcataactatttaaggaaactggaattttaaagttacttttatacaaaccaagaatatannnnnnnnnnnnnagacagacatggtttggtcctatatttctagtcatgatgaatgtattttgtatac

SEQ ID NO: 5565 - DNA, 755 bp, Macaca Fascicularis
  misc_feature (1)...(755): n = A,T,C or G
agtgacttcccaaggacatttacatttatatnnnnacgctgtatggaagggtgtgggtgtgtgtgaaggggcgagtggagacactgtgtgtatctctagataagaagatatgcaccacgttgaaaatactcagtgtagatctctatgtgtataggtatctgtatatctttccttttgtttacaactgttaaaaaacctcaaaatagttctcttcaaaagaagagagattccaagcaacccatcttttttcagtatgttctgtacnnnnnnnnnnnnnnnnnnnnnnnnnnnnnaggcatatatatnnnnnnnnnnnnnnnnntgattacaccatcagnnnnnnnnnnnnnnnnnnnnnnnnnnnnnnnnnnnnnnnatgaannnnnnnnnnnnnnnnnnnnnnnnnnnnnnnnnnnnnnnnnnnnnnnnnnnnnnnnnnnnnnnnnnncagggagtttctttgagaacatcagtcacctttggggttgccgtgtacaatgagatttataatcatgatactcttcgtggtagtttcacaaagacannnnnnnnnnnnnnnnnnnnnnnnnnnnnnnnnnnnnnnnnnnctannnnnnnnnnnnnnnttaaatctgtgataatggttggaagtgggtggggttatgaaattgtagatgtttttagaaaaacttgtgaatgaaaatgaatccaagtgtttcatgtgaagaagttgagccattgctatcatgcattcctgtctcnnnnnngaagatttg

SEQ ID NO: 5566 - DNA, 507 bp, Macaca Fascicularis
ccgccctttttttttcaggccggccgggaagatggcggacattcagactgagcgtgcctaccaaaagcagccgaccatctttcaaaacaagaagagggtcctgctgggagaaactggcaaggagaagctcccgcggtactacaagaacatcggtctgggcttcaagacacccaaagaggctattgagggcacttacattgacaagaaatgccccttcactggtaatgtctccattcgagggcggatcctctctggtgtggtgacgaagatgaagatgcagaggaccattgtcatccgccgagactacctccactacatccgcaagtacaaccgcttcgagaagcgccacaagaacatgtctgtgcacctgtccccctgcttcagggacgtccagatcggtgacatcgtcacagtgggtgagtgtcggcccctgagcaagacagtgcgcttcaacgtgctcaaggtcaccaaggctgccggcaccaagaagcagttccagaagtttct

SEQ ID NO: 5567 - DNA, 754 bp, Macaca Fascicularis
ggttcatcataccatagccctacagccccatgccttgtgtcctggtttccccgccgtgcagtggtcctgcaggagtggagcctgtaggacttgcttctcacccactccaagcagaactgtcggggaaggaggtgggaggtgcagccagtctagacctgaagctctcacactaaggagtaaggtaggcctgctcagccttagcccttcagcagccccaagggtgggggaggcaggaggcggctgagcgtagtcgtggatagaaacctttccctactgcacggtcacacacatggcattggactcctggctgtagctcactcgggtccactgaagaccaagttagtttttagaaatctatttaaagttatctatcatgtatctatttactgtgtttttctgaatacgcaagtgtaaatagtataatttgcagtgcaaagtccttggcaataagtttgtgtattatgtttaaaaacactggaaaccacgaccaccatggactgcccttcccctctgaggcaattattacatgtaggactctgaactttaaaccttcagcgtgactgaagcagcagcctgcacatgtggaccgtcatcagtgcctcgcccagagatgcctggccttcatccaaagggaccctgctgccacaagtcctccaggcagcacccacactgtggctccttcacgctgagtatgttggactctgccatagactgaccctcttgtctggctgctgcagtttgtctgtaatgccct

SEQ ID NO: 5568 - DNA, 765 bp, Macaca Fascicularis
  misc_feature (1)...(765): n = A,T,C or G
tgaactgatggagtgcacatgaccncatcntcatagcatgtgaaagaaccaacctgcctggcagaggtgcagagatttccagaggactggccnnnnnnnnnacaccagcaacatctgcaacacnnnnnnnnnnnnnnnnnnnnnnnaggactcacgctannnnnnnnnnnnnnnnnnnnnnnnncgcggatggacaggtgtctcttgagcctgtgttccaagatgtctgtggaaagnnnnnnnnnnnnnnnnnnnnnnnnnnnnnnnnnnnnnnnnnnnnnnnnnnnnnnnnnnnnnnnnnnnggaactcatcaaagggccagattgacatcttgcnnnnnnnnnnnnnnnnnnnnggagcaaaagttttgtgtacttcagtaattgtcacatttgtcttccacctccttgacatttatttgttaatcatacgatcatttttttcaccttcctttgtttcttcctcagaagtnnnnnnnnnnnnnnnnnnnnnnnatttctcttttaatgtatcatttcagtgttggaaagaaaaatctggatctttatgtggtgacccattttagatgtaaagatagttattcaatagatagtaaattatttctcttaagagatatttccttttatttctgtacaataatatgtatgaactcagttactaggggactgtattgtgacattatcaacctttattgctatttaaaaatgatagtttgtagaactgaggatnnnnnnnnnnnnnnnnnnnnnttnngaataagtaaa

SEQ ID NO: 5569 - DNA, 138 bp, Macaca Fascicularis
tacagaacaagtagaatcctgtatggcagactgtattttccaaagatggccaaatcagtgtatcccatcccactcattcatgttccagtgtgatgaggacactcctccactgagatgttcggtcaatattccctccct

SEQ ID NO: 5570 - DNA, 1931 bp, Macaca Fascicularis
aaaacattccggatcctcggcccgaaccgccaacgcaggggcttggaggtacagggacttcagaggcggccagaaaaggggtggtggaccactccccagctggtcgccaccatgccagtctctccggcaggcagtcacaagcagcagaacttcaggaacattgccacacaaccaaagaagtctattagcttttttgctacaatgaaagcaacttcagggaaaggatatactggtgcaaatcaaagcagaatggctgtgtccaaaaccgtgcttattccacctgaattgaaaactgcagacaaaacaaatctcagtataaagacaatgcaggtgtttgacataaatggaactgatgttactcctcgacctctttaccatccagatccacttactggtacagcaaagccaaataaactcttgacatcacaagaaggatcacttggaccagaatttatatcttcccatagcctttatcagaatacaataaatcctagtatgttagggcagtttacaaggtcagttttaggaagcagtacagtttctaagtcaagtgtatcaacaagtgaatcaatagcagaagacctggaagaaccatcctataaacgagaaagattgactagtttcacagatttgcaagttataagggcagcacctgaaaaaattgtaacaaaagaagaccgggagaagaatatagagataatactcacagagacagaaacactgagattttttgacttgcccacagtcatggtctctgtagaatctgaagaagctgagaaagtaactcagaggaacaagaattatgaagtcctttgtagaaatagattaggcaatgacctatatgttgaaaggatgatgcagactttcaatggagcaccaaagaataaagatgttcagtgtgataaaatcataatggaagataaaggcataatgtccactgcctaggatttgtatgattcttacaatgctatggaacttttatctttatcagtaaaaccatctgtggttgagtcaagtagtgaaacaaatgtacttcctaaagatcaggaccaaagattgccagggagcactacagaaaaaaatagtgaaactagttctctaatggacatagaaaacgtaattctggcaaaaatccatgaagatgaggaagaccactcagatgcaatattaaaatctgacaaatttcatcaggacttattttttatggaacgagttctaatggaaaatatatttcagccaaaacttgcagcttatcgtcagcttcctgttttaaaagaacctgaacctgaagagcctgaagattttttagaaagtgcaacacatgaagaagtagaggaagaatctaagaaggaggaggaagaagaaatacatgcagaagaatcaacaatacccgccaacttggaacgactttggtctttttcctgtgacttaaccaaaggcctcaatgtgagcagccttgcctggaataaaacaaatccagatcttttggctgttggctatgggcactttggatttaaagagcaaaaaagaggattggcttgctgctggtcaataaagaatcccatgtggccagaacgtatttatcagagtccatatggagttactgctgtggatttttcaattggagcacctaaccttttagcagttggctaccacaatggcacaattgcaatttacaatgtacggagcaacagtaatgttccagttctggatagtagtgaatcacctcaaaaacatttgggacctgtctggcaactacagtggatagaacaagatcgaggaacaacaggagatgacaaaagagaaatactagtttctatatcagcagatggaagaatcgccaaatgggttatacgaaaaggactagattgttatgatttgatgcgattaaagagaactacaactaccagtaacaaaaaaaaaaaaaaaaa

SEQ ID NO: 5571 - DNA, 751 bp, Macaca Fascicularis
  misc_feature (1)...(751): n = A,T,C or G
gccatgagcagccannnactagaggtactgntccacctnntnncatnnnnnnnnnnnnnnnnnnnnnnnnnnnnnnnggaggagggagggggagagggagatggtttggaggcctctaggaaagagataagatatgagctttgnnnnnnnnnnnnnnnntctcctgctttagaataannnnnnnnngttctttatccattccccttgttcctacgtcaattgttttcactttcttgggtgtgagactgagtgagacacacacaaaatgtgttnnnnnnnnnnnnncggcaggcagagcagctactgactttgaacgtgggcagagaggcccctggatctcatccagcccactcnnnnnnnnnnnnnnnnnnnnnnnnnnnnnnnnnnnnnnnnnnnnnnnnnnnnnnnnnnnnnnnnnnnnnnnnnnnnnnnnnnnnnnnnnnnnnnnnnnnnnnnnactctnnnnnnnnnnnnnnnnactgccagtatgggcgcgtcagctccatcctaacaaacaagatgtttaggtaaaactgtgtaggcaccttctgcttctctgcttcatcgttcctgtgnnnnnnnnnnnnnnnnnnnnnnnnnnnnncaaannnnnnnnnnnnnnnnnnnnnaggcaggctagggcatcaagtcannnnnnnnnnnnnnnnnnnnnnnnnnnnnnnnnnnnnnnnnnnnnnnnnnnnnnnnnnnaaagnnnnnacaaaaggttgcagggtttaaaacatacata

SEQ ID NO: 5572 - DNA, 2157 bp, Macaca Fascicularis
aagcagagcaggccgaaggagcgccggggccctgggctgctggaggttgcggcggccgcggcagcatggtggtgtcagagaaggagcagagctggatccccaagatcttcaagaagaagacctgtacgacgttcatagttgactccacagatccgggagggaccttgtgccagtgtgggcgcccccggaccgcccaccctgcagtggccatggaggatgccttcggagcagccgtggtgaccgtgtgggacagcgatgcacacaccacggagaagcccactgatgcctacggagagctggacttcatgggggccggccgcaagcacagcaatttcctccggctctctgaccgaacggatccagctacagtttatagtctggtcacacgcacgtggggcttccgtgccccgaacctggtggtgtcagtgctgggggggtcggggggccccgtcctccagacctggctgcaggacctgctgcgtcgtgggctggtgcgggctgcccagagcacaggagcctggattgtcactgggggtctgcacacgggcatcggccggcacgttggtgtggctgtgcgggaccatcagacggccagcactgggggcaccaaggtggtggccatgggcgtggccccctggggtgtggtccggaatagagacaccctcaccaaccccaagggctcgttccctgcgaggtaccggtggcacggcgacccggaggacggcgtccagtttcccctggactacaactactcggccttcttcctggtggacgacggcacgcactgccgcctggggggcgagagccgcttccgcttgcgcctggagtcctacatctcgcagcagaagacgggcgtgggagggactggaattgacatccctgtcctgctcctcctgatcgatggtgatgagaagatgttgacgcaaatagagaacgccacccaggctcagctcccctgtctcctcgtggcgggctctgggggagctgcggactgcctggcggagaccctggaagacactctggccccagggagtgggggagccaggcaaggtgaagcccgggatcgaatcaggcgtttctttcccaaaggggaccctgaggtcctgcaggcccaggtggagaggattatgacccggaaggagctcctgacagtctattcttctgaggatgggtctgaggagttcgagaccatagttttgaaggcccttgtgaaggcctgtgggagctcggaggcctcagcctacctggatgagctgcgtttggctgtagcttggaaccgcgtggacattgcccagagtgaactctttcggggggacatccaatggcggtccttccatctcgaagcctccctcatggacgccctgctgaatgaccggcctgagttcgtgcgcttgctcatctcccacggcctcagcctgggccgctttctgaccccgatgcgcctggcccaactctacggcgcggcgcccccccactcgctcatccgcaaccttttggaccaggcgtcccacagcgcaggcaccaaagccctagcccaaaaagggggagctgcggagccccggccccctgacgtggggcatgtgctgaggatgctgctggggaagatgtgcgcgccgaggtacccctccgggggcgcctgggaccctcacccaggccagggcttcggggagagcatgtgtctgctctcggacaaggccacctcgctgctctcgctggatgctgaccttgggcaggccccctggagtgacctgcttatttgggcactgctgctgaacagggcacagatggccatgtacttctgggagatgggttccaatgcagtttcctcagctcttggggcctgtttgctgctccgggtgatggcacgtttggagcctgatgctgaggaggcagcacggaggaaagacctggcgatcaagtttgaggggatgggcgttgacctctttggtgagtgctatcacagcagtgaggtaagggctgcccgcctcctcctccgtcgctgcccgctctggggggatgccacttgcctgcagctggccatgcaagctgacgcccgtgccttctttgcccaggatggggtacagtctctgctcaccactcacagattcctcacactggggaaataaagccatttgagaggaaaaaaaaaaaaaaaaa

SEQ ID NO: 5573 - DNA, 840 bp, Macaca Fascicularis
  misc_feature (1)...(840): n = A,T,C or G
gccagagcagaagctgaacagggagagcgagaagaccagctgtgaggtgagggctagagacagcccacgggccctccctacaagcgtgnnnnnnnnnnnnnnnnnnnnnnnnnnnnnnnnnnaaactggagttggagtgctgcccacatctccaccttacaaccctctttattatcttgttaaagttttgtctcatgcgttgatttttaaaaaattttttagagacagggtctcactctgttgcccaggnnnnnnnnnnnnnnnnnnnnnnnnnnnnnnnnnnnnnnnnnnnnnnnnnnnnnnnnnnnnnnnnnnnnnnnnnnnnnnnnnnnnnnnnnnnnnnnnnnnnnnnnnnnnnnnnnnnnnnnnnatatatatatatatatatacatatatacatatatatagtgattccttgtagcaacccaaaaaatgtaaagaaagaattcgatacaagggggttctgtcacctatagttttaatttcctnnnnnnnnnnnnnnnnnnnnnnnnnnnnnnnnnnnngagcgggagggcaggggagaaattgcctgcttttcctgtcccttttttgcctgcacacttaacgtggactgcctccttggacttaaaaagaggacttgagccaacatgcaaataaaaaaacatgaaccggtttcttagctttggacttggcaactgacgaatgctctgggggtgacccggcccttcccgtccgttctactcccatcctcgaagatggagacacctgtgtttatgttgtcacttcgcattccatcctcatcccccccgactctcccgctcctgaccccacactacctctacccgaccccatacatct

SEQ ID NO: 5574 - DNA, 224 bp, Macaca Fascicularis
  misc_feature (1)...(224): n = A,T,C or G
gacgaggcagccgcccgactcctgaccgtacccttcgagaagcattccactttgtagctggccagagggacgctgcaattggaaccaggcacacggccccaggggctgggcccctgnnnnnnnnnnnnnnnnnnnnnnnnnnnnnnnnnnnnnnnnnnnnnnnnnnnnnnnnnnnnnnnnnnnnnnnnngccaccagccctgcccggggctcaacacacaggct

SEQ ID NO: 5575 - DNA, 625 bp, Macaca Fascicularis
aacgaatatagttaaaattactatgcccgttgcactttatattaagttctagtgtacgttgtgtaatgcttacattaaataaaaggtaaggttaatttacataaaacatgtttaggtaggataattgtaaaaattattagagaaattggtaaaattgtggctttggatagaggcaggagaaagaaaagagcaaggcactagtgagaaaaattgccatggagaatattgagaatagatacaaagagacctacaggtttacaacattaatattggccaatacttgattggacagtttgaatttttcaacctgaaaggcctttgttccccaaagtttggtaaggagattttataaagacaaacaacaatagcaataaaaaaaatcagggaagattaagagattccataaggagcaagaatttataggtaatatttcaaaggtatagatatgattactattttggtgaataataagcacatggtagactgaaattcggcaacagctactgtgcaaataaacatatctgtgattatggcttatatcgggttggagacccgggctgtaagccattctttttagtacagattaatctccatttctcaatcacagttctgttcttttcctctg

SEQ ID NO: 5576 - DNA, 740 bp, Macaca Fascicularis
  misc_feature (1)...(740): n = A,T,C or G
aaggaacataaatagaagatgtgcagaccggcaggggctagtggcaggnggctggctgtgcattggttttgatgcctctcagctttggcagccccaaggctggggcccaaaaaaaaaacgagggctgatgaggtgacctggagtgagggcggtgcttcgccacccctcaggaaccatacttcagcggctctgcctctgcacattgctcaccaacacacagggtagaaaaccactagctcttcctggagagaacagaacatgcagcctccaccacgtccccagaaacagctgcagacttgagctcactacatcaagaacaccacaccgcgctccaaggaacagctacaagcacagagacagaggcatacagagacaaagagagaaagagacgcaacatggcagcagacactgctttttttattaaacattaaaaaagtcaaaatccaagcaaacttgaacccgagaatgtacacagaagtaggaaacacagagaacagagctgtcccagccagccagcgagcggtgctcttttcggagaacgtttcatagacggaagtagattccatgggcctccaagacaataggatcctctctccattcctcgccatatgggttttgttttttaagtcctttggtttggggagggccttcttttttttctgttttgatatttttattttttctgcagtcaccggctgccaacataatctgcaccaactggagatcagaaacaaacaaat

SEQ ID NO: 5577 - DNA, 755 bp, Macaca Fascicularis
  misc_feature (1)...(755): n = A,T,C or G
gctcactgctgtnnnnnnagcaccacccannnnagggctgtgagcagagtggcagtgaatgtctgttgaagggggaatggagccattcatttcactcagttcctgtcccatttaaccgcccctgatccttgatcttccattaccttcacaccccggggtccttctgaactgaccttgacctctgatctcttcacatatctccccttagcatctctacttacctactctctctcttttttttttttgnnnnnnnnnnnnnnnnnnnnnnnnnnnnnnnnnnnnnnnnnnnnnnnnnnnnnnnnnnnnnnnnnnnnnnnnnnnnnnnnnnnnnnnnnnnnnnnnnnnnnnnnnnnnnnnnnnnnnnnnnnnnnnnnnnnnnnnnnnnnnnnnnnnnnnnnnnnnnnnnnnnnnnnnnnnnnnnnnnnnnnnnnnnnnnnnnnnncaaactcctgacctcaagtgatccacccaccttggccttccaaagtgctgggattgcagacgtgagtcactgcgcctggccattccatatctcttaagtctcagaatttcctctagctccctccaggtgtctgcagttgtcatcccctcaaagctgtcccacactctcctccgaagaccctttgtgtatcttctccagctaccgcagaccccccaaacccaggcatccatcaaagtccctcattcatgagggtgtggggacacagactgtgaccagaacagaaatatgaaaatgtgaatgacagtgtcccccg

SEQ ID NO: 5578 - DNA, 743 bp, Macaca Fascicularis
gctgaggttacaggtgtgaaccactgcaccaggcccaccctgctagtttttaagttctttgtagggtcttggctgttatgtccagactggtctcaaattcctggcctcaagggatcctcctgcctgggcctcccagggtgctgggagtataggtgtgagccatggtgcccagccacattttttagtttttatttttcttggatttgttgcagttaggttttccctccaacaccactccaagaaatttcattgttaagattagcagtgattttgttgctaagtccagtggtccattcttttactcgaggtcttttgacctctgttagtgacttttgcttgtcacttcatcctattagtgattcttgacagttgatttcttcctgattttaactgtcttccggatcctcgactcaagcttttcctcctacatcattggctactcctttgctagttccattttttagacttttagtcagttttataaggccgtagggctggttgggtgcagtggctcgcgcctgtggtcccagcactttgggaggccgaggtgggcagatcacgaggtcaggagttaagagaccaggttggcaacacagtgaaaccctgtctctactgaatatacaaaattagccgggtatggtggtgggcacttgtaatcccagccacttgggatactgaggcaggagaatcgcgtgaacctgggaagcagaggttgcagtgacctgagattgggccattgcact

SEQ ID NO: 5579 - DNA, 774 bp, Macaca Fascicularis
  misc_feature (1)...(774): n = A,T,C or G
cccagagtaaagtgttnatcgcaagagtccagtgtcgtgccctcagccagtnnnnnnnnnnnnnnntgggagcagccctggccgagctgcccccgtggtttctatgcagcccttcgtggcgaaattcctgcggtgtttacagattctgatgagctcttggaagacactgtcatgaaagccagcgattttaagaaaaagagcggttctggaatcagtgttttccaatcccatcccagaacatcagttgtaagataagtacaattgattgtccttgctttcgtaagtagaacaaacactaaatgcgcctctgaggtggccaccctgggcagggacctgtgccttccgccgacactcagggctccctctggctcccgggtcactctggtggccccagcggctggtccctgtggtcatggcccgagtgcggaggggccactgcatggctgctgctgtcctcccccaggacccacggggaccgtggccgcacattccgtgctgtgaagctgtccagatgcgctgctttggctgggggttctggtggatgtttcaagtagcattttgtacaatgcagtttagaattcaggaatttcaagtatgtgcagagcctgcccgcccgggtgtgtgaggtcctagctgcctttctgacggcctcccgcagagggaagttgatgaacactaaatgcctttttgacttttttcctatagaattttttttaaactttcttttttcctcctgttccaaatgatagtttttttatttaataaattctgcag

SEQ ID NO: 5580 - DNA, 744 bp, Macaca Fascicularis
  misc_feature (1)...(744): n = A,T,C or G
gtttcaacactagtcatnnntttattttttcgagaatcagattttagcgctagaaaagagttaaaaatttcagtgtaatgtcataaggatgttgggatacagagattttttccccccttggaaacaaatggactgggaaagacacagcacggctttgctctgagtttcaatctgatgattatgaccatgaaagataatcttatggaaaggttaaatggtgtttacaagtggatagataaggggggagatggtgagaagccgggttttctctacgctaaatgcgtctactaagagcagcacttcctactagctaagcacaatcatagccccaccatgatgaactgctagtctgaataatattccctgacttagagaaaggcacacaaaaacatataaggaatatgtctattttcatatgtgtgatactgacagagccatggtattcctaaaatataggtttctcttttttcttatattcttagcaaattgcatttattcactacattacaaaccatcactgatgtatccaaaatagcacacatagttcagtatgaaaataagagaataaaatctgtgataagcaagtgatttaggtattttcttttgtgtttatgcattatccgactatattaagacctgttttctatttaccttctatcagttttctctatcaaatatgttatcacaatcctctgtaagaatgaatacgcaaattatatttctttttnnnnnnaagacgagttg

SEQ ID NO: 5581 - DNA, 622 bp, Macaca Fascicularis
  misc_feature (1)...(622): n = A,T,C or G
gcctcaaatgatctgtccgccgtggcctcncagggtgctgggatgacaagcatgagccaccttgcccagccagactgacattgacctctggaaggctggtttcccagccagtgcccgcaccacatgccccactcacatgctttcatctgcaggcctgccttcctgtcagcctcctcgctgctgagctctgcggtagggaatttcctttacccatccaaggtgtggtctggctggtaacactgactccaacccagctccttcattttacagaaggaggcatttctgaatcatgtttgttcactatggcgagactcacaggagaatttttaaccaccttattttaagtcattcattctaggaacagtcaagccccaatcacaaaggggtcaagccacatccgttcaagtgaggaagcacttgcagtttctgaattttgctgtgtatttgtcctacgtcacccaacaggccctttgctataggtgggacgttaccagaccccaataccttaaggtctcacagcctgaaggacacagaacattaagttattaaaagacctgaaaatattataacttttttttcaattgtcacctgttttcaagacttaaatgctatagacttttct

SEQ ID NO: 5582 - DNA, 670 bp, Macaca Fascicularis
tttttgatctgtgggttaaatctttcattagttttggaaagttttgagccattatctcttcttcagtttcgtcccgtttctgctctcctccgtctggaaagctaataacatgcgtttttagaccatttgatactattccttagattttaatgagttgaatttttaaattctttgcacgatttttcctctgtgtatttcagtttgggtaatttcagttgtccttatgttcactgattctttgtaactgctgttaagcccaacaaatgaattatttatttcttatgttgtattttttattggtggcattttcatttagttgttttttttttttaatagacttttcttctctgtgtctcatgtgcgcatgcatattgtctaccttttccactaagtcctttcacacatttaccatggttatcttaattaaagtctctggtagtttcatcatctggttcatctttgagtctgctctgttaccagttcatcatgtgtcttataattttattgtatgccaggcattttgtataaaagaacattatagactgaggtaaataaagagtttcctcataaaatggcacacctaggctgggcgccgtggctcaggcctgtaatcctagcactttgggaggccaaggcatgcagatcgcttgcagccaggagttcaagacca

SEQ ID NO: 5583 - DNA, 686 bp, Macaca Fascicularis
  misc_feature (1)...(686): n = A,T,C or G
gtcactgnnnnnnntcatgnngnnatcnnntagagtgtcnntcaagggttgnnnnnnnnnnnnnnnngaaagtaccttggtgataatctccagcctaaatttcatcatccnttctacggtattcccaacaaagtatcatcaaacctatacttaaaaacatatggtggccaggcaccgtggctcacacttgtaatgctagcactttgggaggcagaggtgggtggagcacctgaggtcaggagttcgagatcagcctggccggcatggcgaaaccccgtctctactaaaaatgcaaaaaaaaaattgaccgagtnnnnnnnnnnnnnnnnnnnnnnnnnnnnnnnnnnnnnnnnnnnnnnnnnnnnnnnnnnnnnnnnnnnnnnnnnnnnnnnnnnnnnnnnnnnnnnnnnnnnnnnnnnnnnnnnnnnnnnnnnnnnnnnnnnnnnnnnncaaaaaatatacatacatatggtgataaagtttcccatttcccaatgcagcttcacatttgaacaactctaattgatacagctttatggcagggttttagcgtgtgagtgggatccaaaacactcaatcctgtaaaagggtacagtcctgttgtacattaacacactgatgatgtgagcctatgagatgagccaattaccaattacgttatattcgaatctgctttgtgttgggat

SEQ ID NO: 5584 - DNA, 778 bp, Macaca Fascicularis
  misc_feature (1)...(778): n = A,T,C or G
tcacagaccannaaaagttcnnnnnaaaatacaatgctcaggaaactacacggatcacacgannaaataccatcatgtatgatctcgtcttgcagtgtgccgttcagtttcccggaactcgcgtgcgcactgcacatgtgtacgtgcnnnnnnnnnnnnnnnnnnnngcaagatcttagctgtacagaaatatttgcagaagagacccttcgcacctttttactgtaatgttgagatttcattacttaaatgttctatggaaggttctggtgtggtggttggagctggagggagcatctcagcacgtgctgagggcgtggggcctgccccctgggcacccatccaaaagctgggccatggagccctggcttcccaagacgcagccccagagctggctcatcctgagggtctctgggggtgtttgccaggctcnnnnnnnnnnnnnnnnnnnnaaactctgcagtgcctccagatggaaaggtgggcccggtctctggttgggtctgcattttggagagtccacaccatggaccaggttttcccccaaggctcagctttgcgtagccactaactccttggggcagtctgagaatgtgggcggagcagaactgtgtggcctcatcctcccccaaggctgtgcctgcagcgggaacacctttccactttctagctggggagaggttgggttttgcttctgtaaatacatgaatccttatgataaaagcctgtcagaaatacatgtatacattatttaatnnnnnnnnnnatgtaacctcag

SEQ ID NO: 5585 - DNA, 693 bp, Macaca Fascicularis
agagagaaactccagctgatcagtgctcttacaaacaaacttgagagcaacaggcctccagagactgccgatgaagagcaagtagagagtttcacatcaaagccatcagcattgccaaaattttcacagtttcttggagattcagttgagaaagctgcccaactaagacctgtctctctaccaggagtttctagcattgaagatcttcaggatttattccacaaggctggccaggacgtggatgggaagctgacctaccaggaaatctggacctccctaggttctgctatgccagaaccagagagcttgggagcatttgattccgatggagatggaagatactcattcctcgagctaagggtagctttaggtatctagcctcatcaggcatattttagaaatggactgcctaatatctacttacctaacaacaaaacaacccttacttacccatcagtcctctagtcctccaaactactgtagcagatactttgccaccttttaacttgtttgaagaagctatataaaagttatttttttaaagaagaagaccattttacttatgatgttcagaaatctatgatttcctaaaactagtaagatcttacattttaaaattgccagaaaaaaaaattaaagccctctttttttctctttcctttttttgaggggaggagaccttatcttttaaag

SEQ ID NO: 5586 - DNA, 743 bp, Macaca Fascicularis
  misc_feature (1)...(743): n = A,T,C or G
atcagcagacagaagaatccaccaagtacttcaactttacaannnntgatgagaagaaaatgaaagaggctgagcatcgannnnnnnnnnnnnnnntcagccagcgagatctgtccatcagcattaacttctgggttcctgtcctgctgaacggggtggccgtgtgggatgnnnnnnnnnnnnnnnnnnnnnnnnnnnnnnnnnnnnnnnnnnnnnnnnnacctccnnnnnnnnnnnnnnncctgacccagattnnnnnnnnnnnnnnnnnngactgctccattgctggctgcctgcggttccgctgtgacatcccctccttcagcgtccaggaggagctggatttcaccctgaagggcaacctcagtttcggctgggtnnnnnnnnnnnnncagaagaaggtgtcggttgtgagtgtggctgaaattacgttcgacacatccgtgtactcccagcttccaggacaggaggcatttnnnnnnnnnnnnnnnnnnnnnnnnnnnnnnnnnnnngaggtctacaacgccattcccatcatcatgggcagctctgtgggggctctgctactgctggcgctcatcacannnnnnnnnnnnnnnnnnnnnnnnnnnnnnnnnnnnnnnnnnnnnnnnnnnnnnnnnnnnnnnnnagaaactgccacattcagcggggaaggtttcagctgtgggtccccaaatgtgcctttgtcctaacagtccactttcctgtttatctctaccccc

SEQ ID NO: 5587 - DNA, 708 bp, Macaca Fascicularis
  misc_feature (1)...(708): n = A,T,C or G
cagttcgtnnnnnnnntcccgggatagaggaaatacaaggctagatnctgcaaaccactggtcacatttcatcaagcagtcaacatgtaaatgtctgtttaaagacaccttatttaatatagtcgattcattaaccttgaagtcatgaccaacaacactgtaactcatgcctgaatgaagcttatctgacgcataagcttcataaggcacacaacagcctttttgcccttaggaacagctttttgcccttagcactaggcttgggggccattttaaacagtgaaatcaaaaaaaaaaaaaaccagaaatgcaaaaaccatggcattagagtaaaaaggacacatttatagtatgaaagctggaacatggccttgttcaacctcagctgaggatatatgtacagcaagttttttgctgtaccacaaaattttaggttaggcaaattcacaaatacagaatccacgaataacaaggatcaactctacttaactatattttaaagctgtgacatatatctacctggtttatgtaatagaatttattgctgaatcatgctccagtatttgagtgatgttttaaatatcctatgtctgaaaataattcctcctaattgtgtagtaatttgcttttactgtttcagcagtatttcaggtctttgttcattcactcagtaatactgagcacttaccatgtaccagaattttacta

SEQ ID NO: 5588 - DNA, 747 bp, Macaca Fascicularis
  misc_feature (1)...(747): n = A,T,C or G
ctgaatgagggtagatgagaaagtggaaaatttgagagatgttannnnnnnnnnnnnnnnnnnnnnngagagtcggttggatgaagggagagaggacaggtgaggnnnnnnnnnnnnnnnnnnnnnnnnnnnnnnnggtggctcatggcaccagtcatnnnnnnnnnnnnnnnnnnnnnaacacaaggttagnnnnnnnnnnnnnnnnnnnnnnnnnnnnnnnnnnnntccaaggagacgtgttatggagaccattgtggatacacactgctnnnnnnnnnnnnnnnnnnaaataaatatttgttaagtgaatgattgtgctggttgagttcaggagagagctttggactgaagacagcaatttgggaaacacgaaacccaatcaaaaaatgtttcaaagatagtctacatgagtgtacgcacagttaccagaagattctaatcaccccatcttccattgccttccacttcccacatttctgggataagagaacactagtgtgacacagaataaataaacgagagggaggacaaatctgttcacagcacctaactcaaaaacaatgggaagagaagattatagattaaaaatcatttaaaatatttatcaattcattaaaaatagcaactataaaactgagcaccatgggatgcacctgtagtcccagctacacgggaggctgaggcaggaggatcatttgagcaccggagtttgagggtgcagtgagctatgatctcgccactgca

SEQ ID NO: 5589 - DNA, 1701 bp, Macaca Fascicularis
caaaggcttgccctgaaacaagggcagagaagcctggaagcttccatttctgtgaccctagtcttttaccgccctctcaagtcccagattctctctgccctaacctttatatacaaacaaggcagctttgccctgtgctctggtttctactctgaatcattcatactttgctgcacttccttccatgctgccagccgggagtttcagaaggtttcctggaggaagtgtaatacagcaggtttgacagcagctttggacttagtctcattgggggagggtgttaattgcctccctcccaccccttgggagagtgtccaagtcttaagcaagtatatggattcactgtgccctgtgctgggtccctcctggaaactctatccaggagagagtaaagaagagattatgggagaagacgtgaacacttagtgcccaatgactgactcaaatgtatgcagcgggatgcagagcagcggtttttggaaaggcttcccagaaggggtgggatgtgagaaggtggcaggacttagaggatctgatagtgctgccagtttaggggcactggaagcagaggaggcagctagagatgatcttctgcgtgaggctgggagtgtaggaggcaggttagcctgtaagcagcaaaaggttgtggggagggaggtttgtagctgactggcacaaagccttgaatgccaggcaaggatctgtaggaggctactgaacagtcatcagtaggacagggatagcatggccatgtgactgccggtggggtggtgaagtctggagaaatttgcaacctgtaccctatgtgttctgcctcacgaagcagggctctgaaagaggtagatggttcttgcagaggcatgattggcagagagattttgtttggggctacacaggtcttgctaacttaggtttgttctgggcttggtgagccctagggcaaagtctccagagctgagagggggctgtctctggtgaatgggcccctgaaagagggtcttagctttagcaaaccccttggacagttagtggggtcccaggatgggagttctagagagagacctcggtctttgtggctgtttttaatattttcctgagtggccacctccaagcaagttccccaagtcacctgccctccctgggcatctctttgctagcacctttctctagggatgaaataataggactaagtagtgacctctcttgaggatgctccttgttctagtttagagcatccccccgttcttctccctcttccttttcctttcctcccccatccctctgcctccctgtccctgtcccaaccccttgccccccacagcatttcctttacaggctgcacttccttccatgctgccagccgggagtttcagaaggtttccaaatcgggcaccacctccttcagggcgcatgagaccatattaaattctatttacaatttcttgaatttatttttccgtcagttatgtaaaataaacttactctttttcctcccctgattgttgccattaagcctttaaattctaaaattataatgcatcatctatttaggaattagattcggatgtgctattgtatgatcactaatagaaagtctgtatgtttcaagcccttctgtaaaatatgaagaaaagtgcccttagcattctgtgtaaaactgtactgttaaatatatgtgtgtaatcaaaaaaaaaaaaaaaa

SEQ ID NO: 5590 - DNA, 688 bp, Macaca Fascicularis
gagggcagtcacccgttgtgttggggtctggtttgaatgtcttctgccaaagtgttgtgatggaggtgtttctgctgcaccgggttgcctgcgtggccagaggaaaagtcagttggattaaacatcgtggtatacttgggctgattttttttttttaattttttaactttttgggatagggcctcgctctgtcacccaggctggagaacagtgggatgatcatggctcactgcagccttgaattcctaggttcaagcaatcctcccgcctcagcctcctgagtagctgggactacaggtgcatgacacttttcctggctaatttattttttgggtagagataggggtcttgaactcttaggctcaagcgatcctctttcctcggcctcccaaaatgctggaattagagatgtgagccaccatgcccagccgtagtacttgagtgttttagaaggttttccaagtgttacttaagtcctagatgttcacccttcttacactccaactattaaaaaggtcaaaattcagcctacgttttttcattattttagatttctgtggttgggatattttaacattgatgagaaaaataattgagtttggtatttttacaaaatcacgctgtaataagtcttgatttcatgattcaaaagaatcaacaaagcctaaaaataatagattactctaag

SEQ ID NO: 5591 - DNA, 539 bp, Macaca Fascicularis
  misc_feature (1)...(539): n = A,T,C or G
ccccacagactcagaaagaacccaccatggtgctgtctcctgccgacaagaccaacgtcaaggccgcctggggtaaggtcggcgggcacgctggcgagtatggtgcggaggccctggagaggatgttcctgtccttccccaccaccaagacctacttcccccacttcnnnnnnnnnnncggctctgcccaggttaagggccatggcaagaaggtggccgacgcgctgaccctcgccgtggannnnnnnnnnnnnnnnnnnnnnnnnnnnnnnnnnnnnagcgacctgcacgcgcacaagcttcgggtggacccggtcaacttcannnnnnnnnnnnnnnnnnnnnnnnnnnnnnnnnnnnnnnnnnnnnnnnnnnnnnnnnnncctgcggtgcacgcctccctggacaagttcctggcttctgtgagcaccgtgctgacctccaaannnnnnnnnnnnnnnnnnnnnnnnnnnatgcttcttgccccttgggcctcccgccaggccctcctcccctccttgcaccggcccttcctggtc

SEQ ID NO: 5592 - DNA, 2079 bp, Macaca Fascicularis
attttaatgtataattgtcataatcagtcaaaagttacaatctgtccctcagtgacatcgggggaagctgatggatttccagtaaggagctgtggtgggttcaacctcaggctgccacaaatacattgatatggtaggtaggaagtaggactacatttgaaagaaacttataggataaagttcacaattttaaaaaggttgccctccagtttttttgtttgtttataaactagagtgattttaagtaatccttacatttaaggctgcaaaaaatgtacaagaatatgttttcaagtaaagggaacataattcttcaaaaagctgttgaactggagttatgataggttatgacagatagcatgatcagtgctgatactgacaagtacttttttatcttaaaatcaacttctatggaactacaagatcaatctagctcccgagtgaccttttccattgtctgtaataatgccctcggatgagttgtgtctaaaattaagttcatctttatttatatgccaacttaactgccagagtccctaacgtattgcatttgtaacctgatcctattatgttaatacctgaaagatttcatctagacatgtcttttgtccgtattattcaaagtgtaatgaaagagatatttagtatgttccccaactgagaattttccagaatattctacttaagaagaagaagagcaattaactgcctttagtgtaagggcgagagtgcatagaaatatgcaatgtaaaatgtttgcatgaattatttcacatcatgtaagctttcccatattcataagatgaacactatagaagtctcatttctctgtgatcttctgtccattaggagtgtaaggagattgttatctatatctagtctcctttccatattgaaatgcatggctctaatccttggtgtatttttatcccttacttcttgagttatttaaaatttgccctatttaaactgaagcctggataaactgctgagccagattattcctgtgattggaatttaattgctgtagaacactcattgagaacatattttttactttttttctttcagaattattattcgatcattttctctaatgaaaacaccgagaagtaaatctggtgcttcttagtgtaaatatgtttttctttttaaaaaatcattttaaaacaaagatgagagaactataaagtaaggggaaatatcattttatttaaaaataattattcagtgatagataatggagatataaaatgaaccactgggttcataggtatgatttatgcagccaatcttagaggaaatacatcattttaacattattcccatgaaatgtttaagctccatggtttgactatgagagtcaaacaattattatttgaaaatctcatgatatttttataatctactctgtttttatttgcatgattatgcttacgtgatgaaccatccatgattctgatgctgtatttctttccagtattaacatgtgtattgtgtggccaaccttgatttgtacactgtattattgttgtaatgattcaactgttcctacatttaattgcagttttattattatgccttttggggttaaatgatgtgaagtgtttccacctactgataaataccatatgaaaacgtgacctaaaagactgatctaagaaacttttttgttgttatttttaaaaatatgaattgcaaaaaaaagttctcaaagacacatgcatttgttttaaattcaaaaaattcttatgaatttattattgcttgtactttaactttttttattgtagacaatcctaagtgaataatgtctcatgggagaatccacatgatatgtgcttgtatttgtgtaatctgatcatgcactcaatggttggaaaaggcactccagtgctaagaaaataaccagaagccaatatgtcgattcttatatcttggtttatgttaccaactgcatatggtgtaatgcataactttttccagtaaataaactggttattttttgttcatttcaaaaaaaaaaaaaaaaaaaaaaaaaaaaaaaaaaaaaaaaaaaaaaaaaaaaaaaaaaaaaaa

SEQ ID NO: 5593 - DNA, 748 bp, Macaca Fascicularis
  misc_feature (1)...(748): n = A,T,C or G
tcagaacgagaaaacataataacgaccgagtcctgaatttccctaaaatcctccacgtggcctgtcctcactgatgtagcttcatcattgtcacatcaaggatataccaaggtctttgtgtcttccctggcctgtagcctggtggtgtgccaagattagcccagaacatactgtctccaggaggaagagactcaattctgcattattctcagggctttgctgttctctgaaggacagtataatcaaaccatttcctgccgtttgggtgagaactagcagggttttctctcttcggcagtgagtcagatttcctacgcacatcacagactttctgttcacgctgttagcttcttccatgagctattttgggggccgtaactgagttgcaaaaatctgtttcctggtttttgtattgaggttttatgctttgttttaaaaacacacacacacacacaccacaaaacaacacaaaaacaaatcagaaacagacacatatcaagaggccttgagctgacctgctgacgtcaagtatctgcctcttcagacttgagaattagccaagcgagagtgttgcggtgggaaattttatttccctgggtggagagggcgggaaggaaaacaagctgtaatttcagttcttacgactctttctttgagtgtttgtgaannnntgtaagtacaatatgttttgttttgcttgttgttgataaaaacctaccaacaaaaccttttgcctttatgaccaaaa

SEQ ID NO: 5594 - DNA, 676 bp, Macaca Fascicularis
  misc_feature (1)...(676): n = A,T,C or G
atggtgctaaggatctgcagcagttagcaacgagctggggctgggggcggcctccatgtccactgggattataggacactccagtggggatgggacctttcccctcctccatcagaggtgctctgacccaaggtcacatgggaaagtgccccacatgcaagtctccctgagggttctgcccctaaaggcaaactgcctcatgccagccagctgtgaggttcattactaccctcggccctactcgccctctcttcccccttgtgcagcagaccaccttgcccaggttgctgtggtgctagccttccccgtcatccaccaggcgatttctgggtcccagggaaagaaatagagnnnnnnnnnnnntttctacagtgaggagcaggtgtcccccgggccccacacccagatttctctgtctttactgttttgtggcctgggactgagtccacagggatagaattttccttgtagctttgaggcaagaattccaaggagtgtcaccatcagaggcnnnnnnnnnnnnnnnnnnagaagcccctagctgctctcgtggcctccttcccccactccctatcccttcacctgtgaaatgcctttgctttgcatatcgtgtgggtgtgtgtgtgtgtgtgtttgtgtgtatgtgtgtgctgatgtgtgtctaatgctctgtctc

SEQ ID NO: 5595 - DNA, 2013 bp, Macaca Fascicularis
  misc_feature (1)...(2013): n = A,T,C or G
ttcaactcatttccagaaagtattctgcattgatgcactctactgtgacagtcaatacctttacaatgaaaatttctgctggctctacatatatttgttcatgataatttggttactaatgctttattacacatattttcctttccttctgtcagacatagacatcatagggaagaatcagtgtcaaattttgcccttgaatctttttgtatattagtgcagggttataaacacaataaataatcagagcatgcttatccactaaatactggcaatctcccatgttctaaattcgttaaataataataagagagtatccattcttcactcccaggcatttactgagtaatctatatgtggagatgctgcaaataaggatagaagactgatgccaatattgtaagaaaagcagatgtgagcaaataatcacagatggtgtgggaagtagtggcataaataagggagtgaacaacacaattgcttttgcataagatgaggccttcaaacatactgaactgaattttgaatctgggttatagattacccggctgaacaagtgggccaggcagacgagtgcattccagaagatacgagatacaagcagcctagtgcagtagatgcagattcccagattgagtttggagatgcagaccaaaatttgtgctaatgatgggcttactcaaaaggtgccattgatgcattttaggcaggagatttacattttagcatgctacagaatgaaggagattggaggccactgtggatagagctaacaacactagttagaagagagttttatcacttccttgcatttttttatatgcagtcagtgtcaaacacagtacttttttagatagctaagaaaagttttatctttgccaagtactcttgctgtcgaaaaatgtttgtatcagttaatgaaatatgacaagcccttctatgaagtctattcgcagtgttttacaattttaaatatcaattatattggaagtttcaatttttatgatcgtatggaatggattctataacagaaattagtgtatatttcaacttcgacattattttctatgtaatctagggaaaaatcacataaagtgacttatgtgattttgattgcccacaaacaatcaaacagttgtgaagttcaaatgaaatgaagcatatggaggttatctgaaatatttaaatgggcatttttgtaatatttataaatatcatatttatgatgacatctttctgaaattagcacatctactaacaccattattgcatgtgtgtgaattgcctgatatgttctgcaagcaaatattgattctgctaaagaccactaggtgtcctctattggttgttactttaaggttctatcttctagaatgcccaactgttttctttgaaattattcatttacactctcctagaatcatctgtttgcttggctagttcatttcttgaaaaaaaaaaaaaaaaaaaaaaaaaagagatgactgtggatattcatatatgtaaaatgatttctaactatactttcttctccaattaaacagagttttaagttccttctctaaacaattattagtattgtgagataattgttttcagtattatgtactttttaatgtgatagcttaacagatatgctgaaattttaacatacaatgtagtgagttctatgtggaaatgaaatgttaagtcaaggcaactgctgnnnnnnnnnnnnnnnnnnnnnnnnnnnnnnnnnnnnnnnnnnnnnnnnnnnnnnnnnnnnnnnnnagtgattctcctgtctctactaaaaaatatatatgtatacacacacacacacacatatatnnnnnnnnnnnnnnnnnnnnnnnnnnnnnnnnnnnnnnnnnnnnnnnnnnnnnnnnnnnnnnnnnnnnnnnnnnnnnnnnnnnnnnnnnnnnnnnnnnnnnnnnnnnnnnnnnnnnnnnnnnnnnnnnnnnnnnnnnnnnnnnnnnnnnnaaaaaaaaaaaaaaaaaaaaaaaaaaaaaaaaa

SEQ ID NO: 5596 - DNA, 771 bp, Macaca Fascicularis
  misc_feature (1)...(771): n = A,T,C or G
annnnnnnnnnnacagggcatctcgggctgggctgggctgtgaggccttgcctnnnnnnnnnnnnnnnnnnggttcctgnnttctcactcactctttgcggctttgntgtggttggcagctgccgtactccaggcctgtggtggccactcagacaggggctgtggtgcgagccagtgcaggagagctgggtttgggattgtgccctctcctgtgtctgtcctccagacctgcccaggtctccaccatcaggaccccgtctttgggtttggaagaccaagtatggggaagagcaggcaccagcctctgcagcaatgggtccctctagcctgtggacaccagctgggtgtccaaggnnnnnnnnnnnnnnnnnnnnnnnnnnnnnnnnnnnnngccctctctccccagctcccctctgctgtgggttctgggctgtgatgtccccaccacttaaggatgtcttcacactgacttaaggnnnnnnnnnnnnnnnnnnnnncatggccacgtgttacgtgtacagaattttgtctacagcacaaattaagttatgtaaacacagtgactggtatttaatgctgatctactataaggtattctatatttatacgacttcagagacgcgtatgtaataaaggacgccctccctccagtgtccacatccagttcaccccagaggattgggcaagttgacatatttatttttgnnnnnnnnnnnnnnnnnnntgtccagaatcctgcttaaggttttggggtaccttcagtacttttgc

SEQ ID NO: 5597 - DNA, 736 bp, Macaca Fascicularis
  misc_feature (1)...(736): n = A,T,C or G
aacagaagatacatnnntatagtnnnttngataaactgttatttgaactgtaatcctaaaccaagtaacaactgaattttagaatatgcatgtggcaggagctaccatgtattccctaatattcatttttccccttttatagatttaccacctaattagctagggcatggcatcctggaataaagataacctttcccaaattttatcactgtatcttggtgtggccacatgaccgagtttgggccaatggannnnnnnnnnnnnnntatccttaaaaggaggaggcatgcccatcccttccccctttttcctgaaaggtagacacagtgcaggaactagagcagccatcttggactatgtggtaaaggcttcgttttgtgaatggcagataaatgaggtagatnnnnnnnnnnnnnnnnnnnnngtatagcatccctgaactgcttgtctgaatttttttttgagacagagcttttgctctnnnnnnnnnnnnnnnnnnnnnnnnnnnnnnnnnnnnnnnnnnnnnnnnnnnnnnnnnnnnnnnnnnnnnnnnnnnnnnnnnnnnnnnnnnnnnnnnnnnnnnnnnnnnnnnnnnnnnnnnnnnnnnnnnnnnnnnnnnnnnnnnnnnnnnnnnnnnnnnnnnnnnnnnnnnnnnnnnnnnttctgtctcctgacctcgtgatccacctgcctcggcctcgcgaagtactgggattacaggcgtgagccaccatgc

SEQ ID NO: 5598 - DNA, 927 bp, Macaca Fascicularis
  misc_feature (1)...(927): n = A,T,C or G
atatatacatatatnnnnnnnnnnnnnnattagttgaactggcatcctgttttagnnngagacttnnnnnnnnnnnnnnnnnnntacttggcaaacaaaccctttcatagttttgttctnnnnnnnnntggggtaggtgttgagcgagnnnnnnnnnnctcgatacttcagatgggcttttnnnnnnnnnnnnnnnnnnnnnnnnnnnnctgattttttgacaaatgaatttnnnnacactttcattnnnnnnnnnnnnnnnnnnnnnnncacattgaaaatgagctattgtacatatttttatattctctttataaatgcatgtctgattgtacttgtaacaatattgtaatgaacggctgtgcagtaggcccagcgctgctgtgtctcgtcagaggaatagcttaccacgaacccctcagcatactgggaacctcttcctgaacaaagaatgtaaatttggtcaagtctactcttccgttcattcaattattttaagcatttgaattatttattgtatatcctaaatatatttatcctttggcagtgactagatttccactaatgtgtcttaatctattcctccagctggcagttactgtttttttaatcccttgaagttgtcctgtaggagacagaaattctttgctgtctgtatcccttggagtaagaaggtagtggcatgggtggagtgtgtgttctttctccaaatctattatgatgttcattaaacacttctgtagcaaagatggtggtagttcttttgttactgaagttgcccttcaccacggctatttgaaaaggagatgtacttggacatttctgtaaatcttgagataaactgtttggagatttaaccacctctctgatgggggaccaactctatggaaattgtaaataagttttatttataannnntggcactgt

SEQ ID NO: 5599 - DNA, 2711 bp, Macaca Fascicularis
agtttacttcctgcgtcaccggacgctgttgatggaaaggcgcaccgtgagtggaggacgttcccactgcctgaagaatgattgtagccgcacttctgtgagattataaatattccacggagggtaacggaactacgggagaatggaagaagacagccaggaagactcaaaccttcctccaaaagtttggcattctgagatgacagtgtcagtgacaggcaaaccacctagtaccgtagaagaagacggactacctaaagaaacagacgtagaaaccatcccagaaatcctagaaacccgagagccactctcgcttccagatgtgctgaggatctcggcagttctggaggacaccacagaccagctctctattctaaactacatcatgcccattcagtacgaaggaagacagagcgtctgcgtgaaaagcagagaaatgaatctagaaggaaagaatctagacaaacttccagtggcttcaacagttacaaaaacacccagtccgttaataaccaaggaaagacccagcttgccagaaatcagacaaggaggccagttcgctgtggagttttgcaagactcaggatcttctcttcaaaaaacctgcaaggcagaccatcatgactacggagacactgaagaaaattcagattgataggcagtttttcagcgatgtgattgcagataccattgaggagctgcaagactcgggtacttacaacagtctcctgcaagctttgagcaaagagagggaaaacaaaatgcatttctatgacgtcattgccagggaggaaaaaggaagaaaacagataatatcacttcaaaaacagctaattaatgtcaaaaaagaatggcaatttgaagtccagagtcagaatgaatatattgctaacctcaaggaccaactgcaagagatgaaagcaaaatccaacttggagaatcgctacatgaaaaccaatactgagctgcagattgcccagacccagagaaagtgtaacagaacagaggaagtcttgctggaagagattgagaaactcaggatgaaaaccgaagaagaggcccggattcatatggacattgaaatgttccttagaaagcagcagcagaaacttgaggagaggctagagttctggatggagaaatatgataaggacacagaaatgaaacagaatgaactaaatgctctcaaagccacaaaggccagtgacttagcacaccttcaagacctggcaaagacgataagagagtgtgaacaggtcatcattgaagatcgtatagaaaaggagaagagcaagaataagatagaacaggatctcttggaattaaagagcgtcataaagctccaggcctggtggcggggcactatgatacggagagaaattggtggtttcaagatgcctaaagacaaagttgatagcaaggattcaaaaggaaaaggcaaaggcaaggataagaggagaggcaagaagaagtgaccaagttctcttctgtcttttcctctggtattctggaggtgggaaggacttgagagttaagaaacacctggtaccatcaaagatgactcatctacaggttgtttcctattgagactttcccagggaagcctgatttcactctgcctgttaatttcactctgcctgatttcactaggtctgataatttcattgggcctgttaattgctcttggcctgttaatttcactctgcctgatttcactaggcctgataatttcattgggcctgttaattgctcttggcctgttaatttcactctgcctgatttcactaggcctgataatttcattgggcctgttaattgctcttggcctgttaatttcactctgcctgttacctgggttttcaaaccctgatttaggattataccattgacttagggcttcctcatcttgctgggaagagtttctggtagtcctgtgaagattcattgtttctttttctcagtgaacaaagcagttcattggcttacagtgatgcatgaaaacttcagaaattcctgtaatgtctgattctgattttacccaatgtgtagtgaaaaaactcttatgagcaaaagtattcagtaggaattacaagatgatgatgttagctgtccagcataatatatacacagtaaagttttaacaaatgttggttcctgcctgccttttagatttatcatcactctggtgtttttattggggtgaaaatggcatggaacacataaccagttataagctgcttcagcaacttttctaggaaacagggacacaaattataaatacaagctagaaataggatgttaggatatacagctttacaaactgtaaagatgggacacaggttctctggaaggctggtttggatatatttttgacaagtgagacactagggccaatacctgctttgcttactcaacagcccccactttatggagtgttaagatgaaaagaaataaggtgtgtgaaaatacctaacctgtgcctggcaaataggaaagctgtcactctccctcttctagaaaaaaatgagtccaccagatcatgcttgccgtgatgagtcaaaacaatgccttgtgatgctaaaggtttccaagagaaaagttgtcctaatgtatcacatacatttcatgaattaagccttctatctacctaactccaaataaagcagtcttgatatctgtacttccttaagaaaatcaaaaaaaaaaaaaaaa

SEQ ID NO: 5600 - DNA, 730 bp, Macaca Fascicularis
  misc_feature (1)...(730): n = A,T,C or G
aacagagcatgcgcgcaccattccagcatccggcaacaatgcaccgttagtccagtgtccaacagagcatgcgcgcaccatcccagcatccggcaacaatgcaccggtagtccagtgtccaacagagcatgcgcgcacattctagtatccggcaacaatgcaccagcattccagtgtccaacagagcatgcgcgcaccattcctgtatccggcaacaatgcacnnnnnnnnnnnnnnncaacagagcatgcgcgcaccattccagcatccggcaacaatgcaccggtagtccagtgtccaacagagcatgcgcgcaccatcccagcatccggcaacaatgcaccggtagtccagtgtccaacagagcatgcgcgcacattctagtatccggcaacaatgcaccagcattccagtgtccaacagagcatgcgcgcaccattccagcatccggcaacaatgcaccagtagtccagtgtccaacagagcatgcgtgcaccattccagtatccagcaacatgtgtgtcccccaccatcccgttgtccagtggcacatgtgcgcctggacgttccagtgtggtgacctttcaggcacggagcaaggccaaagggataaaaaaatgaaggtgacacagtacttccccttatagctcccacaggtctggataggccagacagatctggaaataaataattcataataaaaaataattacagaataagaagtacaaca

SEQ ID NO: 5601 - DNA, 730 bp, Macaca Fascicularis
  misc_feature (1)...(730): n = A,T,C or G
taatagccaggtatccaannnnnnnnnnnagtgatgtattctnnngggttaccttttttagatttattgagttgctctgtaagcactaaaactttttaatcatttttaagaaactttttagattgtattacaaatttgccttaacagaaattagacattgaatataannnnnnnnnnnnnnnnnnnnnnnnnnnnnnnnnnnnnnnnnnnnnnnnnnnnnnnnnnnnnnnnnnnnnnnnnnnnnnnnnnnnnnnnnnnnnnnnnngttaggtagacagtcatttgggnnnnnnnnnnnnnnnnnnnnnnnnnntcagacctgttcaagtagtagagcttggagaatgccatgaaacacttatataattaatttgattgcatgaactaagcaatttactaatgaaaaggttgtatatgtgtaagtcagtttttttaaaaaccgagaaaaagttttaatagaggaaatcttattcattaatttatttttcnnnnnnnnnnnnnnnnnnnnnnnnnnnnnnnnnnnncagctgctaaacattgtgatctgttgacctataggannnnnnnnngggaaccactttactaggaaagagcagatcagcaccatttatgtaaaactggcttcaatatgtaagaaagaaaatgttatgtgttttcttctttagcttggttgtgggnnnnnnnnnnnnnnngaccatatcatgttcatctttgcatccctggcacagtg

SEQ ID NO: 5602 - DNA, 739 bp, Macaca Fascicularis
  misc_feature (1)...(739): n = A,T,C or G
aagcaacggccatnnnagtaggggactttcccacactgtgcctttttgatcagcgtgacagagtagaagctggagtgcctcaccacacagcccgtaaagagtgagaagtaattggaaagnnnnnnnnnnnnnnnnnnnnnnnnnnnnnnnnaatgccagagcaacgatacccnnnnnnnnnnnnnnncaccttgttgagatgtgtgtttgagagagagtgtgtttgtgcgtgtgttttgccatgaactgtggccccagcatatagtgtttcagtgggggagaagctgaaagaccaagactcttcccaagttagcttgtctccnnnnnnnnnnnnnnnnnnnnnnnnnnnnntagggatgaagactattgaaggctccattgcaaaaccatggcctttcctcagtgttgtaaggcctatgccaaggataaaggaagggtatgcctttgggnnnnnnnnnnnnncacctttctgaaatccttctccagccagctgctgcagacaaaagatcacnnnnnnnnnnnnnnnnggacttatttccagaccagcacccagtggcnnnnnnnnnnnnnnncccaaaggctgtgcttgcgtccagctgagtgcctgggacgggccctttctgtttccccaaggctggggtgctgagcctgccnnnnnnnnnnnnnnnnnnnnnnnnnnnnnnnnnnnnnnnnnnnnnnnnnnnngnnnnnnnngaggacagatnnnnnnnnnnnnntc

SEQ ID NO: 5603 - DNA, 735 bp, Macaca Fascicularis
  misc_feature (1)...(735): n = A,T,C or G
gttaaannnnnttatnnnnntatannncntgaactcaggaatagaaaatgatcgagannnnnnnnnnnnnnnnatnnnnnnnnnnnnnnnnntggggatatagaaccagaataagtacagtatatgctcagaagagaggtgacctcagtattagccttctagaaactaacatcactttaatttttacatgttccaaaaaaaacatgatagcgtttgttctgtaataagaatgtcaacatgatgcctgtagaaggtagaggttttcgtttctgtttnnnnnnnnnnnnnnnnnnnnnnngaggaatatcagacacaggctggtgacaactggcatagatacagtgagcacggaatgagaannnnnnnnnnnnnnnnnnnnnnntttttaagttcatatcaaaactgcttcacaagttcacaaacgttgtcactcttaatttgggttaagaaaagtattagtattatctctactgaagttgattgcttttctcttgtactgtgactgttggccaaaagcaagctgaacttctgcactttgaaacaaagcacagtatgaacctttaacccaaccacctagtttcaccactgagattctacatcannnnnnnnnnnnnnnacaaacttggtccaatgttggattcttcaaaagtgcatagcaaaacttttgtgctatgcagcttgatgtgacttttaaagatgttatcaaatgttaaatgcctcattctgtgttaattt

SEQ ID NO: 5604 - DNA, 713 bp, Macaca Fascicularis
ttagggtccaaaaggaaattgtggactgaatcactagccttaggtcttttcagcaaacagcctatcagggccatttatcatgtgtgagatttgcattttactttgctgactttgttgtaatagatcccattcattgtcccctttggggtatttccaatacttgaatggcagattggagtttttcagagtatttgtttatctgctagtctttctctccttcatagctttcctttccctggacttgctccttttgagttgcttttgagtttctcatgcctaggcaagtgtaatagaaattatgtagctccttctgttggcaaaggagctctatatagtttcactttgtataaaagttaggaccagctgttgttacatgtaatattttccttcagaacttgacctgaaggaagggaagaagagtgtgtgatttttaccttttttaacaaatgtgaaaaagtcagttttagaaatttcgtggtagtaagtttggcatttgttacatgtatagagagaagactaataatctctatttataactaaatcattgagatagaaaaagattcccattgactgtagacttcttcccattttgtcttcccttctgcctgtttccccttcaggtttggctccaggaaccaaagtgatttgttccttgttccaacctggactttacgactttggttagtgccctaccttcctcttctctcctttcc

SEQ ID NO: 5605 - DNA, 3077 bp, Macaca Fascicularis
gcgttctcagcccttgtttcatcgcctcaagaactacagatggcttccccaagcacctgaagtcggtgctgcttgcctggatcgaataagctgcaagctgcagaaactcttttgtcttttcacagtgaaactcagactccagtttctttctgccttgagagtgaaagaaagaagacacagagtaggaaagagccagaaggtggagaaattaatgtttaatgcttgatactccctgggcctggccagctgctcaaaaaaggaaggggtgataaaggaagaaagaaagtttgaaaggatggaagagggaaggaaagaggaagagataacaggaagcaatgagattaacaagctaaacagagaaggataacactcaagaagctgcctatatgtaagagattcctttgagaactttcaaatggctccttcctacaaaagacctgggaatacttaacctcccaccaccagcacactcaaagctcaaggcaaatgcattttcaagattgacagggtcttggactctgaaagtctttgacggagtctggctctgtcacccaggctggagagcagtggcgcagtctcggctcccgggttcatgccattcccctgcctcggcctcctgagtagctgggactgctggcacccgccaccacatccggatgggtaatcatatctccataacataggacgtgcccccttggatgcttcctccaaaactggccatcaagctccagataatcctcagtgagggataatgtcttctcaatattcgattcacccttctacagaggacacctagatggcccatcagtgggacataacagaggtgaaatcctgcctctgtctcctttggacctagctgaataccactttcaccaacacatagatgccctcctgccctgatagctagcaagaggccaaaattcacagaaccatgaccaccgcccctctgtcagcagaaagcagttacaggagactgacctttatgaatttccccaaagaattggagtcttgaactcttgacatgggaaatattacagtaggtagttagtcaagcatgagcagggcaggagagggctccgcctgatcgggaatgtcaggtgaccatgaggtgatgatcaggtggttcttaacagtctctctcaaataataactggtcacagccagtgccagggaaaggtagtctccctatagatagaaaatcctgaaactggtgatcagcagcttcccgataagatctcaggaattggacaagcaagttcaggcatatgcattacaggcaaaatagtgaagtttaactggtatatgacctaggagcattcagctggtaaggaaagaatgcgttaagtaagcatgtacacaactccagtaaacacagtgcatatgctcccatcccaagcactagcaggccactgtgtgtgcagacaccccacctgaagggaagatttaggggagaaaggatgcaagaccctgaaagtatgccaacatataaaaccctaagtcaaaagtcaaaccgcacacttcactttcaagttgcctgcttggccctctcccaggtgtacttttcttctttttgtttctgctcagaacttttgaaacttttacttctgatctaaaacttgcctcagtctctccttctgccttatgccccactgtccaattctttctgctgaggaggcaggaactgaggttgctgaagacccatacagattcgccggtggtaactcagttacctgccactggtaacaagttgatcaagcagaagaaagaaactgtaaacttaatgagaaggtatttaaaaatatacagtctgtaagaaaaaaaaaagaaaagatttaaagggaaaaaagcttatgagagttgtatgacatcatcaaaagacgaaattgatgcatcactggcatttaaaagacaataaagataaagggataaaaacttatttaaagaaattatagcagaaaactttccaaatctagagaaaggcataatatctaggtacaaaaagtaaataaaattctaatcacattcaatccaaagaaaactacccccatgacacactgtaaccacatttccaaagattaaagacaaagagaatcatgaaatcatcaagagaaaggagacaaaggatatgtaagagagtttcactatgtctagtaggagacttctcaggtgaaaccttacagcccaggagacagttgaatgatatattcaagatactgagggaaaaaaaataattgcataccagtaaacctgtgcccaatgaagctgtccttcagaaatgaagaagctataaagaaaaacaaaagctggagttcattagcaatgtatagatcatgcagatagaaaattcacaaagaaacactgaatttaaatagcagcctagacataatggacctgacagatacttatagaacacttcattctacagttgcataatatacattattttcaacttcatatggcacattcttcaaaatacatacgtaaggccacaaaacaagttttaacaaatttaagaagattgaaaatatacagtattttttctgactataatggtatgaaaggaaattaaattttgggacccccaaactcatttagccaaagggaaaagtcaagctgggaacggggccatgaaaacctgccttcccgttttgattcctaaacaagatcactagaagatgaaaggctacacgcctcctccatattttgcccacaagtaaattcccagtgagctgttaaaacttctccatgacaatgcaaattgatagcttatctttataggtgcagtcaccccctgcccgccagacacgaatgcatatctaattgttcccctaccccattttgtctgtgttatcatatgtaaaatgcagatttcccacatttttttctctgtccctttgtttatatgaaaactatgtgtttctcaatatcccacccttttcccctttaaatttggagtcctctaaatcatcttcggagaaaaaaacagacctgtctcccaggtgcgttcttaactttggcaaataaatctcctaaaatgaaaaaaaaaaaaaaaaaaaaaaaaaaaaaaaaaaaaaaaa

SEQ ID NO: 5606 - DNA, 739 bp, Macaca Fascicularis
  misc_feature (1)...(739): n = A,T,C or G
attttttgacnnnctgaaaattgttatacttcacctaaatggaagactgctgtgtttgtggaaattttgtaattttttttctttattttgttctctctccctttttattttgcctgcagaatcgttgagagactaataaggcttgatatttaattgatttgtttaatatatgttatataaatgtaaaagattgtataaactgtagagatagnnnnnnnnnnnnnnnnnnnnnnnncaaccttttacacaacatcattgtgtaatttgtaaagattcacatgtagttctttattatagtgattttgggcttttgtacccactgaatgccattttttgtgtttttaaattattttcttttatctttccttgttataaaaactgagatgtggtgtttttccctttttttcatttcatttatcattagaatgtctgaacttttatgtaacgtttttgtgtgcatctctcaatgctaacaccacatgtttgcgtatgacaagtttatagagtgaaaggtatcttctagattgaaataattcacaaatcggtgaatatcatcttggaacacaccctgtacagtcttccttaaaggaacactacagtatatttttagtatctacatgctgaatgactcagtacagacctaagcacagcagtggtcctggtacagtatttaagtgtcagcatacacaggcgtaatccctgtataaagtagtgccaaattgatttcaattgtgtaact

SEQ ID NO: 5607 - DNA, 726 bp, Macaca Fascicularis
  misc_feature (1)...(726): n = A,T,C or G
gcagcggggagcctgtgcaaggagaggcaggaaagggttctcnnngcggtaacccnactgcgcagcagatcataccgctgctttatggagatgcagaacctccaggagcacccaagcttgggcagcagcccttgcattccttttttgtaccagactgccgagaacgatgaggtgaagatcaccatcatctaaaagccggccactgtnnnnnnnnnnnnnnnaagtggggctggaggctctgcctctactgtgtccctaccaccccttcccagtcaaccctttacccttacagtagcaagcataagacccctgtctaatgtggagagatgggtggagatgaggtgaagatcaccataatctaaaaggccactaaataaaataaattttaaaaaggtatgggatttttaaaacatgtatgggattaaagaagttatgggatttaaaatgttatgggataaaagttatgnnnnnnnnnnnnnnnnnnnnnnnnnnnnnnnnnnnnnnnnnnnnnnnnnnnnnnnnnnnnnnnnnnnnnnnnnnnnnnnnnnnnnnnnnnnnnnnnnnnnnnnnnnnnnnnnnnnnnnnnnnnnnnnnnnnnnnnnnnnnnnnnnnnnnnnnnnnnnnnnnnnnnnnnnnnnnnnnnnnnnnnnnnnnnnnnnnnnnnnnnnnnnnnnnnnngggccaggggggcggaggttgcggtgagccaggattgtgctgttgcac

SEQ ID NO: 5608 - DNA, 728 bp, Macaca Fascicularis
  misc_feature (1)...(728): n = A,T,C or G
agcaaagtagggaacaccntttgagcatcnttggatttgacaaacggtgctgttgcaaacactctttttttttttttggagatgaagtctcgctgttgtcacctgggctggagtgcaatggcatgatctcgcctcactgcaatttccacctcctgggttccagcaattctcctgcctcagcctcccaagtagctgagattacaggtgcccgnnnnnnnnnnnnnnnnnnnnnnnnnnnnnnnnnnnnnnnnnnnnnnnnnnnnnnnnnnnnnnnnnnnnnnnnnnnnnnnnnnnnnnnnnnnnnnnnnnnnnnnnnnnnnnnnnnnnnnnnnnnnnnnnnnnnnnnnntgtgcccggcccgcaaacacattgtaattgacaacagtagggctcttgtacaaaatagtcatgatggccatggaagttttaccttattctgtgagaagtgttcttaaacttattaagtgtctaaactaaggtttagtgcttttttaaaggaaannnnnnnnnnnnnnnntactaaagaaagcaaaagttatttcaactgatccaccagtggaattagatgggtagagttaggttcttgagttttatcaccacttagttcccannnaattttgtaacttcctgtgtttgcatcctctgttcctattctgcccttgctctgtgtcatttcagtcatttgacttagaaagtgcccttcaaaaggaccctgttcactgctnnnc

SEQ ID NO: 5609 - DNA, 751 bp, Macaca Fascicularis
agtagtatttaccatgatgttaagggactttgatggtctgtgaattatcagttgctttctgcactacctcctgtggatagacctgactgatagcacttagaaaaagactgatagacgccaaatcagtcatttattaaccctataatattgttgtccccatcatttggtaaactgtaagagagcttagttttacattcacaaagtgtttatatttgataagtcttaaaaatgatttaagttgaaacctaacagaagtacttgttaattactcagttacccgcaaataatggaaataatggtgcagtcagttttatttgattgtgtaatgctttatactaggggtcccaaactcctgggtggcattagattctcacaggagcatgaaccccattgtgaactgcacatgcaagatctagattgtgcgctcatgagaatctaatacctgatgatctgaggtggaacagtttcatcctgaaaccatctcctccaacacctctctctgtggaaattggaacacctgtctgtggaaattgtcttccacgaaactcatccttattgccagaaaggttaggggaccactgctttatacagtgtttgaagcaggcacacttacagttactatttctggttctttatgactcttgaggggggcagaatctatgtttgattcacaataaaacttttcatgaatcattgagggttaactgttatcacttgccaatggaaactggatattgaaacattttaagaa

SEQ ID NO: 5610 - DNA, 749 bp, Macaca Fascicularis
  misc_feature (1)...(749): n = A,T,C or G
gagatggacgcagccatgggcnnnnnnatccggggccttccntgnnccctctcccgcctggcagctgggagttctggtttataggcctgccctatcaccaggcctcggagtggccaggcccttccacctccccatctgtagaacgaggcaactgcctggacagccttggggtccttagtgaccctgcagttcctctggcagctctgctgaccctaccctctcccggactgcccttctgtcccagaggggtcaccctgacccggcccaccttgcctctgggcttcggactccagccctgacagggcccagccacactggctctgcccctcgaaggggctatgagcaaggtaggagggagctggtctcctttcttcaggccccacccaggccctgggcaccccccacccctgtgagggccccaggccttaagtccctggcggggtcatgggttttcgacttgagcagagcggaggaacagggcactggaaggctgacgagctcagcatgcgactccgtgacggaccaggctcggcagggctggtgtactttttgtggttgtcattggtttgttgttgcacattccaggatgtcagtattttaacaggttctaagtgcctttctattgtagcttatgtttttcctcctcttggctccattgctgttagcatagagttttaaaaaaaagagataagctaatgactataacaatatattcctccatgggagaggaggttnnnaaagaaaaccaa

SEQ ID NO: 5611 - DNA, 101 bp, Macaca Fascicularis
  misc_feature (1)...(101): n = A,T,C or G
gtggatcctggacaacaactagatgttcctagacattttccttatggttccaagtgcaaaacaggtgtttttanntaaaatgtcaattagaaaattatctg

SEQ ID NO: 5612 - DNA, 735 bp, Macaca Fascicularis
  misc_feature (1)...(735): n = A,T,C or G
gaaacaagagtgannnnnnnnnnnnnntannnnnnnnnnnnnnnnnnnncagccaaagacagagtggaactaggaaaagtgggcttggagatggcaggagagcttnnnnnnnnnnnnnnnaatttagcnnnnnnnnnnnnnggatgattgaggtgggtctgcctcatctctgaaaattctggaaggaatggaggagtctcaacatgtgtttctgacacaggatctgtggtttgtactcaaagcccagaatcccnnnnnnnnnnnnnnnnnnnnnnnnnnnnnnnnnnnnnnnnnnnnnnnnnnnnnnnnnnncaattccaaatnnnnnnnnnnnnnngagaatattcgaaattctaaacatttttcttaggagcaagaagaaaatgtggccctaaagggggttaatcgaggggtgggggggtggagaggatcttnnnnnnnnnntctttttatttaaatgtgaattgcaactttttgacaatcaaagaaaagacttttgttgnnnnnnnnnnnnnntttctcaagtgtttgggggaaaaaaatcaaccctgcaatcactttttggaattgtcttgatttttctaaagnnnnnnntgtatcgaatatagttctgtgtagagaatgtcactgtagttttgagtgtgtacgtgtgtgggtnnnnnnnnnnnnatattttctttaggggtggaaaaggaaaacaagctgagaaaagtatctcaaagatgcatttttata

SEQ ID NO: 5613 - DNA, 74 bp, Macaca Fascicularis
gggagtgtgaggcgctgaagaagatctggggctcggcccaggggatggactccatgttaaagtacttgcagagg

SEQ ID NO: 5614 - DNA, 1894 bp, Macaca Fascicularis
actgagtgcttggcagctgtctgggcgagaggcacagcgatgggctccgtgctgagcagcgacagcggcaaatcggctcccccctctgccaccccgcgggccctggagcgcaggggggacccggagttgcccgtcacgtccttcgattgcgccgtgtgccttgaggtgttacaccagcctgtccggacccgctgtggccacgtattctgccgttcctgtattgctaccagtctaaagaacaacaaatggacctgtccttattgccgggcatatcttccttcagaaggagttccagcaactgatgtagccaaaagaatgaaatcagagtataagaactgcgctgagtgtgacaccctggtttgcctcggtgaaatgagggcacatattcggacttgtcagaagtacatagataagtatggaccactacaagaacttggggagacagcagcaaggtgtgtatgtcccttttgtcaaagggaactggatgaagacagcttgctggatcactgtattactcatcacagatcggaaaggaggcctgtgttctgtccactttgccgtttaatacccgatgagaatccaagcagcttcagtggcagtttaataagacatcttcaagttagtcacactttgttttatgatgatttcatagattttaatataattgaggaagctcttatccgaagagtcttagaccggtcacttcttgaatatgtgaatcagtcgaacgccacataattttattaaaacgaagggaaaagggaccactgaattgcaccatttaagatgctgcttgaacaaattgaagggaagttgtaaatgcttgatgggcaaaaatgtacaacacagttatatgtttgtccatgtttattgttatagtgcatttaaaaactgctttaattttgatgatttaaatctgttttacatccttgagattcctacacatctaacaaaaaaaaactgtctatatcagtcgttattatatggaaaaggcacatggtaggcaagtgggtggaggatctcggtttgcaaattagataacactctgtgtataatactacatattaataactaccatcatggttaggcacgataactaatctttgttctatgtaagaaaatagagagtgaaacaaaatgcagacattcaaagaaataagaaatctgctccaatgcccttgctctaatctctaatagattaacattaataatcttgtacgggagttggaaaggaacattttggaagtcaaggaagtccatttaggccagatgcagtggctcacgcttgtaatcccagcactttgggaggctgaagcgggcggatcgggaggtcaggagttcgagactagcctggccaacactggtatctgtgaaaccccgtctctactaaaaatacaaaaattagctgagtgtggtggtgggcgcctataatctcagctacttgggaggctgaggcagaagaatcgctagaacccaggaggcagaggttacagtgagccaagatcacaccagtacactccagcctgggtgacagagctagactccatctcaaaaaaaaaaaaaaaaaatccatttaaccaaattacattacataatactgtaacaaaataagttttgtgttagaaaagtgtacttaattctttgactttttgtaactgcatacataagaattcaacatttttcaaatatttgtagtttattttgaaatatttctacaatataggcaatttcttaaaaaccgtcaggtgatacttacagtagaagtattcacatccaaactttttagtagaaaaccctaagggttttgatttcttttttgattgtaacattttaaaaattatgaaataaaagtactgaaaaccagacacaaaaaaaaaaaaaaaaaaaaaaaaaa

SEQ ID NO: 5615 - DNA, 824 bp, Macaca Fascicularis
  misc_feature (1)...(824): n = A,T,C or G
tgaccagagctgagaccacccnnnttttaagctgtgcatggggcaggcagggggactccagtaggttctgtgaacattgccttgggatgggagttgttatcttgggagaaggaactggaacctcctttcccccaaagacgaagtctgcccttgggtgtagtggtgagggctgccctttgagactgaagatggtcagttccatgattctgcctgtggttcccagatatagccacaagggggcactgaagatggctctcaggcataggccacacagctgcttaggcttgctttccacattttctacatctctccagctcctacccaggctagaagctagggtgtttcacagataaagatatcttttaggtcaaattggcttatcccgttgttcaaatctcctgtttctttgttggtcttccgcgtagttgttctatccattattcagagcagggtattgaattctgtagctgttgttactgatttatgtctccctccagttctgtcagttcttcatgtgttttgggactctgccattagctgcatgcatgtttataacatgtttatattatgtcttcctgatgaatccaccccttatcattataaaatgctgctctttgtagtaagagtttctgtcccaaagtttactgtgtataactctattggtacagccaccccactctcttttgttcctgtttgcatggaatgtcttttctatcctttccctttcaacttatttgtgtctttgaatataaagtgtgtcatagacataatagtgttggatgttttttatatccacatttctactctttgccatatgattgttt

SEQ ID NO: 5616 - DNA, 1651 bp, Macaca Fascicularis
gagtacttccggtctccagtgctgggcgccgtggcccggagctgtgggctgggagatgctgctgaagccacatagccgtgtccaagtattcgagggtgcggaggacaacctcccggaccgcgatgcactgcgggctgcgttggccatccggcaactggctgagggactcacagctgatgacctgctgctcgtgctgatctcaggtggggggtcagctctgctgcctgcccccatcccacctgtcacactggaggagaagcagacactcaccagactgctggcagcccgtggagccaccatccaggagttgaacaccattcggaaggccctgtcccagctcaagggtggggggctggctcaggccgcctaccctgcgcaggtggtgagcctcatcctgtcagatgtggtgggggaccctgtggaggtgattgccagtggccccactgtggccagttcccacagtgtgcaagattgcctgcatatcctcaatcgatacggcctccgtgcagccctgccacgttctgtgaagactgtgctgtctcgggccgactctgacccccatgggccacgcacctgtggccatgtcctgaatgtgatcattggctccaatgtgctggcactagctgaggcccagcggcaggctgaggcactgggctaccaggctgtggtgctgagtgcagccatgcagggtgatgtaaaaagtatggcccagttctacgggctgctggcccatgtggctagaacccgcctcaccccatccacggctggggcttctgtggaggaagatgcgcagctccatgagctggcagctgagcttcagatcccagacctgcagctggaggaggctctggagaccatggcacggggaaggggcccagtctgcctgctggctggtggtgagcccacagtgcagctgcagggctctggcaggggtggccggaaccaggaactggccctgcgtgttggagcagagttgagaaggtggccgctggggcaaatagatgtgctgtttttgagcggtggcactgatgggcaggatgggcccacagaggctgctggggcctgggtcacacctgagcttgccagccaggctgcagctgagggcctggacatggccaccttcctagcccacaatgactcacatacctttttctgccgcctccagggtggggcacacctgctgcacacagggatgacaggtaccaatgtcatggacacccacctcttgttcctgcggcctcggtgatggcataggtcacattttgagagttcagaggaggcctacaagggcaaggtcagatggcagagcaaggttggtcctcagggcctcactaagccttagggcccctcctctccttggccttggctgtttggttagctgtcacctcccactcagggcctctgctctatgtctattcccttccagccagactagcagatggggcctcccccctacccctactttttgcatggcagcaggtacccctgaggacaaggacaagccccttggccagttcagtgttcccatgcttctcccttgggcagcctctctcttgagcccctcaccctgtttctttctgtgaagcgagaacgtctgaaaataaataggaccatgacatgggaaaaaaaaaaaaaaaaaaaaaaaaaaaaa

SEQ ID NO: 5617 - DNA, 183 bp, Macaca Fascicularis
tcaagaccagcttcagcaggatgttctggatggacaaggaaaaagaggaaagaatgaaagaaaccttgcagataagaaggttaggcgagccagaggatagtgctggcatagtgtctttcgtgtgattcgaagatgccagctacatcaatggggagacagtggttgtgggtggaggaaccccta

SEQ ID NO: 5618 - DNA, 722 bp, Macaca Fascicularis
  misc_feature (1)...(722): n = A,T,C or G
acagtacacaaaaacctcaaaacaacaaaactgcagcccccaggcactccttcaaaacctcctnnnnnnnnnnnnnnnnnatnnnnnnnnnnnnnnnnnnnnnnnnnnnnnnnnnnnnnnnccaggattcctcctaagccttgtcctgtctgtgcgggaccccactggaagtcagactatccaactcagannnnnnnnnnnnnnnnnnnnnnnnnnnnnnnnnnccaaggctgtctggctgactccttcccaggtctcnnnnnnnnnnnnnnnnnnnnnnnnnnnnnnnnnnnnnnnnnnaaagcacccnnnnnnnnnnnngacgccgagctttgggtaactcttnnnnnnnnnnnnnnnnnnnnnnnnnnnnnnnngagcccaaactaagccatcataacctctgtgacctgcacgtatacatccagatnnnnnnnnnnnnnnnaaaaatcacaaaagnnnnnnnnnnnnnnnnnnnnnnnnnnnnnnnnnnnnnnnnnnnnnnnnnnnnnnnnnnnnnnnnnnnnnaactaatgaatcaaccttgtgacattcctgcccnnnnnnnnnagtctcaggagctccccaccaagcactttgtgacccctnnnnnnnnnnnnnnnagataaccacctttaactgtaattttccactacctacccaaatcctgtaaaacttccccaccccatctccctttgctgactcaacccactgcatccaag

SEQ ID NO: 5619 - DNA, 858 bp, Macaca Fascicularis
agctcctccacctgccggcccctggacacctctgtcatcatgtggttcctggttctgtgcctcgccctgtccctgggggggactggtcgtgcgcccccgattcagtcccggattgtgggaggctgggagtgttcccagccctggcaggcggctctgtaccatttcagcactttccagtgtgggggcatcctggtgcatccccagtgggtgctcacagccgctcattgcatcagcgacaattaccagctctggctgggtcgccacaacttgtttgatgacgaagacacagcccagtttgttcatgtcagtgagagcttcccacaccctggcttcaacatgagcctcctgaagaaccacacccgccaagcagatgattacagccacgacctcatgctgctccgcctgacgcagcctgccgagatcacagacgctgtgcaggtcgtggagttgcccacccaggaacccgaagtcgggagcacctgtttggcctccggctggggcagcatcgaaccagagaatttctcatttccagatgatctccagtgtgtagacctcgaaatcctgcccaatgatgagtgcgccaaagcccatacccagaaggtgacagagttcatgctgtgtgccggacacctggaaggtggcaaagacacctgtgtgggtgattcagggggcccgctgacgtgtgatggtgtgctccaaggtgtcacatcatggggctacatcccttgtggcagccccaataagcctgctgtcttcgtcaaagtgctgtcatatgtgaagtggatcgaggacaccatagcggagaactcctgaatgcccagccccgtcccctacccccagtaaaatcgaatgtgcatc

SEQ ID NO: 5620 - DNA, 697 bp, Macaca Fascicularis
  misc_feature (1)...(697): n = A,T,C or G
tcccagataaagatggcacagctaaggcttcccaagcaggaagggggtgaagaccaatcccttcnnnnnnnnnnnnnnnnnnnnnnnnnnaggtggaagacatggctggtncnnnnagccctgtggannnngtcaatcgccatcatacctcgagtgaggcccagctagataannnnnnnnnnnnnnnggcacacgtggaaagtgttgatctnnnnnnnnncnnnnnnnnnnnnnnncttgaagcatcccgttcttccgtgctgtcccaagaagtgtctnnnnnnnnnnnnnnnnnnnnntctacactgtacaattcactagggcatcctgagagcctcaccagccttctggttcatgcctttgacaagcatttgtgtgccctctctgcttactgtgacagtcnnnnnnnnnnnnnnnnnnnnnnnnttctgctgtgggtaactgcgtgcggtgtcttgccttgctttcccttctcactgtcccacagcttggtttcatgttacaaacagaaaagctcgaggctcccaccccgccacatcccgacttcatttccccctcactgtagcccatttccaccccaccacaaagttgccacagaaggttttctttgtatagaatatttattttgaagctctattttaatagtatttattttagaaagtctactattgtaagagttcttctgtttgtgaagaaa

SEQ ID NO: 5621 - DNA, 1312 bp, Macaca Fascicularis
tttctgagtcagatacccctggaaagcactgactgccctggcacagcctcccccctggagggccacagagaaggttaggaaggtcccaaagtctttgtttttttaaataaatacaaccagggaagggttggtcattgggaactttaaacctttcctaaagctactccctttttcatcccaaaccacccagtgacgttcaaggaccccagaccacacgatttaaaacagctttcctctttactagtcgagggcccctgccccaagacttccggaaggtatccaacttatggattgtgcagtcgtgcacagtgcctgagggtccccagggaaactgcggatcagcagattagaacccactgtggctgtggcaggaccgtggtctgaggctggccgcagtgaccccacactctgcttggcagatcacccaagggcagttcgatgagcgttatgtgctgtcttctcgggtgcgcaccggccgcagcatccgtgggctgagcctgccgcccgcctgcacccgggcagagcggagggaggtggagaacgtggccatcaccgccctggagggcctcaagggggacctggctggccgctactacaagctgtccgagatgacggagcaggatcagcagcggctcatcgatgcataattatgataagacatttctcatctggataaatgaggaggaccacaccagggtaatctcaatggaaaaaggaggcaatatgaaacgagtatttgagcgattctgtcgtggactaaaagaagtagaacggttaatccaagaacgaggctgggagttcatgtggaatgagcgcctaggatacattttgacctgtccttcaaaccttggaacaggactacgagctggtgtccacgttaggatcccaaagctcagcaaggacccacgcttttctaagatcctggaaaacctaagactccagaagcgtggcacaggtggtgtggacactgccgcagtcgcagatgtgtacgacatttccaacatagatagaattggtcgatcagaggttgagcttgttcagatagtcatcgatggagtcaattacctggtggattgtgaaaagaagttggagagaggccaagatattaaggtgccaccccctctgcctcagtttggcaaaaagtgaactttccctttcccagtttataaataatctgtctgctggtacgacagacataaagaaatctctactctgagagtttttgtacacttggaaaaatgtaaaattgtagatcctgcctatctttacaataaaactctccttaataaaaaaaaaaaaaaaaaaaaaaaaa

SEQ ID NO: 5622 - DNA, 1254 bp, Macaca Fascicularis
  misc_feature (1)...(1254): n = A,T,C or G
ggacagcaaactgacacggttgaatgatagcatatcactctgtnnnntcctagatccgagcgagctgtcagttctcannnccaccatgtatatacatgagctaactcttttaagttgtcacaaaagcgcatctccggtttccagcccctgccgcatgacttttcctgaaggcttgcttttccctcgcctttcctgaaggtcgcactagagcgagtcacatggagcgttctaactttgcattttagtttttccagtgaactgaagctttaagtctcatccagcattctaattnnnnnnnnnnnnnnngtaacttttgaagtagatgtattacctggttctgccatccttaagtcgtaactctgcggtacaggtaattcagaatgtactacggtacttccctcccacaccatacgataaagcaagacattttatgatgataccagagtcactatgtggtcctccccgaaataacacattcgaaatccatgcagcgcagtatatttttctaagttttggaaagcaggttttttcctttaaaaaattatagacacagttcactaaattgttgatttagtcaaaattcctagactgaaagaacctaaacaaaaaaaatattttaaagatataaatatatgctgtatatgttatgtaatttattttaggctataatacatttcctattttcgcattttcaataaaatgtctctaatacaatacggtgattgcttgtggnnnnnnnnnacctgcagttgaaacgtattgtatcaatgaacattgtaccttatttgcagcagttttataacgtccnnnnnnnnnnnnnnnntgtaaggctcagtaaatgacagaactatttttcattatgggtaactggggaataaacgggtcactggaataggaatagaagtgtaagctggaagggcaaaaatgagaaagaaaaaggtaggccctttgtgtctaccgttttcagtgctgtgtgatcatactgttcctcatagcgaaaaagaatgcaagggcatgaagttagccgtgggcatgccagggttgcattcacattcctgggtacccagtgccgacggggtgtgcccacatggggacatgtccttggtgnnnnnnnnnnnnnnnnnnnnnnnnnnnnnnnnnnnnnnnnnnnnnnnnnnnnnnnnagttgcatagctgctttgcagtggtttcagaggcagatctgagaagataaaactcannnnnnnnnntttttttaaaggacatactagaaat

SEQ ID NO: 5623 - DNA, 2015 bp, Macaca Fascicularis
cattcaatccgcgccttctgcagccgccactgcagccgcgcggcgggggctccctccttgcagccagctggcggtccagcctggtgcctccgcgaaggaaaggtgcgcgtgtgaagacgcgttccagttgggatcggcgaggatctctcgggcgccgctcactccttggtcgccttgcttgccagcagttgctcccttagtccttggcttgctcgcacaccccctccctctacagggagcagttttgggtggcgtgggctccgtcctcttcttggctggtgggaacagtgtgcccaagaggggaagcctagtgggcccggcccctcccagccccgcgccaatgagtgccagggcgccgaaggagctgaggctggcgttgccgccgtgtctcctcaaccggacctttgcttcccccaacgccagcggcagcggcaacacgggtgcccgcggcccaggcgcaggtggcagcggcacctgcatcacgcaggtgggacagcagcttttccagtccttctcctccacgctggtgctgattgtcctggttaccctcatcttctgcctcatcgtgctgtccctctccactttccacatccacaagcgtaggatgaagaagcggaagatgcagagggctcaggaggaatatgagcgggatcactgcagcggcagccgcggtggcgggggtctgccccgacctggcaggcaggccccaacccacacaaaggaaacccggctggagaggcagccccgggactctcccttctgtgccccttccaacgcctcgtcgtcctcctcttcgtcccctggcctcctgtgccagggtccctgtgctcctccgcctccaccgccagcctccagtccccaaggagcacacgcagcttcctcctgtttggacacagctggcgagggccttttgcaaacggtggtactgtcctgatcgtctagcccctctcgttccccgtccttgtttccatcatctttgccatccttgcttttttcctccttccttccttttccattttcctctggctcctcttttcctcttcctggtttccttacctgccctccccttactcttgtttctcctccgccgaggcactgtgcggtatttgtaaatattgggcgaggaaagtctcggaagaagaaataaccctgataatactttattaatatttatagtaattattataatactaataacacaatccaagcgcatgacaaatcacataatttctcattgtcaatgaaggatgcatcttcccactccaatccgcgctcccctcaattaggaggagaaaccgcacaagctaccaaatatataaaaggcattgattcccgaagcaaagggaggggagggggcccggtaatgtacatagctgtcaagttaaggtttagtttccttccttcccctctgacccctaagctttcactttttctttagcttccctctcctccccattcccaccctcagccgggctcaggcaatagtatattataaagaaaacgtctacattaagcaccaggactgcaagagggcatagagaatagtccccagaaagtgtttatgacaggtacccctcgccagtcagcccatttctcaccctttgtttaactattacctattaccttttccaggacagaacctttaatttactttttaaaatgaccctcgctggccgagcataagtacgttaaaatctttaaatgagttttttaaaaaagctaacgctttcactccctgccccgcccccacccatacacctttgacctgtgacattttcaggatttacagaggatctgggagctgtccagccaggtctggtgctgaagtcgcctcaccgttctgattacttcctctagttgtgaaggcagaggaggggctgttttggaaaatgactattctggcttttggttgggttctttcttctttttctacaatcgagttagcgtgtactattggttttcttattattaaacattgcataagttaccttttttgtaaaaaaaaaaaaaaaaaa

SEQ ID NO: 5624 - DNA, 773 bp, Macaca Fascicularis
  misc_feature (1)...(773): n = A,T,C or G
agaaaaatcactacaaagagaattgtcgagaacggtcaagaaagagtagaagttgaagaagacggccagttaaagtccttaacaataaatggtaaggnnnnnnnnnnnnnnnnggataacaagtaattcaacgcacgcgcttaacagaaatgttaaactataacaagcaccatttgaggattaacaggaacatttttttgaagatttcaaacgaactcgactttcagtataattgtacctaaagtatttataaacagctcatcggagcctctatttgtcatagacttttgagtttattgttgggaccacataataggaccattttttttttgtctttaaaattgttgtaaatctctgtatgcactttgcttttttattaaacgtactccaaggtgagtcttgactctttagtgtaggacaagattgtacactaacaccagcatggacctgcttttcattgtgtctgaaatgtgagccacgtagtgtcggcctgctgtgaagttaacattaccaggacgattcttctacagaaataatttcaatttttttcagtatttagtagtgaaagatattaatgcattaatggtaatacatttctggtttaatataaattaaggatgttttctagttgtgcatgaatgctggcaacttagtaagttttgacaattgtttaaatatgtaatgttaagcttaggtttaaaaaagtaaagctggtaaactgggtctttgtcatttgctttaaaaaaaaaaaaagaaaataaatgcgaatgtgt

SEQ ID NO: 5625 - DNA, 505 bp, Macaca Fascicularis
  misc_feature (1)...(505): n = A,T,C or G
gtgngagttggctccagcacagtgncccaggcaacagnaaannagantttgaggggaggagcggtgnnnnnnnnnnnnnnnnnnnntggcttgggttgcacagtgaannngaagccccgcccctcccagcctccctgggagacaaagccccgcccctgtctggctccctgggagatgaggccccaccctctctgccttcctggaggtgaggcccctccctttttatactccttgggagatgagaccccaccgcttgccttccggagacatgaagcccctcccccctgaggtgagtaggcagtcacctgctgatgagggggaggtgatgggggtctgaggagtagagaggtgtcgtcagagtcccacccaggaaagcagctgggatcataagtacccgcctgggtggcgttcatnnnnnnnnnnnnnnnnngctcatgtgtgttctgctcatttagtacaagcgagagggggcctcgcgtacccagctcgagtgtaggtatgggcc

SEQ ID NO: 5626 - DNA, 671 bp, Macaca Fascicularis
  misc_feature (1)...(671): n = A,T,C or G
tcttcaagaannncntgtagttaaatttannncagtcagatacttttggaattaatgtccttttactgagacctgatggcttttatatatttcagggtaaatttctgaagttttattttcttgttttaaaactgtttaaatgtgtttggtaattattggaaatttttcacttcttaattatgttctgtgtattgcattgatcctgaattgtatagttaatagtgattttttcaagatggggcatgctcaagatcgaggtgataataaaatacatgcacatggaatactaattgtagcttttgtttcttctggaacatttcagttcttcaccctctaacttcttccatatatcagtattcccacttgcatagaagtgctgaattgaagaactgggtgttacataaataggctaagtgtttggatgacttgttcaaggtgacaaaattttaattctagctttctgactcctagtacaccacatgtacctttaaaaaagaatttttttttaaattgtaatttgagtctccctaatttgaaatctgaaatactaagttagatttaaatcatatatgcatgcatatactagaggagaataataaaaaataaattgtgtatgcattggctgggcatggtggctcacacttgtaatcccaacactttgagagttaaga

SEQ ID NO: 5627 - DNA, 570 bp, Macaca Fascicularis
  misc_feature (1)...(570): n = A,T,C or G
annnnttggatctgctataaacaagtgaggtttcactggaaaagtgtgtgacagtttgtacatctaatattttcagagagacctgggttagaattcctactctataatctaatggtatgcagttgtgcaagtcacttgatttctcagattgtcagtctnnnnnnnnnnnnnnntctttgtgaaaattaaatgggatcatatgtgcaaaatttctggtatataataagagagggaaatgattattacatgataatctaatatagggagatattgaaatccctttgcaaccctagaggtataggattatatttccatattctttaataagtgtagtttgttgtcacactttaacatttttgaaattaagaaatttgcttgagccaagtaaaggaggaaactgtgaaccaatgatcattaattgcccaggtatgtacttagaacttagaccttagctagtaagcttcgttatatccaattgtcacctgaagggagatctttatgcatagctgatgtttattcaacacttattatgtacaaggaactgtcctaagaatcttgcatattttctta

SEQ ID NO: 5628 - DNA, 2345 bp, Macaca Fascicularis
  misc_feature (1)...(2345): n = A,T,C or G
acaaaacccgccaggccggtgcgggagctgcggagcatcccctgcggtcctcgccgagacccccgcgcggattcgccggtccgtcccgcgagcgcgacagagctgtcctcgcacccggagggcagcaggggccccggggccctctcgcctccagagagaaatttcgtcatctgtgcaactttcttaaagcaaactaagaccagagggagaattatccttgacctttgaagaccaaaactaaactgaaatttaaaatgttctttgggggaaaagggagcttgacctacactttggtaataatttgcttcctgacactaaggctggctgctagtcagaattgcctcaacaagagtctagaagatgttgtcattgacatccagtcatctctttctaagggaatcagaggcaatgagcccatatatacttcaactcaagaagactgcattaattcttgctgttcaacaaaaatcatatcaggggacaaagcatgtaacttcatgatcttcgacactcgaaaaatagccagacgacccaactgctacctatttttctgtcccaatgaggaagcctgtccactgaaaccagcaaaaggacttaggagttacaggataattagagattttccatctttgaccagaaatttgccaagccaagagttaccccaggaggactctctcttacctggccagttttcacaagcagtcactcctctagcccgtcatcacatagtttattcaaagcccaccgatatctcatggagagagacacttcctcagaagtttggatcctcagatcacttggagaaactatttaatatggacaaagcaagtgcccagctccttgtttataaagaaaaaggccattctcagagttcacagatttcctctgatcaagaaatagctcatctgctgcctgaaaatgtgagtgtgttcccagctacagtggcagttgcctctccacataccacctcggctactccaaagcccgccatccgtctacccaccaatgcttcagtgacaccttctgggacttcccagccacagctggccaccacatctccgcctgtaaccactgtcacttctcagcctcccacgaccctcatttctacaggttttacacgggctgtggctacactccaagcaatggctacaacagcagttctgactaccacctttcaggcacctacggacttgaaaggcagcctagaaacgataccgtttacagaaatctccaacctcactttgaacacagggaatgtgtataaccctactgcactttctatgtcaaatgtgaagtcttccgctacgaataaaactgcttcctgggaaggtagggaggccagtccaggtcgttcctcccagggcaacgttccagaaaatcagtatggccttccatttgaaaagtggcttcttatcggatccctgctctttggtgtcctgttcctggtgataggcctcgtcctcctgggcagaatcctctcggaatcactccgcaggaaacgttactcaagactggattatttgatcaatgggatctatgtggacatctaaggatggaactcagtgtctcttcattcatttagtaaccagaagcccaaatgcagtgagtttctgctgacttgctggtcttagcaggaggttgtactttgaagacaggaaaatgcccccatctgctttcctttttcatttttttgtttttgtttttgttttttttttctgagatannnnnnnnnnnnnnnnnnnnnnnnnnnnnnnnnnnnnnnnnnnnnnnnnnnnnnnnnnnnnnnnnnnnnnnnnnnnnnnnnnnnnnnnnnnnnnnnnnnnnnnnnnnnnnnnnnnnnnnnnnnnnnnnnnnnnnnnnnnnnnnnnnnnnnnnnnnnnnnnnnnnnnnnnnnnnnnnnnnnnggtcaggctgatctcaaactcctgacctagtgatccgcccacgttggcctcccaaagtgctggaattacaggcatgagtcaccacacccagcccccttctgctttatgtttggtttttgaggaggagtgaagtgggaaccaaatcaggtaatttgggggtaatctgtctttaaaatattctctgaaaacaaagctctacctaaaaatttgattggcttttatgcaaagaaacagtttaggacagctaggttccaattaattcacattcttggttccagataaaatcaactgtttatatcaatttctaatggatttgcttttctctttatatgaattccaataaaacttattccagaggtagttccttccaattaaatatttgaaaaaaaaaaaaaaaaaaaaaaaaaaaaaaaaaaaaaaaaaaaaaaaaaaaaaaaaaaa

SEQ ID NO: 5629 - DNA, 700 bp, Macaca Fascicularis
  misc_feature (1)...(700): n = A,T,C or G
gcaacagatgtgaatacttcacaaagctgtaaagaccattgncntaaatactgcaacaacttaacacccttttgtgaagatcatagcatttatctaagaaactttgaggctttctggtttacatatatcttacaggtttttttttttttttagtttgaaatgtgtaagctttgatttaaaccaagtttacttcagtatgttaatgatgtagtaaaaatatttattgaaaggcgaattagagtattttaaatacctgccatttttttttcttaaagcatattctttgcatctaactnnnnnnnnnnnnnnnnnnnnttattttttaaatcgttgtacatttcttattaaactaagtgcttaattttaaagtattatgttgccatcatatagtgtataaaaatgtataattgccaattgattgttaactattatttatttttaaatgaaagtgtaagaatgctttctgattcaacaaatttgttatcaaactgtttccttatcctcttttctgatgtagcataaaaattgttccggtttgagttataactgccagtagatgaccagtcacaagtgaaccacttttcagtnnnnnnnnnnnnnnnnnnnnnnnnnnnnnnnnnnnnnnnnnnntttttgtatctaatctctgattattaaaatgtttataaagtttatttttaccaaagagatgcaattcatt

SEQ ID NO: 5630 - DNA, 2074 bp, Macaca Fascicularis
tttggcagtctctctgggatcatttcttaagtcaactaggtatattattaaaatcttgtttttagggttaccttatgacaagtgtaacagtaaccccaatcttagagactataacatgattaaagaaaattatgaagctccagttatacaatggggataaaatatgaattatatacccagagtgcaattgagttgtaggtgttgaatctttggaaaataccctctagcttctggaatgaccctgatggatgggtataaatttgggaagatggacatgatattaatctgacccagagctgacacattttcaactccagtttggaaagagaaggctgataatgagactttgggccattacctgtgtggcatatctagtgaaaagaatctacagtgtgcgtttggaagtgaagatttagctttcttcccagtggaggaatgccagaaactgtatttccagtactgggaatttgctacttaggataacagaattccttttttgactggcccagtatctgtatgagtttggaataatcttatccttacatgtttgatatgattcatcagtgaagttatcaggggctagagttctgtttgtggaaaaattttgaaatttgaatttaatttctttaatattcatattttctatttcttcttgtttcagttttggtaatttgtgcctttcaaggaatttgtccattccatctaaatgttgaatttattggtataaagttattgacagtattcccttgatatccttttaatggctacaaaagccataatcacatgtcctcttttgttcttaatattgttaatttatatcttttgttcattgctttagctaggggtttataatttttattgatcatttaaaggagcaacttttggttttactaattttctctatttgcttattttctattgcattgatttttgcagttatccttatttctttccttctactttgagtttaatttgcttttcttctagcttttttaaggtagaagtttatattagtaattttagaccttttttctctccaagcactgttttagctgcatttcacaagttgtgatgtgttttcatgaacgtgtagttcaaaatagtgttagatttcccttgtaatttaattttgatctatgacttttctagacatgtgttaattttcaaacatttggggagttttcagttatcttttgactattgattttttaaatttattgtggttagagaatttgctctgtattttcaatcctaaatgttttatggcccaaaattatggtttatcttggtaaatgatccttgtatatttgaaaataatgtacattctgctattttgggtaatattattctacaaatgataggtcaaattggttgacagcgtttttcaagtcttctgtatacttgttgattttttttttttttttggtctttgtccttcaacaagcgagagatgattgttgaaatctccaaatataattatagttttttgtttctctttttaggcctatcaggtttgcttcatgtattttgaagctgtataattatatgcaaatatgctaaggattatgatgtatttttaatgacataattctttcatcattatgaaatctccatctttattgctgataatattccttgtcctaaagtttaaagagcattgaggtttgttttggtaggcagttgagttactattgggtcaacttgatcctttggcagcttgtttgtttttaatgtttgttagggtgggtgtaaagtagtctttatttaaggacagcggttgtcaactttcagtctcatgaccccctgaaactctaaaaacttactgaggactccgaagaattcttgcttatgttgattgtattaacacttaccgtatcagaaattaaaactgagaaagttttacaagatttacttattagttcctttttaaatgacaataataaacccatttcatgttcagctctcccttaactatgttctttcttattagttttcatttccttctaaccacaaataaacatataaaatcttgacctaaaaaaaaaaaaaaaaaaaaaaaaaaaaaaaaaaaaaa

SEQ ID NO: 5631 - DNA, 663 bp, Macaca Fascicularis
  misc_feature (1)...(663): n = A,T,C or G
attgtgaataacaccaactgttcttaaactctttaattccatgtcttaaatgccgnnnnnnnnnnnnnnngacaaaaatgaaaagtaggatgaaaataatagaatggcactgtaagtgtttattattttgtcaaaatgtaatcaaagactacataacccaatgatggaggtaaaaagggcatgtatctcattcagatgtgccttttgtttatgcagaatatgatgtctttagctaatgaattgcctattgttatggaaaacagttaatatgccatgtatgtacagttttgtttatattgtatatttaaagatactgctaatctatataaatttaagtgacttgaggcctataatacaatctgctactttactaattcataaattcaaaaaaaattctatggcataggaaccaactgccttgccttcaacacctagtaactttctctataaatctcgtgttaactgaaatttttttaaaatatattttttagactggtaatatttaaaccagcaaatacttaaagctttattaaatgttttaatcagataagtgagtaaaacttttatttgccatttggatgcctttgttcaaagtgataaagagtgttttgctgatagtnnnnnnnnnnnnnnngtaaagtagccaaaagccacgttgtttat

SEQ ID NO: 5632 - DNA, 2603 bp, Macaca Fascicularis
gcatccgcatcagctggcgccgggataccgcacctgcgacctccttctccctcagcccgctgctcaggccagcttgcggggccgtctcctctgctgggacccgaaggaagaacggcgagggggtgacctgcgccggggcgggggttggggagaacgcgcctccggcaaagggggtggcccgtcctgtcacacgcaggagaaacctagcgagcggaccgtggctcagtggactagctacgacttgccacgactctgagctgcagtccgaggtgtcttgatccgctaacctcctcccagaccccgaggacatttctgctaggagaagagcgggcgcgccaccgccaccgacctctcggagacaggaatccgctctgcccctgcatcctactctgctcgcccttctctcagtagtgtgggttatttttcccgttatgcatgcgcacctttcccaccagacccaagtggattgtagacatcaaaaacaccgggtggctttgcatacacctcccctcagccagacctgtggggtattcacctgatacacaacaggtggccgggtgtacacctttttgcaatctgatccacgctgtagtcgcctgataaaggttggcctgcacgcacttcgctcaactagaaccgtgggacactcaccagataaaggactacctcgacgggaacctgggggctgaggggagggaggcttcctctgctgccctgagaccatggcactgagccttcagccccggaccagaggggatagctaggtagctcttcattctgaaggaaagaaatcacacaagattggcattgttttgtctttttgttttttgtttttttctctcttaaaatacaaattcacctatcggtgatgcactttctaggacagtcggcttgaattctgagtagaaggattcttagttggggttttttgtgcggtgtgaatcaaggttattgaaatgtgttatttttcaagttatcttttgtattattgcagtcaacagtagctaacgtaagaggaagattttgcgaggttccccccacttttttggttcttgaaacgaacaaaatgcatcctccagaaaccaccaccaagatggcttcagttcggttcatggtgacaccgacaaagatcgatgacattccaggtttgtcagacaccagtccggacctcagctctcgatctagttcccgagtaagatttagctcccgggaaagtgtgcctgaaacaagccgtagtgagcctatgagtgagatgtctggggccaccacttcgctggcaactgttgcactggatccacccagtgaccggacttctcacccccaggatgtcaccgaggacccgagtcagaactccatcacaggggaacacagccaactgttagacgatggacataaaaaagctcgaaacgcttatctcaataattccaattatgaagaaggagatgcatgacagtgatatatcagcatatacttatgagcgcactttaatgatggagcagaggtcccagatgctccggcacatgcggctctccaaaacagagcgggacagagaggcacagttggtgaaagaccgaaactcaatgctacgattgaccagcattggctctgatgaggatgaagagacagaaacctatcaggagaaggtgcacatgacttggacaaaagataagtacatggcatcccggggacaaaaagccaagtcaatggaaggattccaggacctgcttaacatgcgtccggaccagtccaatgtgaggcggatgcatacagcagtgaaactcaacgaggttatagttaacaagtcccatgaagcaaagctggttttattgaatatgccagggccaccccgaaaccctgagggtgatgaaaactacatggagttcctagaggtgcttaccgagggactagagcgagtcctacttgtccggggtggtggcagtgaagtgatcaccatttattcataacctactctgaatgactgtgcttggcctgttttcttaaaaggcctacatcctccatggaagtgccagctcattactaccactcctactcaactagaagcctatgttctgtacacatcatactgaactcttgatgagctgagcctcaagtacctgtgtaaaagagctcccatctgatctgcagtccttacagaaaaagcaaatattccctcaactcagaacaatgttcaagtcttatgagccacgtctgagcaatcaaaggcaaattagaattaacaagctgagccaataaatgaattggtaaaagggataccagaaattcaactgaagaaaaaaagcaagtcaagtaaatattcagcattaaagatgaatctcagaagttgtggtccaatgatgacaccgtggggataacaactagagacagcttcaccttactaaagaatttatggtcaagtatatttagacctattatccttggcaagccaagatgcaaacattttttagctatatttctttagtatactcactgctctaactttatattaggataccaacttgaaacatggctgtagcctctacttcttcgaaaacattcccccaaaataccagatttaagtatcaaaaaaaaaaaaaaaaaaaaaa

SEQ ID NO: 5633 - DNA, 2984 bp, Macaca Fascicularis
ttaatgcttgcccttgagctcatttgaagtcaactttttaacttttaatagtctttaggcaatagtgagcaagatatttcatcgagagaaaaataaaatgagaaaaagtaagatttgtatataataaaaatttggtccatttacacatgtggaatctgtaaccatcactatcataatttgctccaaggaagaaaatatcatttagtaatttctacaatgagccctcctatttttgcccacagggatcattcataacagcagagataatttatcaaagaagtggttgtgagactttcatcagaagggagcttctacagaggctgcaggaagaacatagtctataaagcaagaacctgaatgtattttctaattctgccattcattggctgagtagccttgaaaaatgacttaacttctttaagctttacttgttacttttgtaaaatgtgattatttatgacactcactggcatagatgctattgctatcgtgtccagataccttttacctggctctgcccctgccacctgtaagggttggacgctaatggttaacaaccatcctttcttcacataatggcctggcacacaggagccagctcacccaaaatgcctgaaaggtcacatctgtggctccccgtgacagacacacagccaataactgactaacgtagaggcacaaaagcctggctcctttttctagatgtaggacaactctgtgatgctattcacactccagagtttcctgtgggattaggctgaagcaaacttcagccaaaatcacatctttgtttggcttcttcccttaggatgtcttgattccttcacttgctctgtgtctctcctcagagccctacctcaataagtcacttgcacaaaattcccatcttatgcttttaggaaactggacctcagataacatgctctaccatatgagacatttgtgaggatcaaagagatgatatatgctgaaccacattaaaaatgacaaaattacatagaaaaacatgttattggaaggcaattgctagcttttataatttttgtttttatatgcctttacttaatttttcagatttctagcatgaaagtaatgaagaacgttctgatttaatagaaaccttatcaaggtttgcaaacaaaatattactaaatatctgaaattagtttttcaagagatttttcacaagtgtgctggaaagcaaaatatgtggctacaatgtctataaactatcattatccttctcagttgcccacacattatcataattactgttatcataaacataacagcggcagtgagttgtagtagaaggaacacagcccaaaagcacattttaaaaccaccttctcttgtacttgacctgtatgtattgctgtattctagaccaagacacactctggcttacagcccctggataaagaaagaaagatcatattttatgtagaaagaccagtacgtaattataaatgaggaacttaagcctcaaaaaattatcagttttcaagggacatttcttggttgtctaggttccggggcagatgctgaggttgactcaattctcttctacgaggaactaacatgcttatgagggataatggattctcaattcattaattacaataaaatatgaaaagtcgaattgaagatgtaaaagattttaccatgaaagcaatatggcaataagttgctatatatcacacagacatttagtggctatagtgggttgaatggtgtcctccaaaaatgtatgtccacctggaacctcagaatatgaccttgtctggagatctagtcttcgcagatgtcattagttaagctggaatgaacccatcctggattaggttcggccctaaatccaatgactgatgcccttataaggagaggagaggagagggaacacagatagggatatggggcagtgatggatgcagagattggatgcatctacatacaagggaatgccaggtttgtcagtgacccccagaagctgggagaaaaggatgagacagattctcttcggagcctccagaaggaaccaactttgtcaacactttcgtttgagacatctgggctccataaatttgacagcatcaatttatcttgttttaagttactcagtttgtggcaatttgttgtggcagcttaaaaaaacaaatacagtaaaaaaacaaatacagtgactccattctccctcctaggatatcaggcacccttctcattttggcgaactctactaaaactgggcctttgctcaaatgtatattttcaagaaattcttctctgatcctcccagatcttggttcagcatctctcctctggattcctatacaagtactttgtatgcatccacacttgtatatttccccatctgtaaaactttgtatgttgatcttaattgttcttcatcaaatccttggtgcctaccaagatcctggcacatggtaaatgctcaatagttatttataaaataaatgactggcataatcagagctgggctaaaagtttcctgattcccatggcgttgttttccctaaaactttcctttttatatacatctttatgcgtgtcctatttacttattagtaagaggttgttgatgatgcaagttgccaggaaattcaccactaagacccagttaaaattaagagactttaatcaagtcacttctgctgatacctgggccagatgcttccctaagagaggcagcagatctggcccttacataacaccagttaccacgccaaaccttctgaacctttcccaatcaatattcaggagaggtgagtcaaaagacaaaggaagagtcacagtaatttgattcttggatttatagggaacacagtattcatggtacagtgagatttttctcctctcttgcaggggcaaagagtccttccctccaaagccaagccaagaaagaaaaggctccatgaactttagtcaaagaaactaaaggtgctttccaaaaaaaaaaaaaaaaa

SEQ ID NO: 5634 - DNA, 777 bp, Macaca Fascicularis
ccagcagaggaagtatcagcacttaaaaattctagacccccaaaaaactacaaagtcagaaaaagtatttttatgtttctagcttgaggagaagggttttagggctaaccagaggtccgaccctggaatgccaaggaactgagactgggcttcgatgaaaaccttccttttcagattccctgtctgctcaattaattaaagatgtttgaatccaaaggaagtaaaggacaaaaaagtgtggaaaggaagagaactgattcctactgaaaattcaaattctattaccattctaacgttcataaaaagttgagatcaagaagcagttgatttcctgccagggcttatattagggggtgattcttaaaggacattaggattggtgctcagaaatggttaatcatgctgtgtgctaaccagggtcagctggtaccttctttgccatgagcattcaagggacagctaacctttattgacaatttatattgtgaaagtcaggaaagatcgtgagctgcttggattaaagacctggcacttcagttactcagcacgcctccacgtcactcaacttaagagagttcattgacagtgttaggatgtgaaggctggaaaacatttattttgcttcaagagttccatttggctctcccaaataggtacctcaaaaactgttagcaagtggcatttggatgtcttggcaagaccttttgcagggatttttagggttttttccaccttgtccacattaatgattggcatgattgtgctgcaggccaagaa

SEQ ID NO: 5635 - DNA, 768 bp, Macaca Fascicularis
  misc_feature (1)...(768): n = A,T,C or G
cccagagagccccaccaaagctacttcaagcttaacaatgcttaacccatgagctccaggtgccttttggatctttgcaacactgaagatttggaagaagctattaaannnnnnnnnnnnnnnnnnnnnnnntttatattttgaaaggattattttgtaaggagtaacttttaatactatagtttcacctgtattctagtaaatgttgagacaccgttttgcttttaagtatccctatttcttaagttaagttactaagatgaatacctttcacgtcttgatctttaattgactacagtcatgtctttcaaagtcattctcagtattcagcttttgtaaagtatcaagcttcaaaaagtgttgttgttgttgttgttgttttttaaacatgcgtattctaaaaatgactattggtggggaggtgtaaataagtcataccttcttaaaacagaaaattttagtaaagtcttttaaatgaaacctgtaaaagtattgattcttctaccaagttggtatgatattccaggcagctcaatgattatcacatttgagatccnnnnnnnnnnnnnnnnnnnnnnnnnntacagcaacagaggtacctcttggtgtatagtatttacattctcttttaggtagaagaggcaattttacccttatttaacatggttagaaatttaaagcaagatcatttacccaaggataggtgtttggtaatgttggaggagttagtctggcttcatgttttacatcttcaactaaaatcccata

SEQ ID NO: 5636 - DNA, 2632 bp, Macaca Fascicularis
gagtatctggcccggagggaaatccctcagctttttgagagccttttgaatggactgatgtgttctaagcctgaagacccagtagaatacttggaaagttgtttacagaaagtcaaggaactgggtggctgtgacaaggtgaaatgggatacatttgtaagccaggaaaagaagaccttacctccgctaaatggaggacagtcacggagatcctttctaagaaatgtaatgcctgaaaattcaaactttccatatcggcggtatgaccggctccctccaatccatcaattctccatagaaagtgacacggatctctctgagactgcagagttgattgaggagtatgaggtttttgatcctaccagacctcgaccaaaaatcattcttgttataggtggtccaggaagcggaaagggtattcagagtttgaaaattgcagaacgatatggattccaatacatttctgtgggagaattattaagaaagaagatccacagtaccagcagcaataggaaatggagtcttattgccaagataattacaactggagaactggccccgcaggaaacaacaattacagagataaaacaaaaattgatgcaaatacctgatgaagagggcattgttattgatggatttccaagagatgttgcccaggctctatcttttgaggaccaaatctgtacccccgacttggtggtattcctggcttgtgctaatcagagactcaaagaaagattactgaagcgtgcagaacagcagggccgaccagacgacaacgtaaaagctacccaaaggagactaatgaacttcaagcagaacgctgctccattggttaaatacttccaggaaaaggggctcatcgtgacatttgatgccgaccgtgatgaggatgaggtgttctatgacatcagcatggcagttgacaacaagttgtttccaaacaaggaggctgcagcaggttcaagtgaccttgatccttcgatgatattggacacaggagagatcattgatacagaatctgattatgaagatcagggtgatgaccagttaaatgtatttggagaggacaccatgggaggtttcatggaagatttgagaaagtgtaaaattattttcatgattggtggtcctggctctggcaaaggcacacagtgtgaaaagctggtggaaaaatatggatttacacatctctcgactggcgagctcctgcgtaaggaactggcatcagaatctgaaagaagcaaattgatcagagacattatggaacaccagaggacgtttttcttcaactctgcacagctattgactctattttctgaaggcgaaaatgcatgtttgttagagtggaaatagaaaaacattaaaaagttcattccttaacacaatgtttcaagttaaaccttttgtgctccctgcccccactcccccaccccctaaatcctgacagcactgtttgcttcccagctagacctgtgtgagaggtatctggaaatcatgcatggtgtatttgggactatcaacctcttctccacacttcagacaactgtctgcactcacagcacacacactttgtatcatgcaggccacactcagagctagtcagtacataaacagtggtgcagtaccagtctgtgcctgttgtgattacaggccttgctagaccctgatcatctggttctcctctcattaagcatccctaactcccagtcacatcttcctctccccaagatttacatactgttccccagtggaggcccctggcacaggggacagccctggccatcttcctttggtgtctggctgtttcgtcaactctcatcttctggtggctcagagccataaggtgagttgattacacaatgccttgtacatgatatagaggcatcaagcaaaatttgacagaaattttaaaatatgaaattgtatagcttttccaagatggtaaaacccacgttagtcatcagtaacattctctattatttttaagaactttggaatactgtcattatggctaagggaacaaatctgataaattgtgtaacctagtctcttctctacatggtgatgcatttcagcaattataaattaatatcaatgaccaaaagtaatttaaaagcatgagatatttgcaatttcattcattgggcacatatcaaagtataattttgattttaaatggtcacccatttatttgtttccaagcaagtaaaaaataccgtaacaaacctgatgtgggtaggaggggcatgtcagtaagtggtgtgttcaatcttgtgtttgtttcatatgggccctttccagaagtttgcaaaccttgtcatacccatatgcaaaattgtgtttccttgcattaaaccagtgaagtttgggttttcttttgtgctatcagttgtaaaatcagagcttcttatatattctactggaataactgcatcttccactcagtcactacaaaaaaacatagtttcagtttgcatgatttttttttcttcaatggttgtgcagataaggatccatttctgggatagaattgtattttttaagtctctttttttcttgaaatggatatgtacaaataaaataaatggaagacaggaaaaaaaaaaaaaaaaaaaaaaaaaaaaaaaaa

SEQ ID NO: 5637 - DNA, 2407 bp, Macaca Fascicularis
gtcgctctctggcccccgcacgacgggcgcagaaatctgggccccagcgctgcgctgagagacccccggacgcttcgccagccccccagggaggccttcacggagtaggggcgtcgcgggtgggggcgctcgctgtgtcccttcagctccagactgcgtgaagctcccgcaggccccagctcccaggggttttgtcctaaaaaagggtcatggactgggtggattgcgggcggcttggcgctttttctgcatacggatttcgtcccaaaattgctaacatcagaaccacagtttttcagaaaagcaaatgtttatttgccaagacctgtttggcaggtgtgaatgttttagggaagaaatgccgagaaaatgctggcattttgcgttgcggttttttgtttttttaaattaataaataggttactggcttattttgcttctccagaatattttcatttttgatatagtcatgtggttttaatttccttccagattctgcgttcgaatgtggcaaaagcttaaaagaatcgttatctcttaatcgtagcggttttgattatcttttttcctgcgtcatatttttctttctttttaaatcacagctttacgtttttaagtgtctccatctggtacattgattgagtcaacaaatatttattaagtgtctaatatgtgccaggcatagttgctagggatgcagcagcaaacaacgcagaaattttggccttcttggaaacgggcagtaagcagaatgatatcctgagagaagatgggaaagggctgcaaggttgtggtttgtggattgctatctgtggggaaaactgcaattttggagcagctcctttatggaaatcatactattggaatggaagattgcgaaacaatggaagatgtgtacatggcttcagtggaaacagaccgaggagtaaaagaacagttacatctttatgacaccagaggtctacaggaaggcgtggagctgccaaagcattatttttcatttgctgatggctttgttcttgtgtacagtgtgaataaccttgaatcctttcaaagagtggagcttctgaagaaggaaattgataagttcaaagacaaaaaagaggtagcaattgttgtattaggaaacaaaatcgacctttctgagcagagacaagtggacgctgaagtggcacagcagtgggcaaaaagtgagaaagtgagactgtgggaggtgactgttacagatcggaaaactctgattgaaccattcactttattagccagtaaactttctcaaccccagagcaaatcaagctttcctttgcctgggaggaaaaacaaaggtaactctagttctgagaactaaaaatcagtaatttcacaattgtatgttgaatagcgactgcctttaagtgtctgtgaacatggagtaatatcactatttaaaataggccgtttgtatctacctttggtccttaggaaaattcccaaggaagtcatttaatgcactttagatgttaaaagtatttgggctaaggttattattgcctgttatgaaataatatattcttattctcattgtttgaaacctgtctttgaaattagcacctttgttatttatgttgtacttgtgaaaacagtaaaataaagtttggacagttatgcaaatgcacctatgtgtaacttccccctatccccaagctgtttcagaagataccataaatcattctgttacattatgcaaacttctaagctcagacatgactttgtttttaaaaagttcatttatctaacgtctaggattatagaacactttttatgtctaaattggacccaaaacattgaacagtttggggtagtaagctaaatttcatcttgtggagattttgctaaacagactaagacccatgatttagggtcaaattagaatgtttagcatgatttgaggtgccaggtagtgtaaagtaggttcatcacactctaaggccgttttttcttcagccagatccctgttggtagaccagatacttgagggcaaactgtttgctcctcctctggaaaatgattaggcacttaaggacagtaaagccgtattttctggaaggaagactgtatcttctggaatagtcttctagaaaactagtcatatacaatgaaagtatcaaaaatactgggctctagatggcctaacttagatgtatgaatttgtgttgtttctctaaagattttggcaagacttgagcaatgtggctgattgtaactttattaatttaaaaggaagtaagcaagctagtggtttcatctgtgaaataactattttgattgaaatgtaaaataagctattcagcaaagaacatattaaaacatcaagtaatttgtaacatcttaaaaaaaaaaaaaaaaaaaaaaaaaaaaaaaaaaaaaa

SEQ ID NO: 5638 - DNA, 122 bp, Macaca Fascicularis
tcacgcgtctcccttgtgagttcaagagagtttggcatatcttctcgcaaaggcatatgaaagtgtgtgcgtgcccgtcagcataatgtgaggagggggagagacagcccacccccgtgtct

SEQ ID NO: 5639 - DNA, 670 bp, Macaca Fascicularis
caagtgatctgcctgcctcagattaatagttttctacccaactttgtatttcaggaaactaaattgccgggttttttttctccctggattctaagacaatagagtatggttttttgtttgtttgtttttttaaccttcctaggttgttctgtaaactaaaaagatgagggagggtcagtagaaatcattttgggaacagggcacatctaatttaaaactgtgtcagattttgagtttcccttaactgtgagatgagggaaaggaccccagaggtgtattatatttaacttagggttcttcaatatggatgatggagctaaaaaggcctttgcatttatgtaaattgtgctacaaaagtggcttcccttgacagtaacatggaaaaaagagaactagataattcagtgtagtgttattctaagtaagaacctgtgtgccttagggaattttggacccaatataaacaaaatatgaccaaaacgaacaaacaaaaccagtagaaatctccctagcagaaattggtatctagaaaatggttttaagaaacatcagttaactgttaaaagtttaaggtaatggaaaaaaaaaaaggaaagggaaggaagaaatatcaggcctgcacaatataatcccaacactttgagagacttgaggccaggagttcatgacc

SEQ ID NO: 5640 - DNA, 1660 bp, Macaca Fascicularis
tttcaaggttccagcagtgttagcttacattttacaaggtctcccaaagtgaaatgtagtggtctttacttagtgacagactaatttacaactatgtaattattttaagtttgtaattaaaatttcttctgaattattaatggctttactgacatgatgttgttaaagcctctcatcttgctgttaagtattgtagtgagaaaatcagctgacctggaaaccatggggattggttctaatgagccataaatgcttcccctcttccttcagcactagtagactactagctttaggcatttaaccaagcgaattagagacagaaaatattaaaatacagccatcctatatcagatgatgaactcatttccagactaactacccaagaaagcaagttaaacactgtaatacaaagcctaaaccagggcaagttggggttagcttttaaaatgcctgccttgaaaaacatgttctgtgatttttttttttctttaaagttgtggaaatttgattcagaaaaatagcttaataggtttgtatagagcacgggagaaggggttgtgtgcgtaaatgtatgatgattattttaagtgtgtgcttcagcagtgagaacaaacagatgaagatacgtgatactgactaaacaggtaaaaatattttctagtctcagttcctctagtcaatgcctgaagtattagaaaaagtactaaaacaattcccaaagcatcaggaatttctatttctactcaaagtattgtttgttttcttccaacagttctgttaaataaaaggaaaagtctctgcttgcttataaagttttatttagagagatatttaatgtcacaggttaatgtgtgtagaaaccttctgtaaccttgtttaaaaatctaccaagcctcacctcaaacaacgttctccttaaacttatcctttttgtgcaaagctactgcttcctgatgtccataactcaaggcagttttgttgttgttgttgtttttggcttggtgtgattctgaaacgtgattatttaatgtttgccaagatgtttggaatagagtaactttcaactgatcaactgattgtgactttcttcttttgtagtttttggttttaaaaatgctttctgtcaaacccatctataattcccccagaatatattcgtatggactaaggcttaccaaaaataaggaacattggagaaactgccaccgccaggaggagccaaggggacatgatgactaaaagtaatctggtttcatggaggggctacctagaaaaaagacattaaagaaagactaaggaaacctgaataaagtatgagctgtcatcaataatagtgtaacaaattcattgtaacaaatgccccatactcaggtaggatgtgaataatcagggaaactgaatgtgggacatatgggaactcccctgtcttcagaatttttctgtaaatatagaactgttctaaaacaataaagactattaaaaaaataataaagactattaggaaaaaaaaaaaaaaaaaaggctgggctcatgcttgtaatcccaagactttgggaggccaaggcaggaagatcacttgagggcaggaatttgaccagcctgggcaacatagtaagacctcaactctaccaaaaaaaaaaaaaaaaaaaaaaaaaaaaaa

SEQ ID NO: 5641 - DNA, 2550 bp, Macaca Fascicularis
tgtgtgtgtgtgtgtgtgtgtgatgggaaaggtaattgaggcaagtcagcgcctgcagagaaggcacggcggatgcagggggcccatgtgagtgtccgtgagaggtgggagaccatggtgtgctatgattgctgagtgtccttgctttgacaaagcctaccaccttctttcccatctcctgtcccttccacacctgctcctgagcatcactgactggtggcagaatggccctgctggagggagagctcaggccctccagggattcctggatgctgaggtttgccaggttcagctcttgttttcctctgagatggccctcatatccaaaaatgttccatcctgtctcccttaggagagaaagagttttggggatgcaagagaggctggggtgggaatgttgagaccatgtgtccatttgaattagggggacaggaggctacaggaagaggaattccaatttagttggaaaacttgacctcaggagaatttttgggtgcatggatgagcctcagagggagggcagctggtaacctcggaggcttggatgcgggagagaatatggtggttatcaaatccaccccaccccatttcacaggtgagaaaacaagatggagggaatgaccctcctaataggagctggtgcaggccccaaatggagggtatgaggttgacctttgacaaaagatgacactgcctttatcgtgctcttggaattcgcaaccactgacagcccaaaagaacaaagaatgccaggcctgggaggaggcagggggctgggcgtgtccagaaacacaggcaggagtgtgggaatggtctttctccagcctcatgcccatcctggcccttgagtgtagcgggctccagggtcagtcaagccaggcatttggggtcttgggccacagtggcttcccatcccggtaactacatgtaaatgggctcactcactcactggcaggcgaggtccagccctaccccatcttggcccaatgctaaatagattgccctggccttatatgtagctacgtaggtcctgctcccccgcatcagtgctgtgctgagggctgcagcctgtgccactgtgggcccacgtctttggcggtgttgtgtcagcctggggcgtctcgtgtgtgccctgcccgccgttctctgccctagtgatagaaagatgtagatggaagagtcagcgcatcagaggaggaggctctgaggctgtggagctgggctcagggaagacagggggaggatgcagaaggagccaggacattgctgcctctgcctgggctgcagccacactaagctgagcgatgaggtcctttcctggagggatggagaatcccatccagatccctgtcctggcccctggggcttctgtggtgtgggtggaatgagcagagtgccacctctgtctggtatgacctggagaggaggcttcctctcaggggtgagaaggcattgaactagaagactctagaaatccctcatagaagcactcagctccctcggggactccaagggaagcttgttactgagaaggacagtggaggcagaatcgtgtctcccactatgttaagtgtgtcctctgctgccaaggaccctcgtctacaccttagaccaccagccccagctgttccctgtcagcatacccacctccaccacctctcccaaccatgacttccaagcagggccacagggtggggtcacagggtcacttcacctgacccaggcctctccccaggtcaggaggcagctgtctggtcagaaggattccctttgtggcatctgactttctcctcagcaggtcccaccaccctctcggcagcacttcgccatggccaaggctggccgtgtcctccctgcctccttccttgtccgaggtggctgctggcccagagagggtgtataaatcttcaggccagtggaggtagattggccttttatccacaggatacggaaactgaaatctggggaatccccaaacagcagccatagactcactggccttcattaaacgggagaggaatcacagaaactggggaagggaaagcagaccttcaaatgagaaatttcactttaatgacaccattcatcattcattttttaattaggaaaagctccctaatgaggctgttttgccagctaataggactcccgatttccatgagcaccattcttgcccagaggattagaagagccattgctcaccaagccgggatcttcccccagcgtccaatttaatttgcaaatacgtaatgcagattccctgggtgccgtgaaagcccttcctggcatcattcatattgcttcccgtgctggctggaaagcacggttctcctctgccttaaaaacagtgcccaacagtgaactgcccctccgaggacttgagtaagtggaaaaaacaaaacacaaactgcaatgtttgtttctaagtatttttgtattgtgtacattctgtatatttttgttgtaacatattatttgagcacagattccattaaagatttttttttttccaaaaaaaaaaaaaaaaaaaaaaaaaaaaaaaaggccaca

SEQ ID NO: 5642 - DNA, 727 bp, Macaca Fascicularis
  misc_feature (1)...(727): n = A,T,C or G
tgtatgaaaaagnnngcatctcaaatcactgggaaacaatggatttttaataaatagcattagaacaactagatagatatttggaggggatggaaagtataattggatccattcctcacaccatacttcaaaataaacctcaaatggatcacagatctaaatgcaaaaacattaaaccatacaagcactggaataaagaaaaagtaaagagatttgcttctttaaaaatagttaatgagcacccatgttcataacaacactaaccacaatagccggggatggaagaaccccagcatccatcaccagccagcatacttgtcctaaaccttgtgaaagaaaatagactctcaggacccaaacctcactattccaaagggaaagttaagcttgggaactgacccacggtaaaaaaaataaataaataaaaaataaaaataaataaaaaataaactgctttctnnnnnnnnnnnnnnnnctataattcataatcctgtggcatcacctcatttcctctacttgcttttccacatgtttactttatcttgtgtaagatgtagatttaatgaggctaattagaacctcacaagaacataaccatctgcctcatgtcctactctcccatttttaccttcctgcttgccctttcccctttaaatactgaagttcctaaaaccctttaggcaaaagcacaggtcatagatgctcctgtggcttatatttttccccc

SEQ ID NO: 5643 - DNA, 698 bp, Macaca Fascicularis
agactgaagaggaaggagcgggtgggagagaccagccgctaacatggtgtctgcttctccatggaccagaggagaagggatgagtagaaaatgcagaggcaggatggtctcccagcaacaagagtgtccagagttctcctgaccctgtctgtgcccagttccacggaaggcagaggcatcacggttttccatcccaggccaccctgccaagtgtcaggcctctttaaatctgcatccctctgggttagaagcaagagaggtggcaaagcctccctggcactgagagcctgttccaacgtgccactcggcatgagatggtggaggaagaagccaagagcagagatgccttcctgttcccgaggcctctcaggactccacaagatgctgtggaccaagacgggagatctcaggatggggccactggccttcctaggttgggctctgggtccttttaataaactgttcctttcctggttcttactcccttttggtccttccgctcccttccctctgccaggtatggaaaaggtggctgggctgggtgtgcgctccaaccccggtagcattagctgagtcacgcggcgagcacacaacagatttgtagcagctcatctgccatataaaccgcttggctgatggtgtcctcattgagttgtttcattaccatgtaaagtggaatcatgtctttcacctttact

SEQ ID NO: 5644 - DNA, 724 bp, Macaca Fascicularis
tttaaagtgtgtagtaatatgcatgttatcgtccttcttccattcttaccagtatgtgcccatttgcaaaacaaaaatgctaataatcagtaatagtcctataaaagatgttaactctgtttagtcattgactgatcttgctctaaccttaaaattttgtgattattgacctctgttgcatttattctaaagccccccaaaaattatctagccgtttcgaatatcaacattaccctggtgtattcactgctgtatgcattattgttctttgttgctgttttatgccttcatattagcaaatatgaaattctgtgaaaaaaaaccctttgatcttaaaaaacaaaaaaaaaccaccccccccttctgtagcaggaaacaaattgcttgttcttgagaactttcccatcaagaatttagtagaagcaggtatacttctatcattttgatgtttttgttaatgtttccaaacaatgtactttgaaatcagaatcacttcttatcgttttcatatacttctgatgctcttcatcacattagtgatcagaaatgaggtgtaattccccaacccctgcccgcaagagctaagtaggatcttactgtaagttgaagggagttttgccctaactcatggattgtgcaagaatgaactgctgttgggtttgactgactgtcgatggattgtggtgtggtgtatctgaaggctatgaatgcaacttacaatgct

SEQ ID NO: 5645 - DNA, 705 bp, Macaca Fascicularis
  misc_feature (1)...(705): n = A,T,C or G
tcctcacnnnctttttccaaagaggacggtgcacccacagtnnnactgtatcatattgggatctcagtcctgaagatggcccactctttgtaaataagttggattttcctcatgatgtgtgtgggtttttttttttggcgggggagaggaacggggcagggttccactctgtcatctgccacccaggctggagcgcagtagtgcagtcagggctcactgcagatttgacttcccgggcttaagcggtccttgtgcctcagcctcctgagtagctgggactacagttgagccaccacgtccagctaatattttctgttttttgtagagactcaaaatgttgggattacaggcatgagccactgcactgggcctttatttttatttttaaccttttgacaagacacgctttctattagagctactttttgtccactggttcggtttcctgatgtagaatcgatgtgttgctgatttttcagttaaaatgtttaaactgcttcctttgagaacaagtttgagttttagtaagctgtaaagctattttatttgattcactgtgaataagacaagtacaaaaaagaaaaaaaagtgaaaacacagcacatttcaagtgtaatcccctttggaatttttccgaagtcttagtatatgtctttgtgacacaaaaacatagatgggacaggtaaatgaaatgttcccacgttg

SEQ ID NO: 5646 - DNA, 1948 bp, Macaca Fascicularis
ttccatattttatattttcagcactgccaggattaatactatggaacaagcatagtatctactattgttaccataatttcacctttactgggattttacagacacctgcaggacatggaaatctatcaatgctatcaaatgacagcattattcatgaagttttcatagattattatggaaatattttgataaaaatggaaaataatgtaatatttcattccaagattaatactagagatgtagtaaagctgcatttatggacaaataacacaacaagagcattcattttattaagtacatctggttacacatatttcctgtatgctttggacaatggcacaatacaaatacaggactatcccttgagtctggaaatacgaagtgtagctttcacgacaaaagacaaatgcccatacatggcatttcataataatgttgctcgtgttttttactttttggacaagggagagactctgacactttggactcaaatcatctatccagaaaatactggtctgtatgttgttgtggaatcctatggccctaaaatattagaagagagtcatgacatttcctttgaagctgcctttggacactgcaccaaaactctgacaataacattttatcagaatgtagattatgagggactatatgattacttcgagatgcaacacaacaacacaggtcttgtgatggttcaacttcggcctagtgaatattcaaaaacatgtccaatagcccaaaaggtgttccagatagctgttggctgtgatgataaaaaattcattgcagttaaaggatttagtaaaaaagaatgtcatcaccatgatttttcatacgtgattgaaaagtcatatctgaggcatcaaccatctaaaaacttgaaagtaaggtatattgggaaaaaatatggctgccctctgaggcttgacttcacagaaaagtttcaacctgtgattcaattatttgatgataatggctacgttaaagatgttggagcaaatttcatagtgtgggaaatacatggcagggatgactatagctttaataatactatggcacagagtggttgtttacatgaagcacagacatggaagtcaatgattgaacttaacaagcacctccccctagaagaagtctggggacctgagaactatatacactgtttttcttatgctatgggaaaaccaggagacttagatcaaccatacgagattatcaacagttctaatggcaaccatatattttggcccctgggccattctggaatgtatgtatttcgtgtgaagatcctggatccaaactatagtttctgcaacctaacagctatgtttgcaatagaaacgtttggactgattcccagtccaagtgtctacctggtggctgctttcctcttcgtcctgatgctgctcttcttcactattctcattttgagctactttcagtacgtgaagatttatagacaatatatttataaaccacttcacaaccctcgaaaacataagaagaattaggaaaactgacagtttgtttattacagatatatgtatatagagaaacagtgtattttatacttagattgagagtgttagtatttagtattaagaatactaaatataagctcatagtaggcattgagttcaagatctgaaaaatattcttgaaccctctccaaaatagaaatattttcatatacagtgtgttattaaattaatcctttatgtgtttgccttcattttaaaggtactctatgtactcttacatggcatgaaaaactaaatttgactgttataatcctttgtaagaatgaaagtgaaattctgaaaatatatttatgtgtcaagtattattttgcatgaaacttttcacatgaaaccttatatgactgtagttaatttatatataaaggatttaataaaagtgtgtggatttaaaaaaaaaaaaaaaa

SEQ ID NO: 5647 - DNA, 741 bp, Macaca Fascicularis
  misc_feature (1)...(741): n = A,T,C or G
aagcaaggcagatagtcatgcgtccttnctnatctcccttacctgacactaggggctctagagaggcagagagagcactcacnnnnnnnnnnnnnnnnnnnnnnnnnnnnnnnnnnnntcagtttagcgaagctccttgcctaaaaagtgataagtaaaaatctgtttatggtatacagttatgtctccaatctttgaatcaaatccatgttcttattttagaaaggtaaaagagttcttcaaattcagctatataccaccagctcnnnnnnnnnnnnnnnnnnnnnnnnnnnnnntggttggctgcggttatggataaagcctgtaactgttaaaatagaaaaacatgaagctcaggcccaagaaaggccttggagccagccaaacagaattggttctgatggacatggatgatgttgaacagaaaaaagtttacaagtgctttgtggttgcactaatgtatactcactgccattttaagaggggaaagtacactttaaaatatatttgaatgtcatgtactgatatacagtagcttattgtttttctagttgcagagaatgtgaagtttaatctcttaaaatatttagatggtctactttttcattgaatttgtcaatatgtaattgcattgtaaaatattatatatatatatatatatatgcttaacttcccacgtgttcnnnnnnnnaccactttgggaaaattttgtttttttatgttttgtaattttaaaattaa

SEQ ID NO: 5648 - DNA, 693 bp, Macaca Fascicularis
  misc_feature (1)...(693): n = A,T,C or G
agctggatgaggagatagatggtggggctgccaccccatgacccgagtcctcaagtcactttctacagcnnnnnnnnnnnnnnnctgctgtatccacacctcacaggctgtgatgggtcttagttttatttagacnnnnnnnnnnnnnnnggaatggactccgtgtaacgtgggcatggagtatatgannnnnnnnnnnnnnnttttcaaaccacctgcattagcatcatttaaaaatgtagatgctgggccgggcgcggtggctcacgcctnnnnnnnnnnnnnnnnnnnnnnnnnaggcgggaagatcgcaaggtcaggagttnnnnnnnnnnnnnnnnnnnnnnnnnnnnnnncacctccactaaaaatacaaaaaccnnnnnnnnnnnnnnnnnnnnnnnnnnnnnnnnnnnnnnnnnnnnnnnntcaaaaaataaataagaaaagccaggcacgacggctaatgcatgtaatcccnnnnnnnnnnnnggccaaggcgggcggatcacctgaggtcaggagttccagaccnnnnnnnnnnnnnnnnnnnnnnnnnnnnnnnnnnnnnnnnncnnnnnnnnnnnnnnnnnnnnnnnnnnnnnnnnnnnnnnnnnnnnnnnnnnnnntgaggcaggagaatcactcgaacccgggaggtggaggttgtggtgagccgagatcacaccaccg

SEQ ID NO: 5649 - DNA, 2380 bp, Macaca Fascicularis
tagacaaggcagcaatggatttttgcatgaacatgaacacaaaggcaaacaggaagaagttggtacgggcactcttcatagttcctagacaaaggttggatttgctaccattttatgcaagattggttgctacattgcatccctgcatgtctgatgtagcagaggatctttgttccatgctgaggggggatttcagatttcatgtacgaaaaaaggaccagatcaatattgaaacaaagaataaaactgttcgttttattggagaactaactaagtttaagatgttcaccaaaaatgacacactacattgtttaaagatgcttctgtcagacttctctcatcaccatattgaaatggcatgcaccctgctggagacatgtggacggtttcttttcagatctccagaatctcacctgaggaccagtgtacttttggagcaaatgatgagaaagaagcaagcaatgcatcttgatgcgagatatgtcacaatggtagagaatgcatattactactgcaacccacctccagctgaaaaaaccgtgaaaaagaaacgtcctcctctccaggagtatgtccggaaacttttgtacaaggatctctctaaagttaccactgagaaggttttgagacagatgcgaaagctgccctggcaggaccaagaagtgaaagactatgttatttgttgtatgataaacatctggaatgtgaaatataacagtattcattgtgtagccaacctcttagcaggactagtgctctaccaagaggatgttgggatccatgttgtggatggagtgttagaagatattcgattaggaatggaggttaatcaacctaaatttaatcaaaggcgtatcagcagtgccaagttcttaggagaactttacaattaccgaatggtggaatcagctgttattttcagaactctgtattcttttacctcatttggtgttaatcctgatggctctccaagttccctggacccacctgagcatcttttcagaattagactcgtatgcactattctggacacatgtggccagtactttgacagaggttccagtaaacgaaaacttgattgtttccttgtatattttcagcgttatgtttggtggaagaaaagtttggaggtttggacaaaagaccatccatttcctattgatatagattacatgatcagtgataccctagaactgctaagaccaaagatcaaactctgtaattctctggaagaatccatcaggcaggtacaagacttggaacgagaattcttaataaaactgggcctagtaaatgacaaagattcaaaagattctatgacagaaggagaaaatcttgaagaggatgaagaagaagaagaagggggagctgaaacagaagaacaatctgggaatgaaagtgaagtaaatgagccagaagaagaggagggttctgataatgatgatgatgagggagaagaagaggaggaagagaatacagattaccttacagattccaataaggaaaatgaaaccgatgaagagagtactggggtaatgattaaaggcggtggacttaagcatgtaccttgtgtagaagagcaggccaaacgtcagcaagaagaagaagcagctgctcagatgaaagaaaaagaagaatccgttcagcttcatcaggaagcttgggaacgacatcatttaagaaaagaacttcgtagcaaaaaccaaaatgctccggacaaccgaccagaggagaacttctttagccgccttgactcaagtttgaagaaaaatactgcgactattttagtatacagagagcattaattcagatggcttagaaaagtgataccagcccaagaacagggatctacttgagcccattgtaagtatcattgaaaacaaaacatgccagtcagcatgtcacagaaaacgaacgaaggacaacaagaagtggatgagaatattttgttgaccttcatgggtttacagcctctgtctctaaacaaagtatggaaacaagtagagcttttattttgctcttgtttttgttctgtttcgttttgttctcccccactcaatagaaatgagggttcttagtctgtttctgacaatctgttaatttcttaggatagttgtctttcgtttgctttccagtaggcatagtacatttagttgaagagcacatctgtatgctacaacttgattacatctttttttctagctattttgcattttttcttttaccatgtttcagtttctgcatgtagatttaaataagaaacaaaacttgtaaagttgtaacatttcacacggaaatgctgcccaatcttcaccagcttcagaaatctgacctttgccgatgctgcaataaagtgttgtaatttaaaaaaaaaaaaaaa

SEQ ID NO: 5650 - DNA, 518 bp, Macaca Fascicularis
ttcagccttccaaaagtttaaaaatttttaacatttagatgcttagtccaaactgaaaattgttttcatttatggcatgattttggaatcttgttttaattatttttgcacatttatagctgttcctctgagtatcattgtttcaagtgcaacatctgtcatgcagttactgtataagggccagattctgacctttctgttcttttgatctgaaggaaatttgaacatgccacccccaaatacgctgatttggcatactgattatttcaagctaaaggtacttgagaaacagtagttgcagaaatggctatgttaactgtcctttcccacctgtagcaagccatacagacttctttgagaaagatgctttcctgatatcaagatgagaagatggctctaatcagctgagacagtaccagaggaatctgcaaacaaaccttactgttagtttcttgccatacgtttaccttcccacagtttctgcctctggaagcctaaaactgctttcctttgtctgt

SEQ ID NO: 5651 - DNA, 1153 bp, Macaca Fascicularis
  misc_feature (1)...(1153): n = A,T,C or G
tcctagttaggttcctatacaaagcatttggaagatgacctnnntgnnnnacgaaacttgaaaatagggatnctggggtgaggatacaaagacactgtcttgcatatccataagcaggtcttagagcattattccaaactctagctgtttcagtagttctgtgaggattgcaagtcacaggtgtgtgtggcatatcagtccatctccctcatctccattctcagtttcttccccacaaaattttgaatcaaagcttttatgacgtttgccaattgcagaacttctttagctaaggttaatttgatgctatgataaaactgagagatgtcaaaaagcctcttagaaattttaatcttgaaagacttttcaggatatctcattttttaggtgggggtgacaggcgtatttcttttttaacaaataaaaggcatttaagtaaaactaaaatgaaaaaagtaggccttttgacattgtgtacttgatggttctgtccctctgcctgtaacaaatctcatttttgttaccaagaactgtatgaaagaagtaaacctgcccctattctgtatgattaattccatctgtgtttgtcatttctgactggaaaacttcttactccataccttgtttgatatggaggacaaataattggattgtctgataagtctgccaataaactatccagaaatagcaagtgtaatagtccccactatacgaattttatggtttgtataaacactaacattttccccttctgtagttgtatgaagaaacaaatattgttagcatagtagataaattgttatgaaataccagaaagaaaaaaaatctgtatcttttactgagaacacccaatactcagataaatgactgtatcaggatttcatttgcatgttagtccacagagttgcccagaaccctaaatttattcataagagaaaatattgattaattattggtcattcctcataagtgtagctgttgtgtgcgtctgattttattgcttttttaattttacgaacattgtgtaaaattacattttttttttccaggggagaaaaaaacatcaaacaaaaagagaaacatctaaatcatcctttctgttctattttggtttttaaccacttttaggttttccccttgcagaaaccacaga

SEQ ID NO: 5652 - DNA, 2369 bp, Macaca Fascicularis
gtagaatatgatgaactaagtgctgcattaaagcaggtctttgaagaggccaattatgaaattatacccaatcagatcaaaaaggctttagaattgtatgaacagttatgccagaggatgggagttgttattgttggtccaagtggtgctggaaaatcaaccctttggagaatgttaagggccgcactttgtaaaattggcaaagtagtgaaacaatatactatgaatcccaaagctatgcctcgatatcaattattaggccatattgacatggacacaagagaatggtctgatggtgttttgacaaatagtgctcgtcaagtggttcgggaacctcaagatgtcagctcatggataatctgtgatggtgatattgaccctgaatggatagagtctctgaattctgttctggatgacgaatttattattaatctcataaggggacttggtggaaatctgaatatgaaatcacgtttggaatttaccaaagaggtttttcactgggcacgagaatctcctccagactttcacaaaccaatggatacctactatgactctaccagaggtcggttagcaacatatgcgcttaagaagccagaaaacttgactgctgatgatttcagtaatggcttaactcttccagtcattcagacccctgacatgcaacgaagtctagattatttcaaaccatggttaagttctaatactaaacagcccttcattctagtaggaccagaaggatgtggcaaagggatgctgctcaggtatgcattttcacaactccgatccactcaaattgctacagttcattgtagcgcacaaaccacttctcgacatctcctgcagaaactgagccagacttgtatggtaatcagtactaatactggtcgtgtatacagaccaaaagactgtgaaagacttgttctgtacttaaaagatatcaacctacccaaacttgataaatgggggaccagtactttggtagctttcctacagcaggtattgacatatcaaggattttatgatgaaaatttggaatgggttggtctagaaaatattcaaattgtggcttctatgtcagctggaggaagactgggaagacataaacttactaccagatttacttccattgttcgtctttgttctatagattacccagaaagagagcagttacaaacgatttatggagcatatttggaaccagttctacataaaaatctgaaaaatcattctatttggggttcttcatcaaaaattaatcttttagcaggatctatggtacaagtgtatgaacaggtgcgagccaaatttacagttgatgattatagtcactatttctttactccttgcattcttacccaatgggttcttggcttatttagatatgatttagaaggagattatgtgttagaaattgtagcatatgaagcgcggcgcttatttcatgacaaaattgttggtgcaaaggaacttcatttatttgacatcattttaacatcagtgtttcaaggagattggggctcagacgtattagacaatatgtcagatagtttctatgttacatggggagctcggcataattcaggagcaagggcagccccaggacaaccattacctccacatggaaaaccacttggaaaactaaactctactgatctcaaggatgttattaaaaagggtcttattcattatggacgagataaccagaatttagacattttactcttccacgaagtcttggagtatatgtctaggatagatagagtgctgagtttccctggaggttcacttctattagcaggacgcagtggtgtaggtcgtcggaccatcacttctttagtcagtcacatgcatggagcggtcctgttttctccaaagatttccagaggatatgaactgaagcagttcaaaaatgatctcaaacatgtgctgcatcttgcaggaattgaagcacaacaggtagttttacttcttgaggattaccagtttgtacatcctacgtttttggagatgatcaatagccttttatcctctggtgaagttcctggactctatactcttgaagaattggagcctttgctgttaccacttaaagatcaagcttcacaagatggttttttcggaccagtcttcaattacttcacatatagaattcagcaaaacttgcatattgtcttgataatggattctgcaaattcaaacttcatgataaactgtgagagtaatccagctttgcataagaaatgccaggtgttgtggatggagggttggtctgatagcagtatgaagaaaatacctgaaatgttactcagtgaaacaggtggtgaagaaaaatacaatgacaaaaaacgaaaaaaaaaaaaaaaaaa

SEQ ID NO: 5653 - DNA, 709 bp, Macaca Fascicularis
  misc_feature (1)...(709): n = A,T,C or G
cattcaggttgtggcagaattcagttccttgctggcnnncagctgggggcccctctctcacctccttaaggctgcctgcattccttcttgtgtggtcccctccagcttcaaaccagccttcctgctctttctcatggttcatctctctctcccgtcctcctctgttttaggggcatatgattagctcaaacccacagatatatttgaaggtcgattgtgcgatagaacataattgcaggagtactatctcatctcatcatattcatgggttccgnnnnnnnnnnnnnnnnnnnggggaggggcattttcaaattctgcctaccacaggcaataactttgcccatctcagctgtgggtggaattttatccagaaaagataggccctagaagcctcatttcttttctccatggacaaggacagccctctnnnnnnnnnnnnnnnnnnnnnnnnnnnnnnnnnnnnnnnnnnnnnnnnnnnnnnnnnnnnnnaaaggggattgttctgtattttgaagttattttttaataaaattgaattatgttgtgtattgtgcttcttaataggaaatgcattattggactgtttttgtaacatcttgtttattgcaaatagctagtattgttcaaaaactgtataaaatacttttgtacatattagcaatgtctaatttgtatacacttcagttaaatttccctaaaactgaaaggg

SEQ ID NO: 5654 - DNA, 452 bp, Macaca Fascicularis
  misc_feature (1)...(452): n = A,T,C or G
ggagtgcaggtgacaggcaagttnnnnnnnnnnnnnnnnaaagnnnncagccagttttatttgcctcttctggtgggagccctggcatagtgtgccatgtgctctccatatgatctctgccaggaggtgggacgggggtgctctcctgggttagatgtgggcctaatcataaaccctgtgtattctccagcttcactacccaggctgcccactacttgctcagttttactcaccgggccagcagaaggaaaccaagctttagcccttgtagtccacacagttcactgggtaggacagctggtaggcccccaccctgaccctttctctcgcctcttgtcttcctgcagtcaaaaacccattaacgagaaagtgcctgcccactgcaacggagccgccagcacctcctcccctccagatccgggccccaggctgctgccgctttttataacttt

SEQ ID NO: 5655 - DNA, 673 bp, Macaca Fascicularis
  misc_feature (1)...(673): n = A,T,C or G
atattgtcagtcgtccnancttannnntagttgttaatcnnnnaccgtgcctaacttataaattnnnnnccatcataagtgtatatgtataggggaaaacatggtatagatagggtacggtactatctgcagtatcaaacattcactaggggccttggaacatattctctgaagctaaagggagactgcagttatcaganntgataggaaattagccatcagaattcaaaattattgagaatactctttgaaatattggttcacttccacttttattaatgaagagccttaccctaagtgcatataatgtttcagggtatttgctaatgataatttgaagtcattatgattagctagcaggttttccagtcgtgtttaaagtcatttggtaaccaaaccacgacttggaaaattttactaaaggtaacaatagggccaagtgtggtggctcatccctcagctttttgggaggctgaggtgagaggataacttgagactatgggttcaagaccagcccatgcaatatagcaagactccatctctacgaaaaaaaaaaaaaaattaattagctggacatgatgttgcacaccgcatagtcccnnncacactcnnggaggctannngtgtaaggattgcttaagcccaggaggtcaaggctgtagtgagctatgat

SEQ ID NO: 5656 - DNA, 742 bp, Macaca Fascicularis
  misc_feature (1)...(742): n = A,T,C or G
tacgctgagagagtccgggtcnnntggccacagtgcgagggtggtcaccgtctcctccgccacccattacgtcgctgagctgaacatggacgaccttcagagcagtgcctgctactcagcccacgcagcgtacgcccagagcaagctggccctcgtcctgttcacctaccacctccagcggctgctggcggctgagggaagccacgtgaccgccaacgtggtggaccctggggtggtccacacggacctctacnnnnnnnnnnnnnnnnnnnnnnnnnnnnnnnnnnnnnnnnnnnnntggttgcttttcaagacccctgatgagggagcgtggacttccatctacgcagcggtcaccccagagctggaaggagttggtggccgnnnnnnnnnnnnnnnnnnnnnnnnnnnnnnnnnnnnnnnnnnnnnnnnnnnnnnnnnnnnnnnnnnnnnnnnnnnnnnnnnnnnnnnnntgactggggtccttgatgtgaccctgtgatatcctgtctcagcatagctgctgtccctagaaacacatcgcacctgtccgtggcttgtgggtctgtgaagacggcagtgtttgagtttctcacacccacctgcccacagggctctgtcctctagttttcagacagctgcctcaacctnnnnnnnnnnnnnnnaagccaaagaaacattttgggggataatcaccccaggtggtcctcaaccataaaccttgtgattccaaagtgcccaa

SEQ ID NO: 5657 - DNA, 698 bp, Macaca Fascicularis
  misc_feature (1)...(698): n = A,T,C or G
ccagnnnnnnnnnnnnnnnnnnnnnnnnnnnnnnnnnnnnnnnnnnnnnnnnnnnnnnnnnnagccggggnnnnnnnnnatnnnnnnnnnnnnnnnnnnnnnggtgatggtggtccggaaccctaaaggcgaggtggtggagggcgacccggacaaggtgctgcggatgctgtacgtgtgggcgctctgccgagaccaggacgagctcaacccctacgccgcctggcggctcctggacatctcagcctnnnnnnnnnnnnnnnnnnnnnnnnnnnnnnnnnncagccagggagccccgggctgggtcatcaggcacagaggcaccacgacaccccctgcagcaactccagacctctgggannnnnnnnnnnnnnnctgcccccagctctgccagaagagctgcaagaccagctggccggggaggggannnnnnnnnnnnnnnnnnnnnnnnnnnnnnnnnnnnnnnnnnnnnnggccggcccctgccctgttgctctgccctgcaggggtcccggtgcctggtcacctnnnnnnnnnnnnggccacccagtgccaagaggccccagggcccagggactccctccacagcagggtgggacccgggnnnnnnnnnnnnnnnnnnnnnnnnnnnnnnnnnnnnnnnnnnnnnnnggtcattttttattttaacagtgctcttccattctgtgcgtaagccc

SEQ ID NO: 5658 - DNA, 602 bp, Macaca Fascicularis
  misc_feature (1)...(602): n = A,T,C or G
gagaaggtaccaccaatgtccacgatgtggagacacagttcaatcaacgtaaaacggaagcagcctctcgatataacctgacgatctcagacatcagcgtgcgtgatgtgccatttcctttctctgcccaaaccggggctggggtgccaggctggggcattgcgctcctggtgctggtctgtgttctggttgtgatggccatcgtctatttcnnnnnnnnnnnnnnnnnnnnnnnnnnnnnnaagaactacaggcagctggacatctttcccgcccgggatgcctaccatcctatgagcgagtaccccacctaccacacccatgggcgctatgcgcccgctggtggtaccaatcgtagcccctatgaggaggtttctgcaggtaatggtnnnnnnnnnnnnnnnnnnnnnnnnnnnnnnnnnnnnnnnnnnnnnnnnnnnnnntaggggcacgtcgcctactgagctgagtggccagccagtgccagtccaccccactcaggnnnnnnnnnnnnnnnnnnnnnnnnnnctgttttgggctggtgagctgggagttcaggtgggctgctcacagccttcctcagaggccccaccaagttctca

SEQ ID NO: 5659 - DNA, 727 bp, Macaca Fascicularis
  misc_feature (1)...(727): n = A,T,C or G
caagctcannttatctttgtagtagtaatatttgtctttgatacctacaaactaaaaaggtacttttatcaaggtttctcaaaacatttacaaaaccagctttgaggaaatgtggagtgttgcccggcaacagcactcagagtagtaattgtattttctcattgtgatgttagtctgtgtaagtaaccagtgtagtgactctttggttcattattggcgttgtttttatttttagtctctgtgtgacccaccagtggcaggggttccaaccccctctcttctcttttttgcatttatctatttgtaggattgtcagataaagtacaagatgcccagttaagtttgaatttcagagaaacaatttcgcttaagaatgtttcatgcaatatttggcgtatagttacgataaaagcattcgttatttgaaactcaaatgtaactgagcatgctggtttttttcattgtttggttttctaagtctggcattccaacagatttggtcatggaaaatcacctacagcatgttaaactcctctggtcatcatcatcttgtcacctgaaatagaagtcctttttccctccccctccacttctttccaaaggaaggcatcaaggaacgtaacctgcctgcctggcgggtttctatttaagacatctttgtgattatatttaacctgcaattgtgctttggcttaatgtctagctcactgtactgtaattgattaat

SEQ ID NO: 5660 - DNA, 760 bp, Macaca Fascicularis
  misc_feature (1)...(760): n = A,T,C or G
atgtgtcagggaagaagtgcannnnnnnnnnnnnnnccgaaatgnnnnnnnnnnnnnnnnnnccnnnaattgnnnnnntcgtggattcagaagcaacacgtaacgaatggtnnnnnnnnnnnnnnnnnnnnnnnnnggnnnnnnnnnnnnnnnnnnnnnnnnnnnnnnnnnnnnnnnnnnnnnnngataatggcttgaannnnnnnnnnnnnnnnngactnnnnnnnnnnnnnnnnnnnnnnnnnnnnnnnnnnnnnggcatagtcagtgtcccagcnnnnnnnnnnnnnnnnnnnnnnnnnnnnnnnnnnnnnnnncaaagcattcataaagaacccagtctnnnnnnnnnnnatcatctgttctacnnnnnnnnnnnnnnnnnnnnnnnnnnnnnnnntgaagaatccaagaagaaattggtatnnnnnnnnnnnnnnnnnnntaagctcgaggctgtgactggggaaaaagattgagcttagttttcatgtctgggaaaagaagcaaaacaacttaatctgaaacagttttttaaaatgtgtgttattttgttttaannnnnnnnnnnnntggggtaaattttcattgtcatatatggaatttaaatataccatcatctataaagaattccacagagttaaatatcttgaacacttaaataagtgtttgcatgatattttaatgatagataaacggagtctaattcccaccccagattttcctgaggttttgttaatgttgtagagcattttgtaga

SEQ ID NO: 5661 - DNA, 707 bp, Macaca Fascicularis
  misc_feature (1)...(707): n = A,T,C or G
tcattgttatgagnnncagagannncatgactgaattatnncttaaagtttccacctatcaacgctgttgtactgnnnnnagcttacaacatatgaactctggggacacnnnnnnnnnnnnnnnnncatatcagtgtactggttcctcaaatatgatacataaaatagttaaaatacaactgaaaatatggtgaaaaattaggaaatagataaaatcaccttttatatccttgttgcctttttcctctattgtatgtgaaacttcttttttgtctttttcctagcannnnnnnnnnnnnnnnnnnnnnnnnnnnnntaaggctttctcaacatataaaagccattcactgtgacttttcttgnnnnnnnnnnngttgtaatttccaagatcctgttgttttaccatcttggaaaacaaataaaaannnnnnnnnnnnnnactccactgaaacaaacttgatttattctgaagagttcagtgaacagcattttgaatgagatccataatgggctttttaattaaatgaatatagtcatttcatagaggcaattctcattagtagagccgtannnnnnnnnnnnnnncattctaattgtgctgtgtgtttatataaggggcctcattttagggttggtttgaatagatttatatctaactcatgctcatgacatctaatagcattcgaaagagtaaatattattgcttt

SEQ ID NO: 5662 - DNA, 304 bp, Macaca Fascicularis
gtaaaaaacacattatggtgcaaaaagttatcactatattgaattacatgaaggtttttggctttttgacatattaaaatgtcaagataaaggtcaaagatttgtactttttcacttacaaaacactcctttttcccttaaactcctttctgtcaaattagatttaatgagatagtactatttttaaggagctatctgtttatgtagaatgattttgttaagagtgatgtattctattattgagtagaggcctaaagaggactgtgcttttttgctatttaaaggaatcactgatgatcatact

SEQ ID NO: 5663 - DNA, 768 bp, Macaca Fascicularis
  misc_feature (1)...(768): n = A,T,C or G
tcacgcaacaccataaaagccctggtggaagnnnnnnnnnnnnnnnnnnnnnnnnggttgccccnnnnnnnnnnnnnnnnncagtaggtccttactgttcagaattctgttcaatgtagcaactcctcccattgtgtctcaaatgtgtgagagagaacattgacagcagagtaagtcatggcttgagtagagacattgcatgggcagaattgacatttccaagagatattcagatgcacgttcaacatcactactgtcctaatctgagagcctccatcaaggtaatttaaaannnnnnnnnnnnnnnnnnntccagtgtgggttgatcttaggtatgtacttaaaatgaattggcaaagtgacactgtgatttctgagttagaaaaaggtaatattccttcagcctagagttctctctctctctcctgggacatgtgtctttgacaccctgagccaccatggaagaagtccagctaccatgaagccatcatgcagaagagaccatgtagagacatcacatagagatagagggaggcacccaggagccccagctgtttcagattccagatatttggatcatcacgcgcgggtaccagagatgtgaatgaagatgctcgtgaaatgactgcagttccacctaccatctgactgcaacgtcacgggagaccccaacccagaaccactccactgaatacctcccaaatactaacccacatnnnnnnnnnnnnnnnnnnnnnnnnnnnnnnnnnncaagccactaaaaaaaaa

SEQ ID NO: 5664 - DNA, 3121 bp, Macaca Fascicularis
tcatcatagttttgtgtttgtttggtttcttctttcatttttctcagtcatgagcatactgcccttgctagatggctgttaatgtttttgtgttgtttgatacagtcgaaataaaaattcggagtttatacctactccctttaaggcagataagcttattgtacaaccctatattcttttcttaattacttcattatcagacctaaaacacagtacatgaagattaatgtagaataaagccaagttaaggagaaagttgagaaacctgagaggaagtttacctactatttctgccacggataggtggaaaatctgaaaacactggcttctagggctcgtcacactggtgcctttcatcaacttttataaacaaatgcaaaaattatgaccctctatcacaaaaaatggattaggaaggagatcccttattatagctatgcaggcattgttttattccataacactgtcgttggtaaatcaggacatgtcaaactctcaaaatagtatatgtgtattaatggcagaatgacacgtatatacatatatattactaagaaccatctggagaaaagataagggaaaagataaggcagatggaaaatatgtggattctcactattctgtttgtctgctaataaagaaaactaagaactcacctgaatcactacggagtcagggtctcagagatgaaaatccaaggagagtctctacaaaaagaacagaccgctagagagcatacctctttgattgaaatacctaaatcttttatgtgattgtaaaagttatatctatagtgaataattttgtattgtcacattgggagataaatttttttaccagattcccatctaaggcagaagtaacatttatgtgaacccttttctaactacaacatcactattcatattatttccaagcacaagagataaagtatgctagtaccatagcacagaggcaattcactacatctagtctattcctttagccatgggctattagctggatgtacaaaagactaataggttacatccattctatacatgcagggctcccataaaagttaaacaaacacttcttcaaacccgcacacacaaatccatactgtggcatccagagtttctttaagcctcacactgtatcagtacaaacatcctgcagggaattaattcactgagcacagaacaaatgtgtaatgcaaagagattaccaagtcagctccaccaccttggtttatataagctcttctattttagcaacacctggagaatccagtggtctgtgcttcagtggtctcaagagctcttcatggcactgctgtaagaaagttgctggctttaatgcagggctggtttcagtacaggacagctgttttctgctgtgagtcttctggggaaaaaaaaaaaggggttcacagaaactgaaagtaactgaaaaatgtatcctggctggtgagtctagggaagagtagttcattgttctggtggttgaatatattttcaaaagaacatttaataagaattggagaacacaagcatttcaaataaatggcaatgatcatataagcatatataagagaatttaattgtagaggcaaatggatgtttatgcatatcacgcttcctctaatattgatcttaagttggtttccaaattgataagtaaatacactgtatattgaaaatgattttaaatgtctatttatatcttttaaatatcgccaataattagcttaaatacatgccctcagaatattcaggaatctactcagttctttccttctcatccttgattagaagttaaaaatcatatttctctagctttgttttaaaagatacagaaaatttaattttccacttatccaagcacaatctcctttcattcatttactcatttaattatgcaacatctactgagtatccactatcatagtaatcaagctgcccatcactgaagtcattatcaaactgttgttcaaacattaatcctgtgtttctccacattaactcctttggcttccatattgattgcaacttgtgtctcattctatcatctaaatcatgtggtttagagataggccttagtgtccacctggccaggcacaagtctggcgttaaggacctacctgctttaatgatccactctcagggagtcagaacagttaagtattaaaagacaaggatctggagtaagagtccctagggctgtgtcactggattcatgtttctttatgggcaagctacttaacatctctgcatccccatctctcaaaataaccataacactacctacctcacaagggtgctgtgaggcttaccatgaaaagcatgaggaaatggtatatagaattggggacctagtagaaaggtgctacaggattagagtaactacatgtcattgagtatgaaccctgctttccctgggagccccaggtttgccagaatatgtctaatctctttatggctagaatctaaaatggtgttggccatcgattggcttgggttatctttaatgtcattgacttttacaaaattcataacaacacctctttctcagagagatgctggattggaaaaattattaaattaattttaaagcagaacaaaaatgattcacttccaggtgctgggtgtgggggaacagttatttatttcaatatgaaacaagagtttgaatggatatcttcaaggggatgcattttattggagacatttattgcctggggctttctgttttcagtctgactccccagctttctgtatcattgttttaacatacatccccttttctcctttactggaagagaagctataattctcatttcatgataattcttttcagtctgttttgctcaaaggacaaattcttttcaacaactattgtaattattttcttagagggccatttttaattgccatattgtttagctaagccctattgtcttggtgtccttcaaaactgtcagttgctttaaaatataggggtgggagggggagctgataagcacattgttgtaattgatttgtatgtttgaattgtcttatcagaaaacaaggttatgaatttcatctgttgagacacaaaaataaaatactttcttaaaaaaaaaaaaaaaaaaaaaaaa

SEQ ID NO: 5665 - DNA, 778 bp, Macaca Fascicularis
actagaaagcgcagaaaagacttgcccgccaatccattgtggactggactcgatgacttctcccctatctcctgccatttcttggtcctttactcactcttctactcttcctcactctcgggcctataatccttaataagcttatggcattcgtcagacaacaaattgaggccttccaggccaaacctatacaggtccattatcatcgccttgagatgactgaaaatggtgagtcttatttgccctaataagaccacctcccctgtgtgctgaactggacagtcaatgacgggtaagaggacactatctccatcggagcctaagacaggagggccgcctttgctgctgccttatcccatgacgggcctagaaggtgggggtgagttgacccaacctaagacaggcgcagttcccgaggggttttcttatcataaaaatataaaaagggggacctgtccggagctgcacgccccggccatagcgaataataattaaagattaaacgcctgagctatattcatttccaccccacaccttctccctatatttgccttttctccctgtattaatacctcataaaagatggcgctcttcctgcttcttcttcattcttttttcccacgcccgggaaaattgctacctgacagcgcaggcgcaacatgacgttcgaccagagaaaccgagacttatctggccacgccctcctcgatgagatcatcttcgccctggcccaaccccttcccctccaaatgtatataaggcattgcataccgccata

SEQ ID NO: 5666 - DNA, 625 bp, Macaca Fascicularis
  misc_feature (1)...(625): n = A,T,C or G
ggccttactnnnatgagtcccatttcggatgcaactcaacattaggtttagaaagccacagggaagagaaagctgatggtatgacacccacnncctgaagtataaactcttagattaagagcttatgtctccacaaggcattctgagcttatttgttttctttgtggatcaaagggcagatatcaaatgatataaattttgccttggggtattactatttattctctactctttgccagtctgtgaggaaaacctttttagcaataaaaattggatggaaatgaataatagattgtgtagatgttgaccagtttgatattttgcaaaaatgtttgaactcaataaaaccatacaccataagttaatatatatctaggagactaggtcttctacatttgagagttctttcagcaagaaaattccttgttatttggtatttatattttctcataaaacttactatgtttctggattcacgttatgggctagagggggaaaaagtcaaaatacaaacaagaattttggttacataaagagtaggccaggcgcgnnnnnnnnnnnnnnnnnnnnnnnnnnnnnnnnnnnnnnnnnnnnnnnnnncacaaggtcaggagatcgagaccac

SEQ ID NO: 5667 - DNA, 741 bp, Macaca Fascicularis
  misc_feature (1)...(741): n = A,T,C or G
gcaggtcccttannnntgcttctgtcattacactagaacaagtagnnnnnnnnnnnnnnnnnnnnnnnnnnnnnnnnnnnnnnnnnnnnnnnngtgtcctggcagcttgcacagtggctgtccacctctggggggtgtggacctgagccgtggctcagtgacaaaccaggcacccaactatgcaaggcccctgcctggtgggcgccccaccctccgcactgggcccatggaagccactgggcaggcagctggggtgtagttcatgtgaagcccccccctcccctcatgcttttggggccactgtgagtggggccaggaaacggattttnnnnnnnnnnnnnnnnnnttatagacctagttccttccacgttagtgtagacatggccttgggggctgagcgcagcagccaggctgcctgggctgggggcgggtaggaggcacggtagttggtgggtgggaagagggcctgggtggtggcggtcagttagcctggctgggtgaggttgcggggcggggtggtgaggagagcaggggtcccagggaggcatcggggtgctgggtaatggcctcagccctgggtttctcctctccctttgggacaggagtctcagaaagggctaatggcaaggtgggctggggggctctgggatctcagctctagccctatatggccaggatctgctgtccctgcccctcctgggccccagcagctgtcctgcagccgtggcaggagggcctggc

SEQ ID NO: 5668 - DNA, 722 bp, Macaca Fascicularis
  misc_feature (1)...(722): n = A,T,C or G
gtctacggtaaagtcggttttgttatacatcatttcacttaaagttgcagttcctaagaacctattannnnnnnnnnnnnnnnnnnnnnnnnnnnnnnnnnnnnnnnnnnnnnnnnnnnnnnnnnagccttaggtatatcnnnnnnnnnnnnnnnnatgaggttactaaagtctcctaatactctgtacaccagaactctgccttctgtaaactacctcaggatcccatctggttcttgagccaagaagtatgacttaatctgccccaaaaaattcacactggagacattcccaattaatnnnnnnnnnnnnnntttgtgaaagttcatactttattcaaaggcagaaaaggtnnnnnnnnnnnnnctcctatgattagttaaataatgtcaaaatctatgtttgttcatcctttatattgtaacacaagttttattaggacaaagccctacataagtaattgatatagaaattcgtataaacaagaggtaacttgtagagaagcctaacaagagaaaagcactctgaatgtaaaaaattcttgaggtatagttcattcatcaaagtacttatattaatggattctgactttttaactttaggtattccaagtccaatatttcagttttgaaaataagctgtgattttctttaggatggttgaaagatagaagtactattttcattccttatattctttgaacaactagctatttgagccta

SEQ ID NO: 5669 - DNA, 1376 bp, Macaca Fascicularis
  misc_feature (1)...(1376): n = A,T,C or G
ctttactcacaaggcatgggttttgtcntggtgatcagtttgcaagannnnttncttcccagctctttaataaaagcaaagtgattgagtaggtaatgttcaaagtgtctacctgtgtacatgtacttgtatcgattatgtagttcagtaagatgtgcccaagtcatttcagaaggaaagatcctttggttttgatgcactttgctgaacagttgggtagtgagtgggatcctatccaggtgaggaatgcttgcaatgcttattgaaaggatttgctttgggactnnnnnnnnnnnnnnnnnnnnnnnnnnnnnnatatttggcccactgtgattgattgcttaatctttggtaatttttacttgaatgggatttgctgaattcatgactattgaatttaaatctaattatgagttgacaaataaataaaaggtagtgtttatgtctgagcttattgtgtttgagctaacaccaggttactcggtaaccatgacctgctcctccatttccatttattctcaacattaaatagttttatcttgttgttgccagaaatgcacttgtgccaggtgttgaccctgctgtatgaaaagcttattggcaatcaactctgtaatagtgtggaattgttttaacagtgacaacccagcatttccatataattttgctttattgttattactataaattccactatgattgatgttcagtggttttctatagcaacttttttgataactcttgggtttctgatttgttttaactagttattttggggggatgattggggtctttgattaatgtcaactgaacttggatttctagttcatgaagaaatctctcccaatacccatttatcctatttttagcaataatttgttaataattccacttgattttcagaatattgtcctggttgattttgatttgacagagtacattatgaaatttgaaagtagattaccattttgaggcagttggatataaattatgtaaatatgtatgattgtgatttttataaatggcataacatgagtgtactaattnnnnnnnnnnnnnnnnnnnnnnnnnnnnnnnnngaggtatgacataatggtattttttaatgctcagattaaaaatcagcttttcacctctccaatttttccaagtgatactcccagttctagagcaatctacagctgtttatataaggtgcccaacacccgttcatctcaagtgcttcagtctttggtttatttcatgcactgtgccttcaaaatgaaatttttaaaagggactttaaatgaagttgaatagtagtttttaaaagtcaatgtgtaatttatgtgaaatcnnnnnnnnnnnnnnnnnnnnntgttttttatatgtaaaca

SEQ ID NO: 5670 - DNA, 588 bp, Macaca Fascicularis
  misc_feature (1)...(588): n = A,T,C or G
caannnannnnntnnnnnnnnnnnnnnnnntaccctcatctctatccagatgtgatatgtctgagactgaaggcgggaggttcannnnnnnnnnnngtgtagtgtcaaagcttcaggaaggattttacccttttgttcttccccccgtccccaacccactctcaccccacaacccatcaggattttagttatttggcctctacactccagtaaacctctacactccagtaaacaaactccagagagtttgttcactctctgaatgattattagccagacttcaaaattactttatagcccaaattataacatctattgtattgtttagacttttaacatatagnnnnnnnnnnnnnnnnnnnnnnnntttttctgtcctttttttcaaaaaagaaaatgtgttttttgtttggtaccatagtgtgaaatgctgggaacaatgactataagacatgctatggcacatatatttatagtctgtttatgtagaaacaaatgtaatatattaaagccttatattatatataatgaactttgtactattcacattttgtatcagtattatnnnnnnnnnnnnnnnnnntaatg

SEQ ID NO: 5671 - DNA, 732 bp, Macaca Fascicularis
tccaaaccaaaggctcagctcttctcacagcaggttaaatacttagggctaaaattatccataggcaccagggccctcagtgacaaatgtatccagcctgtactggcttatcctcatcccaaaaccctaaagcaactaagagggttccttggtataaccggtgtctgccaaatatggattcccagtacagaaaatagccaggccattatatacatgaatcaagaaaactctgaaagccaataccatttagtaagatggacaactgaagcagaagcagttttccaggccctaaagaaggccctaacccaagccccagtgttacgcttgccaacagggcaagatttttctttatatgtaacagaaaaaacaagaatagctctaggagtccttacacaggtctgagggactagtttgtaacccgtggcatacctgagcaagaacattgatgtagcggcaaaggattggcctcattatttatgggtagtggcagtagtagcagtcttagtatctgaagcagttaaaatgacacagggaagagatcttactgtatggacatcttgtgatgtgaatggcatactcattgctagaaaggaccagtgctgtgactgtgcacttgtgcaactcttaatcgagtcacatttcttccagacatgaaagaaaaacagaacataactttcaacaagttcattgctcaaacctacgccgctacagggggacctttttacagggtgc

SEQ ID NO: 5672 - DNA, 758 bp, Macaca Fascicularis
cttcatcacggactggtgcttttgcattcagaaggaaagctgtcagcatagtaccgaattcaagaccaaggcgtgctacatgagctgacagctttttgaaggccgagctgtttctggaccatgtgtgtacatgttctgaaactttctcatgagtactgtccattgggagatgacaatgaagattagatgaaattggaaataaaccaatattgtttacattccaagagacaagtagctcagccacactcgcagcaatgatctgtgcctgctcgcctctggcactgcccacccctttttttctaactctgtactcacagaagaaaatctcattttcttctttcttccattcccttaaattctgagtattgtacatagatttctgggtttccaagatgatgtgaaaaactgccagactgtttttcgtcttctcacaaagacaagaaaaatcagggcattttgtgagtgccttaagatcaaactaaccagatctgacccacgccctcccaatgagtcacagaccgatttcagagggtcagagccaaaagcctcactgtgaaaagcactggacttggaccagggacaccatcagggccttggtttcctcatgcttaaaatggagagtggactaatcaccaaagattcttctgatctaatattttgaaattgtaagagaaaactagatgactgtaaactcggtcacaggcctggttctggcagttctttggggagtttttgtggcattatgcccaataaacagc

SEQ ID NO: 5673 - DNA, 722 bp, Macaca Fascicularis
  misc_feature (1)...(722): n = A,T,C or G
aaaacatccctatnnctattnnncaagtaattcaaagaggtcacataacttgtaaacaagaaaaggtaacttatcaacagtcataactagtaattacgagagccttgtttcataacgaggtcttcttactcaaatcctgtgatgtttgagataaccaaattgtctctccaatgtctgcataaactgtgagagccaagtcaacagcttttatcaagaacttaccctctgatcagcactaaacaagcactgagagacacagagggtcagagtcagattttacctatggggataaaaagactcagacttctaccacatttggaaaactacttgcatcataaatatataattaactggtagtttatataaagcagacactaagtgctatagacattctcagaatatcctactcggaaacaatgtaattaaaatgccaaatctgagtcaatagctgccttacttttcaattcagatatattagtaccttacttagaaataatgttaacctagggtgaggtcactataatctgtagtctattatttgggcatttgctacatgataagtgctgccagattgtggcaggtaaagagacaatgtaatttgcactccctgtgatatttctacatttttagagaccactagtggaagacattcctcaaaattagaaaaaaaaaggagatagaacatttctgtctatgtaaagttctcaaaattcgttctaaat

SEQ ID NO: 5674 - DNA, 861 bp, Macaca Fascicularis
  misc_feature (1)...(861): n = A,T,C or G
atatgtgggtggggctgaggtctgggggtacctgggattccacaagggattcctctttgcaggcatggtgcctttggtgaattaattatttaattcaatggatgtttattaagatattgattaagcccctcctgggtacttggctctagggaatgattgcctgacctcatggaatttgcattgtagcaagggaggcagacttgaggcaaggaacagatgacagagagcagtaacagctctgaagaaaagctagagggtgatgagatgaccatgacttgaggtgaggggagagagcaagacaaagactgctctgttgggaaggcctttgactgggggcctgaatgatggagagccagccacatgaaaaacttaaaaagagcactgcaggcaaggaattggtaagtgcaaaggccctggggcatgttgaaggatggaaggaaggccagtggagctggatcctagagactgaggggcagcttggtgggtgaagagccccagggacccacaggtgtcatcacctaggagcttcttagatatgcagactgaggcnnnnnnnnnnnnnnnnnnnnnnnnnnnnnnnnnnnnnnnnnnnnnnnnnnnnnnnnnnnnnnnnnnnnnnnnnnnnnnnnnnnnnnnnnnnnnnnnnnnnnnnnnnnnnnnnnnnnnnnnnnnnnnnnnnnnnnnnnnnnnnnnnnnnnnnnnnnnnnnnnnnnnnnnnnnnnnnnnnnnnnnnnnnnnnnnnnnnnnnnnnnnnnnnnnnnnnnnnnnnnnnnnnnnnnnnnnnnnnnnnnnnnnnnnnnnnnnnnnnnnnnnnnnnnnnnnnnnnngtgtctcaaaaaaaaaaaaaaaaaaaaaaaaaaa

SEQ ID NO: 5675 - DNA, 1053 bp, Macaca Fascicularis
gagctgctgctggtgccaaggaatactccacggccgtcgacatgtggtcggtgggctgcatcttcggggagctgctgactcagaagcctctgttcccagggaagtcggacatcgatcagatcaacaaagtgttcaaggacctggggacccccagtgaaaaaatctggcccggctacaacgagctccccgcagtgaagaagatgaccttcagcgagtacccctacaacaacctccgcaagcgctttggggccctgctctcagaccagggcttcgacctcatgaacaagttcctgacctactttcccgggagaaggatcagcgctgaggatggcctcaagcacgagtatttccgcgagacccccctccccaacgatccttccatgttccccacgtggcccgccaagagtgagcagcagcgtgtgaagcggggcaccagcccgaggccccctgagggaggcctgggctatagccagctgggtgacgacgacctgaaggagacgggcttccaccttaccaccacgaaccagggggcctcagccgcgggccccggcttcagcctcaagttctgaaggtcacagtagaccccgtcatggggagaactcagccgggaccacaggcgcggctactgcggctggagctgccatgagactcagaactcctcatcttatttcgtgttccacgttttgtttttgtattttggtttgtaaatttgtagaattaaatcattttccttgttgtggaggaaagagctgtgttttcaggtctccctgacttgcccagggaggagagggtgggcatctgcgggcacctacttggggcagcacaaacccccacacgccctgtcccactctcgacacaccgggctggctgggccgtgatttggagcaggtgggggtcgggtcgattgtttcatctttggagctggagacctgtttctgtgttgggatgagtgatgctttcctgccccaactcgctcgtccagaccagccctgtccacacaggcccccggcccccaactcccagccccaggtattctggcagcctcagcaggtt

SEQ ID NO: 5676 - DNA, 445 bp, Macaca Fascicularis
  misc_feature (1)...(445): n = A,T,C or G
cttctcaattgtttcttccttgtatttgcccttttcctttcctacttggnnnnnnnnnnnnttccgttcaaggatctttttgcggtctttgtccagttttagcctnnnnnnnnnnnnnnnnnnnnnnnnnnnnnnnnnnnnnnnnnntgtgccattagccttttcccnnnnnnnnnnnnnnnngtagataacatacttcttcctgtaaacctggactactttgccaatttnnnnnnnnnnnnnnnnnnnncgtacaacctgaacttcatnnnnnnnnnnnnnnnnnnnnnnnnnnnnnnnnnnnnnnnnnnnnnnnnnnnnnnaaagaggggaagacataatcttcctgcgaatgtnnnnnnnnnnnnnnnnnnnnnnnnnnnnnnnnnngcttcggtcggaagtcacaaagggattaaacttcattttggccgctcccacttcg

SEQ ID NO: 5677 - DNA, 737 bp, Macaca Fascicularis
  misc_feature (1)...(737): n = A,T,C or G
ccccacccagtgttggagaagcttcggtccattaataactataaccccaaagattttgannnnnnnnnnnnnnnnnnnnnnnnnnnnnnnnnnnnnnnnnnnnnnnnnnnnnnnnnnnnnnnnnnnnnnnngtataatatttggtgcagcacagagcatggtaacaagagactnnnnnnnnnnnnnnnnnnnnnnnnnnggaaaggccccgtttacttactttnnnnnnnnnnnnnnnnnnnnnnnnnnnnnnnnnnnnnnnnnnnnnnnnnnnnnnnggactacaacacatgtgcaggtgtgtggtcccaggacaaatggaagggtcgttttgatgtcaggtggatttttnnnnnnnnnnnnnnnnnnnnnnaactgcgacacattcgcctagagaacaacgagaacaannnnnnnnnnnactctagggacactcaggaagtgcctctggaaaaagctaagcaggtgtnnnnnnnnnnnnnnnnnnnnnnnnnnnnnnnnnncatttttgatgacttctcacactatgagaaacgccaagaggaagaagaaagtgttaaaaaggaacgnnnnnnnnnnnnnnnnnnnnnnnnnnnnnnnnnnnnnnnnnnnnnnnnnnnnnnnntgcatatcctaagaggaaaaaatgaccttcaagagaattaggacttttttcttaatttcactgacttcannnnnnnnnnnagacttgcagtttaagtatggaattcacaaaa

SEQ ID NO: 5678 - DNA, 1846 bp, Macaca Fascicularis
  misc_feature (1)...(1846): n = A,T,C or G
cctctgtgaattatatgctgtatgaataaaatagtaacctgagtcataaagacatttcaaatataaattgatgttttctcatagcctgacttcatcgacgtgtacaaataaatcccaggtgtgcccctgggaaatatttatttatgaaaaccaatggaaatgaaatgatatattctctctccttccttgtaattttatagtaattaagaataaaaacattaaaaaatttaaggttaagtgttctcaagcaaattagagtgttccctgggacttgtgtgtaatttgtctttatgcataaatctaggggaaaaaacaattattacatgatataaaattaactctctctctcacacacacacacacacacaaacacacacactcttaattagttcatccaaaatgttattatacattcatctttatgagtacataagaaagagttcaggcataaactgtgatgttgacatccataccaatatccataattactgttaataaaatataaagcacaaaacagatatgacaatataatacttcacttgtgcagaatatgtaacagacacaattcctaagtgctggtatgaggcaattaaatcatgcccttacacaaaatgttagggaaaaaaattataattacagaattgcttgatgtacttttagtttgtatttatcttttgtcagcttattagaaacacaagaaaaccagtcactgaaaataatactagcagagtaaaataggattttttgttttctagaaaaaatatagttgaggccnnnnnnnnnnnnnnnnnnnnnnnnnnnnnnnnnnnnnnnnnnnnnnnnnnnnnnnnnnnnnnnnnnnnnnnnnnnnnnnnnnnnnnnnnnnnnnnnnnnnnnnnnnnnnnnnnnnnnnnnnnnnnnnnnnnnnnnnnnnnnnnnnnnnnnnnnnnnnnnnnnnnnnnnnnnnnnnnnnnnnnnnnnnnnnnnnnnnnnnnnnnnnnnnnnnnnnnnnnnnnnnnnnnnnnnnnnnnnnnnnnnnnnnnnnnnnnnnnnnnnnnnnnnnnnnnnnnnnnncaaaaaaaaaaagaaaaaatatagttgaaaatcggataatatcaactgtgagacaattgctcagtagacttcgtagttctaaaatacattgtttttgaattgtcttacaatgaattctacagctgtgattctgatcatgaattttcacacttgatgttgaatattacagaattcaaatcactttggaagcctacacagtatttttaatagttaggtcttcgtctgtttatcaaataaactcattagaagtagatgcagggggagatatttaattctacttccgggatgcatattccattcattcatttgtgcttttattaattcaaattttactgccagcttatatgtgactgagaaggaaatatcaatgaaatatggtctcaaattgacaagtgccataataaaggtaatacgccatttccaagcataatatcctatcagtcaagaagctcatcattattaaacatcgaaagtgagacccaattctgaaaccccccctataataaaattttgagaaaattatcttagggacaaaatcaatcttagaaaactttgaggttcttaaaattttgtgtctggcatgacttttctctaatagatatagtctaaactgatttaaacaattaaaaagagtacaatctaagcactttttgaagctgaggcaggcagtagtctcaactacttgggaggctaaggtgggacaatcacctgagcctgggaggtcgaggttgcagtgagtcgtgattgtgccactgcactgtagcctgggtgacagaataaaaccctctcaaaa

SEQ ID NO: 5679 - DNA, 645 bp, Macaca Fascicularis
ctgggatgggtgtataacagcaacaaatttcatctgaatggactcaaaaactaatcagacttgcgagttagcgcattaaactgtgaagttcttgctcagaaaggcctttgtcttcaccggaaaggataaaatagttatagaagtccgtgaacatgctaacctgtgtctccagaacacccatatagtccatggaagaaaatccagctgagaaaacaaatcactaaactgtgataagaaaataatgaacaaacatgtaaatcctgtggggaaaaaaataaaggaagtatttacacttactttggagaaaacaaatactgaaacatgcttgctttttaactgatgtaaattcagtagaggacaacacaattcttttttctaaccatcttagggaacaatacattgcaataattgatataaatgccatcactgtaataaactttagagacttttttttataaaagttgttggtcatcttcttgtttgctgtaaacttcactctgtcacatgagtcggttcacagattgcttttgtctcacaaccaggaagaaaagcaaaaggaggagaacgtttaggttcaattaccagtctgcggtgtagactcagaagagactatgggtcactcatgttaacagtattatttataat

SEQ ID NO: 5680 - DNA, 677 bp, Macaca Fascicularis
gcctggcttgaatgtagattttaataattaaccttatcctgcaatgttgatagagtaactgaatatcagtaaattgtgtaacagtgatggatactgttgcataaggtgagctcctgaagagtgaagctaataccaatgttcttttcccctctgtgtctagtttaaggcttttagaagattgatctgtagcaattatttaatgaatcaaatatttaaaaaaattttatttgctgtctttggtaattatctctctgcttgaaatcaaatgtactgtaagttaatataacaagtaaaatacattatcttttgaaaatagtttctttttaaaggaatactaattaattgtaacttgtaaaactaaaagttctaatggtttctgaaagccagtgttgagtggaaaagtgtttctttagtttggaaagacctgtgaagtatcccagtcagagaaagaacctattttctcgaagaatgtaagttgctatatctggaggggcatgtaggacaggggttataattacttctgtgagagttaatgctttgtaacttatggtttatgatgcaatgttgtgttggttctgtattataaattgcaccttaatagaccaaaaatatctatacagcattgatttccttgaatattgtgtgttaaactgatatatctcatagtggcaaaaggt

SEQ ID NO: 5681 - DNA, 1901 bp, Macaca Fascicularis
cacggaattaggcagggagtgttataaaagccttggagtgcaagctctcagctgtcttagtaagaagagaagtcttcaatggatccttttgtggtcctggtgctctgtctctcctttgtgcttctcttttcactctggagacagagctctgggagaaggaagctccctcctggccccactcctcttcctattattggaaatattctacaaatagatgttaaggacatctgcaaatctttcagcaatttctcaaaagtctatggtcctgtgttcaccgtgtattttggcatgaatcctgtagtggtgttgcatggatatgagacagtgaaggaagccctgattgataatgcagaggagttttctggaagaggcattttgccaatatctgaaagaattactaacggacttggaatcatttccagcaatggaaagagatggaaggagacccgtcgtttctctctcacaaccttgcggaattttgggatggggaagaggagcattgaggaccgtgttcaagaggaagcccgctgccttgtggaggagttgagaaaaaccaaggcctcaccctgtgatcccactttcatcctgggctgtgctccctgcaatgtgatctgctccgttgttttccagaaacgatttgattataaagatgagaattttctcaccctgataaaaagattcactgtaaacttcaggattctgacctccccatggatccaggtctgcaataatttccctctactcattgattgtttcccaggaactcacaacaaattgcttaaaaatgttgctcttacaaaaagttacattagggagaaagtaaaagaacaccaagcaacactggatgttaacaatcctcgggactttatcgattgcttcctgatcaaaatggagcaggaaaaggacaaccaacagtcagaattcactattgaaaacttggttggcactgtagctgatctatttgttgctggaacagagacaacaagcaccactctgagatatggactcctgctcctgctgaagcacccagaggtcacagctaaagtccaggaagaaattgatcatgtaattggcagacacaggagcccctgcatgcaggataggagccacatgccttacacagatgctgtaatacacgagatccagagatacattgaccttgtccccaccggcgtaccccacgcagtgaccactgatattaagttcagaaactacctcatccccaagggcacaatcataataacattactcacttccgtgctgcacgatgacaaagaattccctaatccaaagatctttgaccctggccactttctggatgagaatggcaactttaagaaaagtgactacttcatgcctttctcagcaggaaaacgaatttgtgcaggagagggacttgcccgcatggagctatttttatttctaaccacaattttacagaactttaacctgaaatctgttgctgatttaaagaacctcaatactacttcagctaccagagggattatttctctgccaccctcgtaccagatctgcttcattcctgtctgaagaatgctagcccatctggctgccgatctgctatcacctgaaactctttttttatcaacgacattcccactgttatgtcttctctgacctctcatcacatcttcccatgcactcaatatcccgtgagcatccaacctccattaaggagagttgttcaggtcgctgcacaaatatatctgtaattattcatactcggtaacacttgtattgactgtcacatatgctaatacttttctgatgctgactttttaatatattatcactgtaaaacacagaaaagtgattaatgaatgataatttacatccatttcttttgtgaatgtgctaaataaaaagtgttattaattgct

SEQ ID NO: 5682 - DNA, 719 bp, Macaca Fascicularis
ggggcacgggggcccagtgctggccacagcagcgcagccgggccccaggagccactcaggccacagcccctggtgctgcaggtggcctccatccggagactcgagtccccatgattccctcctcgtcagtctctcaaagaccccatgatctatcccctgagggtggccagccaaggcttctgtcgcatgggatgccataaaagccacccagtgggacccatggtcacacagagcccctcacctgcatcctctcccccacgagagccctgaagagcccacgggagagggacgcacagcactgcctgccaagcgagaatgtagccgcagccccctcggcccctcacctcttctttctacagcctaatttattggattccctattcgtagccatctccatggccaatgtgactaccctgccagcagcgggggtggcccagcctctgagtcccatggggccctggctcccaccggtgccaaacccagcccctgtggccgtcaccccgccagcctacactgccagccgccaccggggcacacgggcctctgcttgccagccgggagtgcggacaccatgttcccagctcagtgccaaagaggggtcaccagggggagctgtctatagagccagcgcctgcccgagagaccccaccgccaccgtgtgcctttcccaggccctcagccctcgggccgggcgccacccccagtccccccagtaaaag

SEQ ID NO: 5683 - DNA, 448 bp, Macaca Fascicularis
cttctctgacctctgcttctcttccgtgaccattcccaagttgttacagaacatgcagaaccaagacccatccatcccctatgtggactgcctgacccaaatgtacttcttcctgttttttggagacctggagagcttcctccttgtggccatggcttatgaccgctatgtggccatctgcttccccctgcactacaccgccatcatgagccccatgctctgtctcgccctggtggccctgtcctgggtactgaccaccttccatgccatgttacacactttactcatggccaggttgtgtttttgtgcagacaatgtggtcccccactttttctgtgatatgcctgctctgctgaagctggcctgctctgacactcgagttaatgaatcggggatatttatcacgggagggctgattcttggcatcccattcctactcatccttggg

SEQ ID NO: 5684 - DNA, 725 bp, Macaca Fascicularis
  misc_feature (1)...(725): n = A,T,C or G
ccagccaggtaccaactgtnnnnnnnnnnnnnnnnnnnnnctctgcgggcactggtactacagcaaggcgtgctgccgctcctgcaggcccccccactcctaggcccggcagctgcagccccttccagacgaagacccagcgcccctcctggggctgctgcagcttctggggcctccacagacccccctcctgcagggcatgctggcctgagacgtggcactgagtctcggctgtcaagaggggacttcccacggcccatggacttttgggctcctggggcagagactccggcacccactggcctcccccagacagggccacccgtgccgtgggaacctgtctgtgttcctgcgtggatcctgtgtgtgtggctcccactccccagcccccagcagcccccagccgaggggcccgaggcccacagccagcagtggaggtgtcttgccccgggccggcagcccacgccctctctaggtggcagggccttctcaaggaaacttgcaggcgagcccaatgtggggggagcctccctccctcggagaccacagggtgagagggacacaggcagccaaggaggcccaggcgtgctccctcctatagagcccctcccgtggagctctcttcccgccgcactttctaccccgggcagaggcgcttgcccacgggacgtttggggatggaccgcgggccccgcccctgcagtcatcgtcagtgctcatctacg

SEQ ID NO: 5685 - DNA, 719 bp, Macaca Fascicularis
  misc_feature (1)...(719): n = A,T,C or G
acacagccttgctnnncatgtnnnnnnnnnnnnnnnncannnnnnnnnnnnnnnnnnnnnnnnnnnnctctgttttgtacacagttctcacccccgtcttgaaccccttgatatactgcctgaggaataaggaatttaagannnnnnnnnnnnnnnnntccggcttggcttgagctgtgccatagagggcaagctttctacctttctggaactccatctcggaatacacaaccagcccctctgaggaggccatttgannnnnnnnnnnnnnnnagtaccgcattcatttaaaaattacttccaaatccatttttctctttccagaaaaaaactgaggttgaggttaatatcataggtattgttgttggtgttgtaataccagtactttcttctttttatagatgcgcaaagccgtacttagtaaagcttaataaattttcctcgcctttaaaatgaccacgcacatttcagaaagcagcaaaacnnnnnnnnnnnnnnnnnntcgtaaagtcccnnnnnnnnnnnnnnntgttaaagcactgaaatgtttaannnnnnnnnnaaatgagctccacatgtccccaaagcaaaatgtgtctcggaagagtaaggacacgtagctttctgttttatacccaaagaatgttctctgattgtcctggatggacgcccctctgcctttttcctacgtaaacccctactccgtgcccagtcagctg

SEQ ID NO: 5686 - DNA, 726 bp, Macaca Fascicularis
  misc_feature (1)...(726): n = A,T,C or G
tatatgtaaataattttatgggaatgttccatcataatttctaaatcatttatataccaaggtagccttaatttgtgtatgtttcagtacaatgagattttattgcctctgggatgctgtttagtttgtattttgttaaacatttttatcttaggaagagaaacctacgacttctgtacctagatcatctgttacattaaaaagctgttctttcagcattagagatataaatgaatgttatcttgtggggaaacaatctaggttttagctgtatgagctatatttattatggtgctaatgtttaatagccacatttgactaacttctccattttctgtgatgctgtggctggcagcagagctcgccagttcatgcctggacatactgtcagggctgggccctccagctctcaaagcaagaatcttgatttctaaacccaggaattttagaattgacctttatgagtgaagacttttggnnnnnnnnnnnnnnnnnnnnnnnntgatcnnnnnnnnnnnnnnnnntccaagctcccttcccannnnnnnnnnnnnnnnnnnnnnnnnnnnnnnnnnnnnnnnnnnnnnnnnnnnnnnngcgatcttgtaaataggaaagccgtcacttaaattgtattgtttgcttattagccatgtatctcttaaaattttgttgtttacaacgatngtactttattggcaacaaattattagtttgatgtttaac

SEQ ID NO: 5687 - DNA, 1494 bp, Macaca Fascicularis
atggagctagatgcactggtgcccctggctgtgacagtggccatcttcctgctcctggtggacctgatgcaccggcgccaacgctgggctgcacgctacccgccaggtcccctgccactgccggggctgggcaacctgttgcatgtggacttcaagaacacaccatactgcttcgaccagttgcggcgccgcttcgggaacgtgttcagcctgcagctggcctggacaccggtggtcgtgctcaatgggctggcggccgtgcgtgaggctctggtgacctgcggcgaggacacagccgaccgcccgcctgtgcccatcaaccaggtcctgggttttgggccgcgctcccaaggggtgttcctggcgcgttacgggcccgcgtggcgcgagcagaggcgcttctccgtttctaccttgcgcaacttgggcctgggcaagaagtcgctggagcaatgggtcaccgaggaggccgcctgcctctgtgctgccttcaccgaccaagccggacgaccctttcgcccaaacagcctcctggataaagcagtgagcaacgtgatcgcctccctcacctacgggcgccgcttcgagtacgacgaccctcgcttcctcaggctgtttgacctaacacatgaggcactgaaggaggagtcaggcttcctgcgcgaggtgctgaatgccatccccctcctcctgcgcatccctgggctggctggcaaggtcctacgctcccaaaaggctttcctgacccagctagatgagctgctgaccgagcacaggatgacctgggatccagcccagccaccccgagacctgactgaggccttcctggcagagatggagaaggccaaggggaaccctgagagtagcttcaatgaagagaacctgcgcatggtggtggctgacttgttctctgctgggatggtgaccacctcgaccacgctggcctggggcctcctgctcatgatcctgcacccggatgtgcagcgccgtgtccaacaggagatcgacgacgtgatagggcaggtgcggcgacctgagatgggtgaccaggctcgcatgccctacaccactgccgtgattcacgaggtgcagcgctttggggacatcgtccccctgggtgtgacccatatgacatcccgtgacatcgaactacagggcttcctcatccctaaggggacgacgctcttcaccaacctgtcatcggtgctgaaggatgaggccgtctgggagaagcccttccgcttccaccccgaacacttcctggatgctcagggccactttgtgaagccagaggccttcctgcctttctcagcaggccgccgtgcatgcctcggggagcccctggcccgcatggagctcttcctcttcttcacctgcctgctgcagcgtttcagcttctcggtgcccgccggacagccccggcccagccaccatggtgtctttgctttcctggtgaccccttccccctacgagctttgtgctgtgccccgctag

SEQ ID NO: 5688 - DNA, 131 bp, Macaca Fascicularis
tctgcacaggagaacacacctgtgcacatatggaaaaggagcgcaaaaccccagagaggggacacagagagggaacacagtcacagggagagtgtgtctgacacccacaggtgtggggcgcgagattgtga

SEQ ID NO: 5689 - DNA, 737 bp, Macaca Fascicularis
  misc_feature (1)...(737): n = A,T,C or G
tacaaaggaagaatgnnntannnnagtannnnagcaaaagttccctggctaactatcatgagatccacttggttcatatgcctgttcctnnnnnnnnnnnnnnnnnnnnnaatnnnnnnnnnnnnnnnnnatgtttactgctggaaataggaaggacttcgtatgatgtgaagtgtacaaagccccagctgacaaggcagtgcaaccctggctattttctnnnnnnnnnnnnnnnnnnnnnnctgggcttcatttgcctgaaggaaggggtgcatttttctaatttgtgcgaagacattctgtgaactagctgtggccctggagccatgtatgtggatggggtcagccccactgaaccactgagactgtgagtgggagagggatagtcctctgaatgaaaattaggttcactatctataagggagaatggatgcacaagcagaactattggatatacatgacagaaagttaataccattactgtaattctgaatcttgccttgtannnnnnnnnnnnnnnnnaagtctactcaactcagctcaacccaatccaacaattattttttataggccaaaatgtgtgtgtgtgtgtgtgtgtgtgtgtttgtacacatgcctgtgtgctgggtaggnnnnnnnnnnnaaaaaaaaagaaaagaaaaagacagacctaccttcaaaaagcatgaagtattctcactttaagccatgccaactatgaaagtccttcttaaatt

SEQ ID NO: 5690 - DNA, 739 bp, Macaca Fascicularis
gtgtacagtagatgttagacctttgtatattagtgtgtttaagttattgatttgttttatataaaataatttatttttcaggtgccatttttcattttaactttgtttttacatgggtttgttttcaataaagtctgacactggtgtccaaaagtcaacaacaaaatgaatcccattgtgttcttttgaagatgcttatgtaacttttaagtttttaaaattattttcagaaaaaaaaaaaagaaagaaaagccctcaccggttttccatcagcccattgcctttttatttttatttttaatccttgtgaataaatgttctttagtgttttaggaggaaaaagcaaacctagattttgataacccagaagacttcagattaataaagaaactttgaaagaagaccatttttcaaaattttagtgaagtgtgaatattttttgtcaatggctttctcaaagagaatgaaacttttgcaccattttcagagtttttatagagatgccaaattgatatatttacatgtaatggaaacatgaaaaagttttattaaacaattgttcatagctgtgtagacattttaattcagtttccaaagctctcaaaaaagcgtatttttgaagtacggagtgatgcggtttggggcgtggcttacagttccaaacgactcaattgtccggatactcagttctttctgcaggtatcaggttcgtgttaaacgctgtatgttaactatgact

SEQ ID NO: 5691 - DNA, 738 bp, Macaca Fascicularis
  misc_feature (1)...(738): n = A,T,C or G
gacggtcactgttctggtgnnnnnnnnagnnnnnnnnnnnnnnnnnnnnnnnnnnnnnntggtctcattggttccactgccatcaatatggggtgtgcagaggannnnnnnnnnnnnnngatggagatccaggacagactgggggactccagaagaggcnnnnnnnnnnnnnnnnnnnnnnnaggaggtacttcctnnnnnnnnnnnnnnncagggctgctgtgtgggtgtgttaagcnnnnnnnnnnnnnnnnnnnnnnnnnnnnnnnnnnnagtcttgtgtcaggggttcccagcctccttttgtttcacttttgcccccttctctggaacatttgaccaaaaataatcctcatttcatcttgcgttaacagtcccttgtgtgccctgcccaggttgagaggtgannnnnnnnnnnnnnctnnnnnnnnnnnnnnnngctcagccatgttatnnnnnnnnnnnnnnnnnnnnnngcnnnnnnnnnnnnnnnnnnncagtccctctcccacttctcctgggtgccccctggcctttgcctctcctgtgtcctgtctttctgtgttttagaagtcagagcctctccttcaccttttgnnnnnnnnnnnnnnnnnnnnnnnnnnnnnnnnntctgccgcctgctggtgccttgtaaaggtatattcgttacaggccctagagcttctaatggtccagggttaagtgagaggagactgtattttgttcaaaggatcctca

SEQ ID NO: 5692 - DNA, 3202 bp, Macaca Fascicularis
aacatggcggcgcccagttggggcgggttcgttcgcttcgcgttttggccggggcgggggtctgggctttaggcaggtagtatttagtttcacaatgtttggggacctatttgaagagggagtattccactgtgtctaataatcagtatggaaaagggaagaaattaaagactaaagctttggagcctcctgctcctagagaattcaccaatttaagcggaatcagaaatcagggtggaacctgttacctcaattcccttcttcagactcttcatttcacacctgaattcagagaagctctcttttctcttggcccggaggagcttggttcatttgaagataaggataaacctgatgcaaaggttcgaatcatccctttacagttacagcgcttgtttgcccagcttctgctcttagaccaggaagctgcatccacaacagacctcactgacagctttgggtggaccagcaatgaggaaatgaggcaacatgatgtgcaggaactgaatcgaatcctcttcagcgctttggaaacttctttagttgggacctccggtcatgacctcatcaatctcaagcccttttgtgaacggaatgaattggatgacttagaatatatgtatgacctcttctcagttattatacacaaaggtggctgctacggaggccattaccatgtatatattaaagatgttgatcatttgggaaactggcaatttcaagaggaaaaaagtaagccagatgtgaatctgaaagatctccagagtgaagaagagattgatcatccactgatgattctaaaagcaatcttattagaggaggagaataatctaattcctgttgatcagctgggccagaaactcttgaaaaagataggaatatcttggaacaagaagtacagaaaacagcatggaccactgcggaagttcttacagctccattctcagatatttctactcagttcagatgaaagtatagttcgtctcttgaagaatggttctctccaggctgagtctgatttccaaaggaatgaccagcaaattttcgagacgcttcctccagaatccccaggtttaaacagtagcatctcctgtccccactggtttgatataaatgattctaaggtccagccaatcagggaaaaggatattgaacagcaatttcagggtaaagaaagtgcctacatgttgttttatcggaaatcccagttgcagagaccccctgaagctcgagctaatccaagatatggggttccatgtcatttactgaatgaaatggatgcagctaacattgaactacaaaccaaaagggcagaatgtgattctgcaaacaatactgttgaattgcatcttcacctgggccctcagtaccatttcttcaatggggctctgcacccggtagtctctcaaacagaaagtgtgtgggatttgacctttgataaaagaaaaactttaggagatctccggcagtcaatatttcagctgttagaattttgggaaggagacatggttcttagtgttgcaaagcttgtaccagcaggacttcacatttaccagacacttggcggggatgaactgacactgtgtgaaactgaaattgctgatggagaagatatctttgtgtggaatggggtggaggttggtggagtccacattcaaactggtattgactgcgaacctctgcttttaaatgttcttcatctggacacaagcagtgaaggagaaaagtgttgccaggtgatagaatctccacatgtctttccatctaatgcagaagtgggcactgtcctcacagccttagcaatcccagcaggtgtcatcttcatcaacagtgctggatgcccaggtggggagggttggatggccatctccaaggaagacatgaggaagacgttcagggagcaagggctcggaaatggaagctcagttttaattcaggattctcatgatgataacagcttgttgaccaaggaagagaaatgggtcactagtataaatgagattgactggctccatgttaaaaatttatgccaggtagactctgaagagaagcaggttaaaatatcagcaactgttaacacaatggtgtttgatattcgaattaaagccataaaggaattaaaattaatgaaggaactagctgacaacagctgtttgagacctattgatagaaatgggaagcttctttgtccagtgccggacagctatactttgaaggaagcagaattgaagatgggaagttcattgggactgtgtcttggaaaagcaccaagttcctgtcagttgttcctgttttttgcaatggggagtgacgttcaacctgggacagaaatggaaattatagtagaagaaacaatatctgtgagagattgtttaaagttaatgctggagaaatctggcgtacaaggagatgcctggcatttacgaaaaatggattggtgctatgaagctggggagcctttatgtgaagaagatgcaacactgaaagaacttctgatatgttctggagatactttgcttttaattgaaggacaacttcctcctccgggtttcctgaaggtgcccatctggtggtaccagcttcagggtccctcaggacactgcgggagtcatcaggaccagaccaactgtacttcctctcggggtggagtttggagagccgctttcagccaaggtgcttctgtgaatgagcctgcgccagtttctctcctctacttgggagacgtagagatctcagaagatgccgcgctggcggagctgaagtctcaggccatgaccttgcccccattcctggagttcggtgtcccgtccccagcccacctcagagcctggacagtggagaggaagcgcccaggcaggcttttacgaactgaccggcagccgctcagggaatataaactaggacggagaattgagatctgcttagagccccttcagaaaggagaaaacttgggcccccaggacgtgctgctgaggacacaggtgcgcatccctggtgagaggacctacgcccctgccctggacctggtgtggaatgcggcccagggtgggactgccggctccctgaggcagagagttgctgatttctattgtcttcccgtggagaagattgagattgccaaatactttcccgaaaagttcgagtggcttccgatatctagctggaaccaacaaataaccaagaggaaaaaaaaaaaaaaaaa

SEQ ID NO: 5693 - DNA, 735 bp, Macaca Fascicularis
  misc_feature (1)...(735): n = A,T,C or G
agacgtgagccaccannnnnggccctcacccagctacctttaaaaaannnttttagagacaaagagtctcaccatgttgcccaggctgatcttgaatcctgggctcannnnnnnnnnnnnnnnnnnnnnnnnnnnnnnnnnggattacagctgtgagccaccacacccggcctcagtgagtccatttgcttcaaacttaattctgtctgtatcgggaatagttactcactttcttgaatttcctattgggaaaaatgttttacatggagcctnnnnnnnnnnnnnnncacacttcaatcttttatgttgttagatgttcaggattgtgacctgtgaaatttgaagatcattgcctttatttttttgtttaagttacattttttttttgtaactgtgattattattatgaatgacagcagtaactattaggtgggttttgtggatttttgataaattgtcacaacttcataagtattggttctgctactatattgaatgtacttttagnnnnnnnnnnnnnnnnnntaattaaagtttgacaagtcttccaaacagttatccttttttttttaaagttttgaaaaaaagtttnnnnnnnnnnnnnnntataaacagagtggcatgacaaatgatgaaaatctgtctaaataagaggccaggcatggtggctcatgtctgtaatcccgggactttgggaggctgaggggggtgtatcacttgaagccaggagttcaa

SEQ ID NO: 5694 - DNA, 614 bp, Macaca Fascicularis
gcagcaatgtggaaaataagatattgcaatgggccaaagttaagtttaaatccattcacatgtatataattaagatatgtaggaattataattacagaaaagaatgttaaaaacatatcagatagattcttctgtttcaatccataaaaccagggtttggatcatttaaaaaaacaaacaaaaataatttattggaatcattagggaggacctgatagaataaatggacaagctgaccaaataggccttagaggggagaggttcctgggaagttacaaggacctacgtggcaggggtgactcggccacagtcattttctttacttgatttaagaaggttaaattacagtgagagagttgcattatctagtttgcatactgtactcaactcttagcccgcaaagggcaagttccttggttgaaaaatttccacaaaacatgatgtaaagtggaaagatgttcccccaaagaatatcagtaggatgaaaggatgttggatacatgaaaacaacagatatccattatagcaattaacaaaagttagggagtggggaagtttgagtgctaatatgtatttcaaaacaactttaaaaatggctccaaacattttatgct

SEQ ID NO: 5695 - DNA, 756 bp, Macaca Fascicularis
  misc_feature (1)...(756): n = A,T,C or G
acacagataatgacntggatgtaaaataaccagttttttctgctggggagtgtaaagggactctcgccaatgttggaatatacccatgtaagtctttctctagataactggggaagggaattcaggacatcactctcaggtcacactgtgtgccattgattggaatttagcaagtcgttttgttttatgatcaactgcttgctaatgtgagttccaggttcccaattatttctagatatccccacctgcctgtcccccacagctgacaaaagaaaccctccaaggaccctcttcaaattggaaaatctagttagtctttatagaaataactagaatatactaagccccatgccctaacttcacccttctcccctaaacatgactctttgggggatgaaggaatatttgaagttggtgaatgtggatttcataccatcaatctctgccttgagaaaaagtggctttatcattcccctcccctgaacagtgcagaaagtgtgtcttcatgagaacagtatgccgcaccacacacacccacgtgcatgtacctactcatgtgcacatgcaccacacacaggcacacccaactctcggaagaagaacttctgaactgcacggaatttcaatgcatactccaaaggcactaagaaactgcggttattctcagtgtgtcttactggaagtgtttcttgtctctgaagaggatggggcttcttaagtgatccattgtgtattgggggaaatgaggggagaata

SEQ ID NO: 5696 - DNA, 630 bp, Macaca Fascicularis
  misc_feature (1)...(630): n = A,T,C or G
annnnnnnnnnnnnnnnnnnnnnnnnnnnnnnnnnnnnnnnnnnnnnnnnnnnnnnnnnnnnnnnnnnnnnnnnnnnnnnnntcccgnnnangtctcatnntccctgggaacagagtggctgctgtgtgtgacccttccccnnnnnnnnngtcctccacagggggccctgggccctctgtctcacccatccccaccctgaggnnnnnnnnnnnnnnnnnnnnnnnnnnnnnnnnnnnnnnnnnnnnnnnnnnnnnnnnnnnnnnnnnnnnnnnnnnnnnnnnnnnnnnatggaaggccctgggctnnnnnnnnnnnnnnngatctccttcctgagaaggggactgtggggcacgtggaggggactcaggaggtgaggggtccccaggagcccctcccgtgctgcagccccannnnnnnnnnctctnnnnnnnnnnnnnnnngcagggtgagcgagccacgggcttcggtgtggccctcctgctggcgctcttcggccgtgcctctgaggaccctctgctgnnnnnnnngtccccgctgggctgcgaggtggatgtcgaggagggggacgtggagagggactccaagagacgcaggcttgtgtgagcctcctgcttcagccctgacaaacg

SEQ ID NO: 5697 - DNA, 699 bp, Macaca Fascicularis
  misc_feature (1)...(699): n = A,T,C or G
gaatcaaagtttttaaattgtcttntttntaatgatctctcaccaataattgtttgaaactatccatttnnnnnnnnnnnnnnnnnnnnnnnnnnnnnnnnnnnnnnnnttttctcttcaatcagaaataatacaatagaagcnnnnnnnnnnnnnnnnnnnnnnnnnnnnnnnnnnnnncttatacctacataagagttaaaatccagatgnnnnnnnnnnnnnnnnnnnnnnnnnnncatatattttctaaactggtacagagaagtgaaaaagatcaaattctacttcttaaaaatcacaaaaactagtttaaattgatgacttcatatgttcaaaatgtaacgacaaaaaaaaagccaaaacctgtcatttgtattaactgtttttttttttaatcaaaaattgtaatgttagaaacatagtatgaagtgcctttatctgcttagacctaacgaagattttaaagttgggttacacaggaaatgattatgcttcaatttcttagtagttaaaaagtgctaaatactacttgaaattattgtttannnnnnnnnnncaagagctggggttagnnnnnnnnnggactcttaacatccagatgccctcaaacatacagaacttccaaactcaagtccagccataagctattttgccaacatgtcagannnnnnnnnnnnnnnntatgtgatttctact

SEQ ID NO: 5698 - DNA, 759 bp, Macaca Fascicularis
  misc_feature (1)...(759): n = A,T,C or G
tggttagatacagatatttacagaaagtagggaggaaggggaccaagccagagagggacaggtatatgtacagggctgagctgcagagggctacaacttccatataaggtaggttttttgtggctgttttccattacannnnnnnnnnnnnnnnnnnnnnnnnnnnnnnnnnnnnnnnnnnnnnnnncccaggtannnnnnnnnnnnnnnnnnctgacttgggaagaatgggggtttacaggagtccaggaggtcctttccgctctcctaagnnnnnnnnnnnnnnnnnnnnnnnttttcccttcatttccacatccccccgtannnnnnnnnnnnnnnnnnnnngctcatctagggcatccttggtggtagaggagacatggatcttcagcgcttgaccatnnnnnnnnnnnnnnnnnnnnnnnnnnnnnnnnnnnnnnnnnnnnnnnnnnnnnnnnnnnnnnnnnnnnnnnnnnnnnnnnnagactggcccagtatggnnnnnnnnnnnnnnnctcagctggtcatggggtcggtggcggatgcgaaaggaagaaactgcatctagtaatgctagggccatacgagcannnnnnnnnnnnnnnnnnnnnnnnnnnnnnnnnnnnnnnnnnnnnnnnnnnnnnnnnnnnnnnnnnnnnntctccacctnnnnnnnnnnnnnnntgtcaattatggcatcaaagcnnntatacaggtcattaagaagtgtcactacctgcatgnnngtgctctctgctg

SEQ ID NO: 5699 - DNA, 760 bp, Macaca Fascicularis
  misc_feature (1)...(760): n = A,T,C or G
agtgactcagcctacacaagggtgggaacatttccatccccagtggagtctcttcctgtgtggtcttctctccccctctactccacattggccagtggactcatccattctgtggaacaattctcccccaccccaaannnnnnnnnnnnnnnggactcatccatgtgaggaggacttctcgccctgtgnnnnnnnnnnnnnnnnnnnngcagtcctcccaggctcatcnnnnnnnnnnnnnnnngcaccttcaccttccctcccagtgtagcctcccgtcagtgggggctggacccttcnnnnnnnnnnnnnnnnnnnnnnnnnnnnnnnnnnnnnnnnnnnnnnnnnactctnnnnnnnnnnnnnnnnnnnnnnnnnnnnnnnnttttctttgtccccatggtannnnnnnnnnnnnnnnnnnnnnnnnnnnnnnnnnntgcagccctgctgcaccatttcaccagacacaaggggaagaagcannnnnnnnnnnnnnnnnncacttctgccccctggggagttggggaaaggaacaaaccctggctggaggggataggagggcttttaatttatttctttttctgttgaggcttccccctctctgagccagttttcatttcnnnnnnnnnnnnnnnnnnnttccctgcctctcgctccagacctgttcccacaactggggaggtaggctgggagcaaaaggagagggtgggaccccagttttgcgtggttggtttttattaattatnnnnnnnacagc

SEQ ID NO: 5700 - DNA, 715 bp, Macaca Fascicularis
  misc_feature (1)...(715): n = A,T,C or G
gacattatgatattatgatgatgtcagtacattaaacttttcaatcccgttatgcaatcttgtttgtaaatgtaaacttttaaaaatatggttaataacattcaacctgnnnnttacaacttaaaaggaacttcagtgaatttgtttttattnnnnnnnnnnnnnnnnnnnnnnnnnnnnnnnnnnnnnnttttgatatccctttttcacgtgccagcggaatggggtgtttgatgtttcttcatatgtcaaggagatgcttcaaaatgtcaattgctttaaacttaaattacctctcaagagaccaaggtacatttacctcattgtgtatataatgtttaatatttgtcagagcattctccaggtttgcagttttatttctataaagtatgggtattatgttgctcagttactcaaatggtactgtattgtttatatttgtaccccaaataacatcatctgtactttctgttttctgtatnnnnnnnnnnnnnnnnnnnnntggctttatcagtgtaatctctgccctttaagatatgtacagaaaatctacatacaaatttccatttaagtcgaatgatactgagaagcctgtaaagaggagaaaaaaacataagctgcatttccccataagttttttaaattgtatattgtatttgtagtaatattccaaatgtaaataggaaatagaagagtgatgcttatgttaagtcct

SEQ ID NO: 5701 - DNA, 755 bp, Macaca Fascicularis
  misc_feature (1)...(755): n = A,T,C or G
agtcaatactgactcctcacaaacagtaantnagcattttgtgatgcctttgattccactttacagggactactgttacttgcgaaatgtctaagatttttagtcttaaatttttgaagaccgctttcgtcctctatctcccagagaattgagaagaaataaactcctgcccattaacaatctcagtccatgaacaaaaccaacatcaacattcctaaacaagtgtgttactctaagaaggtggctctagaatttatggaaatggcttatgcaactttcaagactggagaacagaatgtgactggccttttctaatggtcctttaagatttaatgattatttaaagcaagcgttttactttttataattgactttgtggtctgaattcttgatactgtttataatttgacaaagaactaaaattgttatgtactataggcacttaagaaccctgaggaaaaataacacaggtgtgggtgggtgtgtgtgagagagagagggttactaatatgtaagtgccaaaaaaaaaaaggggggggggcgttgaaatggtaaggaattggaatattttagagcagtaagaattcctaatcttagtacgtgtcttgtttcaagtagaggtttgttaggaattacaattgtggggagcaaacttttgtgctattttaatccaaaatgtatattcttaattgtatataatatatggataaatatatgagggtattaagctactttgaattaaatttaaggatata

SEQ ID NO: 5702 - DNA, 181 bp, Macaca Fascicularis
cggccgcccttttttctgtgtgaccccccaacaggtggctgcccctctctgaactttgtggccgctcctgtgaaccgagcaagttgaacccagtcttggctttcccatcccaacgaatgatttatttggttaaactatgacccaaccaggtggacatctgaaaatgcaaagaagaaggaag

SEQ ID NO: 5703 - DNA, 729 bp, Macaca Fascicularis
catagtatcccaaaggatgtgtttactcccctgtgaaagttactactttcctttaaaaatggttttgtaataagactatttaaaacctttccagtattggtacatcttggcttctggcccaaacccaagcagaaaagaaaatggaataatggagcattgtttttccacgttagtattagggcatcagattcttggtaaaacactataattaagtagttataattaaataactgttcttcatacttaggactcgtaatacgtttctttaagacttgtaagtataattgcaaagcttgttaactgtttatatataaagaagaagctttacaaaataagactgaaattcaggataccacagtaaagttttatctgtacagcgtgacaactctaacaaaaaggatagcagcccttaaaattttagcttaaggacattttaaaattgcatgagattagcaaaattattaatttaaaacctcaaagtaaattgcaaattttaaaatttatttttgactcttttatcacatgctctaatgtatgtacataagtttctgtggcttaaataatatgttgttatttgatacatttttctggtgcgagtaattaatgttattatttgattgttataccatatgtgcccattaaaattctttttaattacaaatatttcaaatatacagaaaaataataatataaatgcccttgtacccttcacatactattttgccatat

SEQ ID NO: 5704 - DNA, 733 bp, Macaca Fascicularis
  misc_feature (1)...(733): n = A,T,C or G
caggggcacccgctacatcgcagtctccttcgtcgatccctaattgaccagacctgaccctcttggacctttcttctttgctgacaaccactgcccagcagcctctgggacctcggggtcccggggaacccagtccagcctcctggctcttgacttcccattgctctaggagccaccaatcagagagattcagagagannnnnnnnnnnnnnnnnnngaacacaccnnnnnnnctggggctctccgtggtgctctggacccagcccctggagacactgttcacttttactgctttgtagtgactcgtcctctccaacctatcttcctgaaaaaccaaggcccccttcctccacctcttccgtggggtgagacttgagcagaacaggggtttnnnnnnnnnnnccagaaagactctgtgggtgagaagccacagccagagcttctcccaggcacagctgttgcaccagnnnnnnnnnnnnnnngttttggggtaaagacgcctagatcagactccaagggccgtcctgagtttgggacttctgcctccgtggctggtcatgagagcaaactgtagtcccctggagannnnnnnnnnnnnnnnnnnnttgggagacagaagnnnnnnnnnnnnnnnnnncagtcttctacttgcctgtggggaggggagtgacatgtccacacaccgtactgggtcaccctgtcnnnnnnnnnnnnnnnnagagggacagaccgt

SEQ ID NO: 5705 - DNA, 682 bp, Macaca Fascicularis
  misc_feature (1)...(682): n = A,T,C or G
tataatcatggaagtcaagctttttggaggtgaggagagaactgagggtccaggacactgaatggatcaccagatgctgaaatcactaagtcgtgttggagtgacaaggaaccagaagtgccaagcagctactagggtcagtcaaggatagcaaccacaagagcaagtgggtggtatgacctgctggcatgggacacagagccaggagggccttgggagagggaaagaagagggaaacaggcaccactggagagacctgcaggggcaggagtaccccaggtcagagcaggtttcagcaagaccaggcaggtgatggggatgttcaggaaaaagtggaggatatgggggattctactgaggactgactgtgtcttccagcccagagtgtctcaaactttaatgtgcagccatgtcgcctggggagtcttgttaaaatacacatcctgggccgggcgcggtggctcaagcctgtaatcccagcactttgggaggccgagacgggcggatcacgaggtcagnnnnnnnnnnnnnnnnnnnnnnnnnnnnnnnnnnnnnnnnnnnnnnnnnnnnnnnnnnnnnnnnnnnnnnnnnnnnnnnnnnnnnnnnnnnnnnnnnnnnnnnnnnnnnnnnnnnnnnnnnnnnnnnnnnnnnnnnnnnnnnnnnnnnnnnnnnnnnnnnnntg

SEQ ID NO: 5706 - DNA, 706 bp, Macaca Fascicularis
  misc_feature (1)...(706): n = A,T,C or G
agcagagaatgnnnnnnnnnnnnnnnnnnnnnnnnnnnntcagactgtgtggccacaggtgttccagtcgttgcctcaaccccacagaagttcctcagggggatggacaggagaacatcagagaattgtctaaaatctttcatagcagaatgaaaatggagccggtgaaagtaaattaaattttgggacccccgaactcatgtagccaaagggaaaaatcaagctgggaactgggtcacgcaaatctgccttctccatttggttcctaagtaagatggctacaagatgaaaagctacatgccttccccatattttgcctacagggaaattcctgaggagctgcaagatcttttaaggtgtttctgttaaaatttcaacatgccaatgcaaattgatnnnnnnnnnnnnnnnnnnnnnnnnnccatggctcaccagacacnnnnnnnnnnnnnnnnattcccttactccatttttgcctgtgttatcatatgtaaaatgnnnnnnnnnnnnnttttttcctctgccccatttgtctaggtcatcttatggaaaaaaaaaaatgccgattcactgaggcagacaaaggcatgaataactatttttccctaactccctgttacatgcaaattgtgtacttctcaataccccgccttttcccctttaaatttggagccctcaaaatcatcttcagagaaaggcatagacc

SEQ ID NO: 5707 - DNA, 170 bp, Macaca Fascicularis
ctttggagagacactggggggcccttggctgtcactctctgtgcatggtgtgaccccacaccccttttcccagcacggtttttcttctctccacactgggaagatatgtctctgtctacttttcactggggtgggggagcacggggtttgacacgacagagaccctggga

SEQ ID NO: 5708 - DNA, 755 bp, Macaca Fascicularis
  misc_feature (1)...(755): n = A,T,C or G
agggaattttaacttttctaccttgagtcaagccaatgaagggaaaaatgaattaacttggtaaatttgaagtgcagctctgttagctcgtacgtgtgggttcttatcctgatcctgtgccttaaaaagtaggaaggtgtttccaagttcagattaaaacagaagcagctgactgggcctggtggctcacgcctgtaatcccaacactttgggaggccaaggtgggcggatcacctgaggtcagnnnnnnnnnnnnnnnnnnnnnnnnnnnnnnnnnnnnnnnnnnnnnnnnnnnnnnnnnnnnnnnnnnnnnnnnnnnnnnnnnnnnnnnnnnnnnnnnnnnnnnnnnnnnnnnnnnnnnnnnnnnnnnnnnnnnnnnnnnnnnnnnnnnnnnnnnnnnnnnnnnnnnnnnnnnnnnnnnnnnnnnnnnnnnnnnnnnnnnnnnnnnnnnnnnnnnnncaaaaaataaataaaatagaagcagccttgtaactgtatttaccatgatagtatattctgcacggtaaaaattccttttacagacattctttatcgagaggtcggcccttctttttcaggcacctaagccaaatgcagacctgtgtgtagctgtgtgttttcttctgtgtttgccgcatttattccacctccagctggaccccacactgcaaatagagaacaacggtggggggtgcaggttaaaaagtagagaatgtcctttctgttcaactaatttcacatgacagtgcatgtat

SEQ ID NO: 5709 - DNA, 2254 bp, Macaca Fascicularis
  misc_feature (1)...(2254): n = A,T,C or G
cttttttgtgcttgacaaaagtgcatagatagaagacagggattcccggctgggaggagggaggagagctgaagatccctgcctgggctggctgagctaagcagtcaaagtgggaagctgagtgcttgaaagaggattatgctcgcactagaaataagcaatctgtggttctctggtcagcaagttctggcaaggaagccactgccactggcacaaagaattctgggatgtctgacagtgaaatggatggaagaacccacattccatctctacttaatgtccttttgtccagaaaccgggtcatgcaaatgagctacttgaaaagtaaagaacaaggatatggaaaactaagcagtgatgaagacctcgaaataattgttgatcaaaagcagggaaaaggctctagggcggcagataaggctgttgccatggtgatgaaggagataccgagggaggagtctgctgaagaaaagcccctccttactatgacatcacagctggtgaatgagcaacaagaaagcagacccctcctgagtccctccatcgatgactttctctgtgaaaccaaatcggaagcaatagcaaggccagtaacatccaatacagctgtactgaccactggcttagatctccttgacctgagtgaaccagtctctcaaactcaaaccaaagccaagaagtcagagccctcatcaaaacttcatccctcaagaaaaaggccgatggatctgacctcatcagcacagatgctgagcagagaggccagcctctcagagtcccggagacttcatccttagacctagacattcaaacacaactggaaaaatgggacgatgttaagtttcatggcgatcgaaattccaagggacatccaatggcagagagaaaatcatgctcatctagaactggatcaaaagagctcttatggtcctcagagcacagatctcaaccagaactgagtggtggaaaaagcgccctcaactctgagtcggcttcagagttggaattagtggctccaactcaggctcgactgaccaaagaacatcgctggggaagtgcattactttctagaaaccactccttagaagaagagtttgaaagagcaaaagcagcagtggagtcagatacagagttttgggataagatgcaagcagaatgggaagaaatggctcggaggaactggatatctgaaaaccaagaagctcagaaccaagtaaccatctccgctagtgagaagggatattactttcacactgaaaaccccttcaaggactggcctggagcatttgaggaaggcttaaaaaggctgaaggaaggggacctgccagtcaccatcctgttcatggaagcagcaattcttcaggaccctggagatgcagaggcatggcagttcctcgggataacccaggcagagaatgaaaatgaacaagcagctattgtcgccctccagaggtgcttagaattacagcccaacaacttaaaagctttgatggccttggctgtgagttatactaacactggccatcagcaggatgcctgcgaagctctgaagaattggattaagcaaaatccaaagtacaaataccttgtgaaaagcaagaagggatctccaggcctcacccggcggatgtctaagtccccagttgacagctctgttctggaaggagtgaaggaattatatctggaagctgcccaccaaaatggagatatgatcgacccagacctacagacaggtctaggggttctgttccattctcaccattatttggcaacttgcagagcatttttagtaggactttctccagtatatgtagtatccatcagatctaagattttttgtaggctgtcaagaagtccagaattatggcccaagaggaaaagagttgcatttttcaataatattttttataaaattaggtaaaaaccattattaaaacatgagtgacaagctgggtgtggtagctcacgcctgtaatcccagcactttgggaggctaaggcgggcagatcacgagatctgaggtcaagagcagccgaccaacatggtgaaatcccaactttattaaaaacacaaaaattagtcacgctannnnnnnnnnnnnnnnnnnnnnnnnnnnnnnnnnnnnnnnnnnnnnnnnnnnnnnnnnnnnnnnnnnnnnnnnnnnnnnnnnnnnnnnnnnnnnnnnnnnnnnnnnnnnnnnnnnnnnnnnnnnnnnnnnnnnnncaaaaaaaaaaaaaaaaaaaaaaaaaaaaaa

SEQ ID NO: 5710 - DNA, 682 bp, Macaca Fascicularis
  misc_feature (1)...(682): n = A,T,C or G
acacctacactgagcagtttcaactgaagagtccagggaagccctctgcagatctttgtaggtcccctcttcgtagcccgttcttctctctggtgctctgccttcaaattctggctgctttgacttttctcaaatcctcaacattttcttttcaacacactgggaccaccgagctctatttgcattcttttttcctgcacggtggccctagagctgtcctcagaaatgttttgcctattgtccagtgtctgaaaaccattgttccatatatttggttcagtttgtagttatctggtagacacagtggctcacgcctgtaatcctnnnnnnnnnnnnnnnnnnnnnnnnnnnnnnnnnngaggttaggannnnnnnnnnnnnnnnnnnnnnntagcaagaccacagatccaggttccctgctgaggatctcctcctcattagatgacttcttgtgcagcttctctgcctggttatttactcttgtggcactgagaggtttgcacatatcnnnnnnnnnnnnnnnnnnnnnnnnnnnnnannnnnnnnnnnnngtctcacttggcgaacagcatctcctacatggcagaaatctgaaaatgccccttgagaatccttcttcatnnncttgtgatgactttcggtgagaataaatnnnnntgaggcnnnnnnttataatcaaagt

SEQ ID NO: 5711 - DNA, 706 bp, Macaca Fascicularis
gaaccaaacagtgagcctttattttctccagtgtcagaagttccaaggaaagcaaaagctaaaaaaatagaggttcctgcacagttgaaagaattagtttcggatttatcttctcagtttgtcatctcacctcctactttaaggagcagacaaaaaaacacatccaataagaacaagcttgaagatgaactgaaagatgatgcacaatcagtagaaactgtgggaaagccaaaagcgaagcgaatcaggacatcaaaaacaaaacaagcaagcaaaaacacagaaaaagaaagtgcttggtcacctcctcccatagaaattcggctgatttcccccttggctagcccagttgacagagtcaagagcaaaccaagaaaaactacagaagtgacaggaacaggtcgtggaaggagcagaaagaaactatcttcgtatccaaagcaaattttacgcagaaaaatgctgtaatttcttgggaagtttttaatgtacacctatttgtaaagtcatcagaatagtgtggattattaaatatctagtttggaagaaaataatttatataaattattgtaaatttttatgtaaacagaaggtcttcaataagtaagtaactccatatggagtgattgtttcagtccaggcaatttttctattttatattaagacttcatacatttatataatatgtaaatatccttcttaagga

SEQ ID NO: 5712 - DNA, 817 bp, Macaca Fascicularis
  misc_feature (1)...(817): n = A,T,C or G
gaaaatacttaaatttaaaataccttcggatatttgagttttttaaattgctaatttaatatgtataaaaagcagctaaacactggtactttataaaaatgaaacagcattttgaaacaaatgttacagatctataaatactcattatatagaataaaccctagttatttgcatgcaccacctcaaatcatgtttctttacattgacctattatatacacagagtatgcagtggttaatgatcttctcttctgttcggaaatttcctcaataaggcagaaaacttcaggtattattttcaccagttaggagaaattgtaaggaagtccttgacccatagagaaggtcactgttagatacttgtttctgtcataaaacagaaaccagtaaagaaataatttggtaatttaaaaacaggttcataaaaagaaaatacctgcaggtaatttttatggtcagttatattctataacctgaacactgaaaactaaaaactgacaaactattattatctgagcacagcacatgctttaataggaaataaaaatgcatgaatggtaatcagttatttgttaaactcccaactggggtttctgttactgaagaaaaaaacaacttaaatattgcaagagtacaaataagctgacctcagagaggcccagtgcactgatgnnnnnnnnnnnnnnnnnnnnnnnnnnnnnnnnnnnnannnnnnnggagagcccccgctgggcagccctggtcactgctagatcttgcgagcacagatttcagtatnnnnnnnnnnnnnnnnnnnnnnttcatgtaaaaagttggtg

SEQ ID NO: 5713 - DNA, 744 bp, Macaca Fascicularis
  misc_feature (1)...(744): n = A,T,C or G
gaagaaaattctganaaaaaagcaaggctttcaatttccatcctaaattattcatatataatattggtgggggggaataattgagcaggatttctttaaattaaagcatgttttatctgagggaaattctcactaatgtctcttccttcctctcagagcctttccacaaatccaacaagaatattctctttactgggatagaactggaggctaatagctgcatgaactggctcttcctgagtcactcacattactcagggggttccattcatgctaaaataacaccttgtaagtcacgtggaaagaagctgcagactgaacaaacaagctgagcagttctactagtgaagatcaacatgggaaagttagcaagtctttgtttttcccatccttatcctttatcagtaaataaacatgagttcttgatattctttttcctgtggagtccctcatttggacaatactgtagtctcattttaaggtacaaaattcagtgcatgcttggaggattacagcatggagtcatgatattcacaccagagatgaaaggccagttagtagtagctccaggggtttttgctgtccccttgctcagtttctctagatttctttccttttgctatacaattgcagtgtaaacaaccttagggaaattataatgtttagacttaaagtaagaagaaataaagatggaccactaaagaactgtagtaatctatttttaaattgatattgtgtctcatt

SEQ ID NO: 5714 - DNA, 740 bp, Macaca Fascicularis
tgccagcctgctcggtccagcaccccttctcctggagggtgcccagcagcctgccagcagttactgtgaatgttccccaccgctgagagactgcctctgcacccggccgctgcccaggtggggtttcctgcatggacagttgtttggagaacaacaaggacaactttatggagagaaaaggaggggacgggacagacgaaggcaaccatttttagaaggaaaaaggattaggcaaaaataatttattttgctcttgtttctaacaaggacttggagacttggtggtctgagctgtcccaagtcctccggttcttcctcgggacttggcgggtccacttgccagggctctggggggccgatttgtggggacctcagcctgtacccccttctcctctggcttccctctcagaaacagccaaactccaggctgggctgagccaaagccagaagggccacgggcccgggagggtgagctggtgcctgctttgacgggccaggccctggagggcagagacaatcacgggcggtcctgcacagattcccaggccagggctgggtcacaggaaggaaacaacattttcttgaaaggggaaacgtctcccagatcgctcccttggctttgaggccgaagctggtgtaactgtgtccccttagcgcaagccacagcccgtcttgtttgtcaggtggaccctgtaaatacatcctttttctgctaacccttcaaccccctcccctcctac

SEQ ID NO: 5715 - DNA, 503 bp, Macaca Fascicularis
  misc_feature (1)...(503): n = A,T,C or G
tagaagctaccagcctaagccaaaatccatgaggttcatgtgaacttacagttacacaaataagaaacaaatggtatatccaaaaccataaggaaatattctgannnnnnnnnnnnnnnnnnnnnggtgaataagtccacacatttatttcaagttgttaaagagtttgtgggccacgcaatggtcccttgcatgcaagaagtctaagagctcctccgtgcaatcctcttctgtacgtgatcgagaggatacacgcttatcacagagctctagccgctcccgggcctttacacatttctccaactgctcgcattgctctctcactgttgttaggggatccactaattcctcctcttcctcttcctccttctcaggatctccggactcggtaagcatctttcgctcgtcctccagtcccatgtctggctacggttctagattcaacaagagcagcaacagcggcacctaatccacnnnnnnnnnnnnaaggacttgtaagggtc

SEQ ID NO: 5716 - DNA, 729 bp, Macaca Fascicularis
  misc_feature (1)...(729): n = A,T,C or G
agatgagcccnncacccagtggaaaggaaccnnnnnnnnnnnnnnnnctataaatcnnnnnnnnnnnnnnnnnnnatatgatggaattgactnnnnnnnnnnnnnnnnnnttcacagagatgaaagagtttnntctcttaaannnctttctgacaggggtgcatcatctcacgttagtgatgccaaccttgcaaataccataattggcaaagcagtggaacacatgtttgagggagagcatggttctaaggatgaatggaggggtatggtcttagctcaagcacctatnnnnnnnnnnnnnttttatattacctatgagaaagatcctgtcttgtacatgtaccagcttctagatgattataaggaannnnnnnnnnnnnnnnnnnnnnnnnnnnnnnnnnnnnnnnnnnnnnnnnnnnagccaggaggagttgtagatggcctgataggtaagcatgnnnnnnnnnnnnnnnnnnnnnnnnnnnnnnnnnnnnnnnnnnnnnnnnnnnnnnnnnnnnncaaaccnnnnnnnnnnnnnnnnnnnnnnnntgatgatttccatatctatgtctatgatttggtgaaaaagtcctaactgttagggtaaaatttggcacatnnnnnnnnnnaaatgtataatttgtagacatgcaaaaaatgttgcctttcagtgtattgaaagcttatggaatccctgataacccaaacatctttgccagcattaactgt

SEQ ID NO: 5717 - DNA, 2609 bp, Macaca Fascicularis
  misc_feature (1)...(2609): n = A,T,C or G
tatgaatgtaatcctgtgctgggtctcacaggactaagatatttaaacggttacccccaaacagctggttgatggttaagtttatgatttaaatataggagcagtggcttgcacctggtctcagctacgggggaggctgaggtgggaagatcacttgagcttaggagtttgaggccagcctcagcaacatagcaagtctccatctctgaaaaccctaacttatgagtgcaggttttcataacctaatggaaagcaagcacaacagagagcatttgctttaagtcacctgcaacattatgagtgatgttaccaaaatgtttcaactctgaactgtctcaactggatctgaaatcattagaagtaatttctcttacaaacatgtttattgctgtagtagtattactaacatgcctaattattttggtcatttttttctgtcatcactctagtttttttggagggagtagtatttgttaatctcagtacctctggaaaaacagattataaatgagatcaaagctggcaggttttgtttttttttcagatggaatcacccaggttggagtgcagtggcctgatctcagctcactgcaacctctgcctaccaggttcaagcctcccaagtagctgggattccaggtgtgtgccaccatgcccannnnnnnnnnnnnnnnnnnnnnnnnnnnnnnnnnnnnnnnnnnnnnnnnnnnnnnnnnnnnnnnnnnnnnnnnnnnnnnnnnnnnnnnnnnnnnnnnnnnnnnnnnnnnnnnnnnnnnnnnnnnnnnnnnnnntggcaaagctaggagttttcttagattaagtggaagaactatcggcaggaagagaaacagcttacctgctttcagagtctacgtcttggaatattagatgtgctcaaatttgaagctgattcagtctgatgcacaggttttaattcccctcatgttactggtagctgcggctgctatgtttttcttccggaagagtgctggagcagcttctgtttctgccgcggacactttccctatctaatattcacagcagtgttgcaaaggatagattcatgctggtacacgtgcttaaaagcttttggtaggaaggggaataattcaaaacacagatctggtcacttggctatgatactaaaacaacttacccgagggggcggagcaagatggccgaataggaacagctccagtctccagctcccagggcgagcgacacagaagacaggtgatttctgcattatcaactgaggtactgggttcatctcactggggagtgctggacaattggtgctggtcagctgttgcagcccgaccagcgagagctgaagcagggcaaggcatcgcctcatctgggaagcgcaagggggaagggaatcccttttcctagccaggggaactgagacacacaacacctggaaaatcgggtaactcccaccccaatactgcgctttaagcaaacgggcacaccaggagattatatcccacacctggccaggagggtcccacacccacggagccttcctcattgccagcacagcagtctgctatctaacagcaaggcagcagcaaggctggggtaggggcgcccgccattgctgaggcttaagtaggtaaacaaagccctgggaagatcgaactgggtggagctcacagcagttcaaggaggcctgccagtctctgtagactccacctctggggacagggcacagctaaacaacaaagaaaagcagcagaaacctctgcagacacctctgcagactctgtctgacagctttgaagacagcggtggatctcccaacacggaggttgagatctgaggacagacagactgcctgctcaagtgggtccctgatccctgagtagcctaactgggagacatcctccactaagggcagaccaacaccccacacctcatacggtggagtacacccctgagaggaagcttccaaagcaagaatcagacaggtacacttgctgttcagcagtattctatcttctgcagcctctgctgctgacacccaggcaaacagggtctggagtggacctcaggcaatctccaacagacctacagctgagggtcctgactgttagaaggaaaactaacaaacaggaaggacacccacaccaaaactccatcagtatgtcaccatcatcaaagaccagaggcagataaaaccacaaagatggggaaaaagcagggcagaaaagctggaaattcaaataagagcgcatctccccctccaaaggaacgcagctcatcgccagcaacggatcaaagctggacggagaatgactttgacgagatgagagaaggcttcagtccatcagacttctcagagctaaaggaggaattacgtacccagcgcaaagaaactaaaaatcttgaaaaaagagtggaagaactgataaccagaatacttaatgccgagaaggccataaacaaacggacagagatgaaaaccatgacacgagaaatatgtgacaaatgcacaagcttcagtaaccgactcgatcaactggaaaaagagtatcagcgattgaggatcaaatgaatgaaatgaagtgagaagagaaatctaaagaaaaaaaaaaaaaaaaaaa

SEQ ID NO: 5718 - DNA, 439 bp, Macaca Fascicularis
gacccgccaagatgggccgcgttcgcaccaaaaccgtgaagaaggcggcccgggttatcatagagaagtattacacgcgcctgggcaacgacttccacacgaacaagcgcgtgtgcgaggagatcgccattatccccagcaagaagctccgcaacaagatagcaggctatgtcacccatctgatgaagcggattcagagaggccctgtaagaggtatctccatcaagctgcaggaggaggagagagaaaggagagacaattacgttcccgaggtctcagccctggatcaggagataattgaagtagatcctgacactaaggaaatgctgaagcttttggacttcggcagtctgtccaacctgcaggtcactcagcctacagttgggatgaatttcaaaacgcctcggggacctgtttgaattttttctgcaatgctata

SEQ ID NO: 5719 - DNA, 752 bp, Macaca Fascicularis
  misc_feature (1)...(752): n = A,T,C or G
gaggncnnncngggcacccgctgtgcatggagccagagtgtggagccccagatcctttagtaatgcttcccctggccctgcaacaggcctggtcacctcggctgggccgggggctgagttcagcctcactgcctgcttattgcctctttctcagaatcctctttcctccccatttggccctgggctcaggggaccaggtggggcgggtggggagctgtccggtgctaccacaccgtgccctcagtggactaaccacagcagcagccaggggtgggccctggaggttcccggccggagagtgcctctcccctctgccaccaggtctttggtgcgggggggaccacaaagccattctgnnnnnnnnnccagaggaaggtnnnnnnnnnnnnnnnnnnnnnnnnnnnnnnccctacccccaccccccgggccacctcgagaagcacagtttaactcaccacgggctcctgagcctgcttctgcctgctttccacctccccagtccctttctctggccctgtccatgtgactttggcccttggttttctctccagattggaggtttccaagaggtcccccaccatgggagtgacaatgggcgcttcccttttgtgggcagctgcaggccccatgcctctcctccctctctggcagggtcccatcctgggcagaggggcctggggctgggcccagagtccagnnnnnnnnnnnctcctttcccagtttgatttcaataaatctgtccactccccttt

SEQ ID NO: 5720 - DNA, 2904 bp, Macaca Fascicularis
  misc_feature (1)...(2904): n = A,T,C or G
aggaatgcaacaaaggcaatgcccactgggaaatttataccactgaatgtatattaaagagaacaaagatctaaataaataatctttcccattgggaagctagggggaaaattaaaattaaattcaaagtaagcaagtaaaagcacgataaataatgaatacaattctgagcagcgtgatatctgatttctggaggctgagttttatgtggctttagaagtttcatgttatgagtgtgaattggcaagtgaccgtggcgattgtttctgatatggccatctcaattacgtagcgaagggatcagcagtggcatcatcccagctctgcatggcaccacaccagtgattctccaaagtcaagaaacctgtatatgttgtccttcttgtgtttggtgaatctgtggtctatagactacataacgggctatttctggggtactgactattttgctccactaaggaaaaccatgcgtgagccatgtaactatgtgaaacaatgttttccttttttgacacctggcctactcctttcagatgagagcaaaggaagagcaccacttggcctgctgcacccagggcaatttataccatccaggtatccagcactgaatatgtagcaactccaatccactgcagaacattaatctatctatgataaacatgctaatatctacgattctgcctttgtggggagatgactccatagattaaccccctggcttgggtcaatattgagatgttatattgtcttcaacagggaagatgacataaaaattacgttcaataggattatgtggagacttaacataagcgaaaaacctgagacaagaagttagaaatccttgtttcttttaggtgaataattttggagcttgagaaaacgacaccattgtggcaaacttgctttgccaaaccctgtgtatgcatttctgggtaaacacacattttcgtcctttaagcattgtttccattatttataattcctaatagtatgagacatttggaactcattccttggttcttcttctctcattatatctttcattgtatctttcagtgttacgagagatgcatcatcccattaatgaaagcagagtgactgccttcatcacacatacattcaagatagaccgctgggctagtgatgattcactcttaaggctattatgtttactcatttaaaaaatctgaatctcagtatggattttattctcagagagtgactgacctatctgatatgatgctatgacagaatctttactttttacctgaatttgatgggattgaaagttgagaacattttattttctgtttcacttgattaataatgcccaatctaacatgtaatgttcacttgggtacatacatacaactacaccaattttttcttattttaccttaaaaattttaagatattataatggtatggccagtttactcactggtaaacttttcgtaacagaaggatcatgccagtggatacaaatatgtaacatcagtaatttgctttgcctgtgaaacagagaactgaataaattgatgggcaaactagtatctgaatataaaccccaaatatcatgtgacttcatcattttcagtataatgaaaatacaggctgtgaatgcttccagttggtcctgaaagggcctttgagatgagtaggttcaccaaagcggcaacatgtgtcccagttcccagtgtacattctactcctcannnnnnnnnnnnnnnnnnnnnnnnnnnnnnnnnnnnnnnnnnnnnnnnnnnnnnnnnnnnnnnnnnnnnnnnnnnnnnnnnnnnnnnnnnnnnnnnnnttgatgatatggaagaagaacactctttggcctgttgcgactgggacagttgacagcacccaggtgtcctgtaatgaaaatgctcttgacaccaatgcatcctagcatcagagcttcgggaagccttctcaagtgtgcatggggagtaccatgtctttcatcaataatgaaaccttctaatgtcttgtaagacatgctgccaagagatgtgccattctattataaaagatcagtagcttcctttactgacaggtatattctacatagaacattgagctacagaagactcccacctgagggaattagttttacactttcagtgtttcactgttttgagttactgatgaacttgctgtaactgtgagaccatggtaatggaggagaccacggtaatggaggagaccacggtaatggaggagaccacggtaatggaggagatcatggtaatggaggagaccacggtaatggagaggagaatataaagactgctcagaagagcatcctctggtgttgccacagaggcaagtgctaccacacaggcatgctgcagtgaatttaactcatcctgtgtccctgcaaccgttgtttaaggatgctattctgaaaagactgtggaggaagaaaaccctttactctgttgttcagggagaaactgacaccactcaactgcctgtcaccttcgccatgattctgaagccttcccagccatgtggaactgtggtggagtctatggcccttctctttgaatctgagcgaaattagtgactctttcaatccaaagactacagtcgtacctcaactatctacagaggactggttccaggactcccatggatcccaaaatccaagaatgcttcgaatcccttatataaaatggcatagtatttgcatatgacctacatgcatcttcaaatatgttaaaccatctctagattacttataataccaaatacaatgtaaatgccatgtaaacagttgttacaatgtattgccaaagacaagctctccttgccaatccccgaccaaatgagagattcatgagcaaaataaatagttgctgatatgtaaaaaaaaaaaaaaaaaaaaaaaaa

SEQ ID NO: 5721 - DNA, 962 bp, Macaca Fascicularis
  misc_feature (1)...(962): n = A,T,C or G
gtattnnnnaagaggagacannnnagagccaagggccannnnnagactgacctaggggnnnnnnnnnnnnnnnnnngctactacaaccagagcgagggggggtctcacacctaccagaggatgtctggctgcgacgtgggacccgacgggcgcctcctccgcgggtatcaccagcgcgcctacgacggcaaggattacatctccctgaacgaggacctgcgctcctggaccgccgcggacatggcggctcnnancacccagcgcaagtgggaggcggcccgtgtggcggagcagtggagaccctacctggagggcgagtgcgtggagtggctccgcatatacctggagaacgggaaggagacactgcagcgcgcggaccccccaaagacacacgtgacccaccaccccgtctctgaccatgaggccaccctgaggtgctgggccctgggcttctaccctgcggagatcacattgacctggcagcgggatggggaggaccaaactcaggacaccgagcttgtggagaccacgccagtaggagatggaaccttccagaagtgggcagctgtggtggtgccttctggagaataccagagatacacgtgccatgtgcagcatgagggactgccggagcccctcaccctgagatgggagccatcttcccagtccactatcaccatcgtgggcattgttgctggcctgactgtcctagcagttgtggtcactggagctgtggtcgctgctgtgatgtggaggaggaagagctcaggtggaaaaggagggagcgactctcaggctgcgtccagcgacagtgtccagggctctgatgtgtgtctcacggcttgaaaagtggggtagaggccaggtagagaattcaggatgtggctctcgcacaaggaacacctctgaatgccgctctctgacactcgtccacagactcatttcccactcacttcttggag

SEQ ID NO: 5722 - DNA, 786 bp, Macaca Fascicularis
  misc_feature (1)...(786): n = A,T,C or G
agctgtacctacatatcataatatatcactgtgtagaaaattttaagttgctgtttgtgatgaatccaaatcttttgtcttgctaccaagctattgtcactgcagtgcattataccaaagagcaaagtgtcagtgccattgaaaatacagaacccattaatatcgtgactatatgattgcatttatattccaaggtgaaccttttttatactaaaaatttgggggaatatgttttgggatgtattatagagctgaaactctaacctcttaatagttttatagaatttaaaaatttttgatacagttacccaattggtgatacgatcttaagcttttatgtcaaattatttaatatgacttcatgctttattatgccttattatggctgatgtattactgtggtggaacaaaatatctttaaaagttaaaacatccaaatatataaactcttttttcctaatgataaagtacctttgagtatgagtgtatcacagcttttattaggaaaacttttcattacatgcttgtttaaactctgtcttccaggggaaaaataataaggttgaatcattttattaaaaatacattttgagaaaataactaggaannnnnnnnnnnnnnnnatatgaaaatgcacataattcatatttcaggtggtatttgcactcagtgccttactagtattctcagaacattttaatgatttctaacatttcttaacagtcatagatatataaattttcattttttgtacttgagtattctaaataaaactgacattactct

SEQ ID NO: 5723 - DNA, 735 bp, Macaca Fascicularis
  misc_feature (1)...(735): n = A,T,C or G
agaaagtgtgaaaggacacatcancntcnnnnnnnnnnnnnnnnnnnnnnnnnnnnnnnnnnnngctatcaaggnnngctccatcttcctctaataatgggcactttagaagcccagttccggctctcgcaggtgctggtccaccatctcagctattgtgataacagatgagctctatacagacatgtttttagcaccaagcactaccaagtacttcagagcaagacccgtttctttctctgccatccaatgaaaatagagaatctccaatgaaactgactagattcatgaatgttttttatatgtagagaggagcagaaacacatnnnnnnnnnnnnnnnnnnnnnnnnnnnnnnnnnnnnnnnnnnnnnnnnnnnnnnnnnnnnnnnatttgtcaaatcctttatcnnnnnnnnnnntccnnnnnnnnnnnnnnnnnnnnnnnnnnnnnntctcattctcataggtccagtttaagatctcattcaggccnnnnnnnctttggtcctttgcattcctgctgccaaaacaagctgtcttggcctccacctagaccaagtcggcaatctccctacataatcctacattcagctgcaacctatgctccaaggcctttcaccaggggccagaaatgctcccacaacccgaaatggtctcactacaacagtttctaatcttatttcaacagtttctaatctgagacagnnnnnnnnnnnnnnnnnnntttctccaact

SEQ ID NO: 5724 - DNA, 739 bp, Macaca Fascicularis
  misc_feature (1)...(739): n = A,T,C or G
cagaggcattcgcctgnccnnccgaggnnnnnagagatgggacaccacatgcagcccnntgtcccgcaaacgacccttcctccccgaggtcgnnngatctgtgatcgctcggccgccggatcggccccggggtcgcgtcctccagggcgtgccctgcagagacgggctgttccgaggggnnnnnnnnnnnnnnngcatggccacagccggggccccctctcgctcctcagcacccggccagttcttgcttccatcttgactgtctgctttcttggatcagtcaacagatcatcacattactggctttgtttacatctcttacnnnnnnnnnnnnnnnnnnnnnnnnnnnnnnnnnnnnnnaaaggagttggtcatttcctaaataacagagcagctaagtatgggactggataactgtctgtggcaaagacagttgttattttatgtggaatatgataattacaggaagcaatgctttgattaaaggcactggcaccttccttgcaagcatttatttcctcggttgngaaaacttccccggccagtgctctcttccgatcttggtagctgaagaggacgggcttattctatgtggagctcctcttggctttcgtgttttctgttgtctgaaaacacagggactaataaagatgtctgtgtgttttatttgtttaaaggcttgcatggcataggaaagaaaaatagttttagattttaaaaagttgaaatttggtgatag

SEQ ID NO: 5725 - DNA, 784 bp, Macaca Fascicularis
  misc_feature (1)...(784): n = A,T,C or G
cagcagcagagctgaaaagaggacttnnccgnnnnnnnnntccagcacatggccagtgaactcattcttcaggtcatctgtttggatgtaacttcctctagaaagactcaaatctgagcgagggcccagtcccaggtcctcctgtggcggcctggacttcccttgtaagagctcatagcaattctgcttgcctagtaacgttctcagtggccaggtttgaccatcactgcattaccaacatgctgctcagtattaggtataaagtaggccttcaatttaaacattgtatcaaatgaatgcacgtggccctcagtgtcaaaaagatctaggttcgaaccctgggtctggcatttgtaggctaaatgagttgggctaattccttgatgtctttgagtctccgtttccttatctgaaaaatgtggataatgggctcatggttcttagagtcagagtgaagaaaagatgaattgaaataatgtaaaatacctagcatgattcatagcatatagtcatatgatgtgcacatggtcagtactcccaaaattcttccttgactatttccaaagcaatcccgttaactgatttttccccttgcagaacattaagaatttttattctgaaatctggcatatgtaattaatagaatcaagtaccccaaatatgaatagagagctaatcttcctctaatcattattcccctccacccttcctcatctctggctatccctgaggtaagactggtgagagaatgtgtgcttatttcattataaccagaaaacctcaa

SEQ ID NO: 5726 - DNA, 751 bp, Macaca Fascicularis
atcagccggactgcaatctgatgaactttccccgtcctgcccagcagatggcgagcgtgtgctgctggtgcctctttccaaaggccgttgaattgcttgacaggtgttctttattttatgaatgaagccagagcagcccaccttcctgcatctctaccatcatggcaccatgccctctgatgggtgggctggagtcaaatacgtagcaggcagccaggttgtggactcctatgtggccctacttctggtggaaacgatatcttaccaccctacagctgggtcagtttgtggccactgctgccccctcttgttacagtctcctcaccgagtgccccttccctgatgggttcaacacgtctgtgctcctgtaagccctcagcttcctcattctcttcctcaacttctaccaccagacacacctgaggggcaagcaagacaggctgaagtaagggcaggacccagggactgaaaccagcacagcgtccccacagagaactgggtggaaggcagcgtggcttccagcttactggtgccaagcagattcctctgggtttccattgtatcctctgaagcaaggaggaggattgtcttctgtccagatctcaggatcaaagaaataggtccaacttcctgtgctcacttcagttagagcacttcccatgtgactttgtagctttgtgtgcatctccttcccctgctagacctgaaccccccactcgagggactctcttattctccagttccccacacc

SEQ ID NO: 5727 - DNA, 717 bp, Macaca Fascicularis
  misc_feature (1)...(717): n = A,T,C or G
cgtactgttgcggatacaaacaaagcatgagtcttagtaagtaagctgtttcccacaggtgaggggaaacacttgtgatgggagtagcttttcttttagcttgatgacaaccatcttgccagcaagcaggtagttgaagctagtagaggagcccagtggtgccttgcaggacacctccatggttcttgagatgctctgcagccaattaagccgactgagttcctttcctcatgggggcccagtgtgcaatgactgcaaacagcagcttccttggtagtgtatgcagcctgtttgttgtatgggttgctctaagggaccttggagacaggcctttccgatggacattcatgtttctaactttgcattaccccaatgtaggctccaaacgggcatgcgaggtgcttttggaaagccccagggcactgtggccagggttcacattggccaagttatcatgtccatccgcaccannnnnnnnnnnnnnnnnnnnnnnnttgaggccctgcgcagggccaagttcaagtttcctggccgccagaagatccacatctcaaagaagtggggcttcaccaagnnnnnnnnnnnnnnnnnnnnngacatggtggctgaaaagcggctcatcccagatggctgtggggtcaagtacatccccaatcgtggtcctctggacaaatggcgggccctgcactcatgagggcttccaatatgctgccccca

SEQ ID NO: 5728 - DNA, 217 bp, Macaca Fascicularis
  misc_feature (1)...(217): n = A,T,C or G
ggcatcattcccaccnnncngtcntaggaaaaggaggtagaagccccagaaccacactgcagagataagcaagttttgtctcaagtcaaacaaggtctgggtggccttggccttgtacaaagtagggagacatatttgattatctttcccttcacctccatagcagtcagtccagcagcacagactgcaggaacccaagtggggcgagatattgagt

SEQ ID NO: 5729 - DNA, 686 bp, Macaca Fascicularis
aactttaatgaatacatttggcaacattttaggaactagatcattaggattccctttttttgctattgtaatcaatctttaaatacactgtgtactgcttaaatcctttgtatttccatttaacaaacatagaataagaatgagttttggcagcttgaaatattggtaaagttgttttttgatgtatataaacaaaaattctgaaacaattatagtgtgcttcgaaacagttctttaaacattttctagtcacaagcgtttactaatttactagtttgtagtgctccataaaaggtgtagatctgaaatctttccttgacatgaccaacagtacccacagcatattaatcgagacttttcttcttgtttaattcagcactgtgctttgcactcacaggacattgcatattaccaagccttgtctgctgagaggttgcagacagatgccgcaaagattcaccccagcacatcagcgtcccaggagctgtatgaaccaggattggagccatccgctactgccaaactgggagatttgcagcgttcttgggaaaccttaaagaatgtggtaagtcttcaaggtggacttggttatgcccaccagacatcagtaaacttagcggttgtcttatgagacacatgcacagagtttacacatccagtccacagctgagtaccctatgctgggc

SEQ ID NO: 5730 - DNA, 739 bp, Macaca Fascicularis
  misc_feature (1)...(739): n = A,T,C or G
ttaagcaagcatnnnnnnnnnnnnnnnactnnntttnntttaaaactagcaatgaccttagaaagcaaggcnnnnnnnnnnnnnnnnnnnnnnnnntgcagtccatttagagaggtttccnnnnnnnnnnnnnnnnnnnnnnnnnnnnnnnnnnnnnnnnnnnnnnnnnnnnnnnnnnnnnnnnnnnnnnnnnnnnnnnnnnnnnnnnnnnnnnnnnnnnnnnnnnnnnnnnnnnnnnnnnnnnnnnnnctgggagaggnnnnnnnnnnnncagggcctgtacttaccaccaccacgtgccacgggactctaaggaggaatggcggccgtgggcagnnnnnnnnnnnnnnnnnnnnnnnnnnnnnnnnnnnnnnnnnnncctgcactccgccacctgcacacatcctcnnnnnnnnnnnnnnnnngcagggcctcactcagtcgtgtgnnnnnnnnnnnnnnnnnnnnnnnnnnnnnnnnnnnnnnnnnnnnnnnnnnnnnnnnnnnnnnnnnnnnnnnnnnnnnnnnnnnnnnnnnnnnnnnnnnnnnnnncatagatctggacaccttgtctcctgaggaacgccggnnnnnnnngcggaagcgtgnnnnnnngctccagccgaggaaggagnnnnnnnnnnnnnnnnnnnnnnnnnnnnnnnnnnnnnnnnnnnnnnnnnnnnnnnnnnnnnnnnnnnnntgaccgtggctccagccaccnnnnnnnnnngataag

SEQ ID NO: 5731 - DNA, 709 bp, Macaca Fascicularis
  misc_feature (1)...(709): n = A,T,C or G
aactggggacagaaggagtcctnncatcctcccctccagcaacttttggttttatgttagaagctaaccccaagctcaggcttttctctccactgactgcctgtcagctattctccccannnnnnnnnnnnnnnnnnnnnnnnnnnnnnncttttcttgaacctcttcctgtttcccttaggatgactgaggtgtgggctgagggaatgccctagttgaggtagtggaggtgctcaggcccctaagccagacctctacctgttgctaccgcccttcccctccctccaggactaagaagcaagatttcnnnnnnnnnnnnnnnnnnaattccttattcacccaaagatctcaaatcaaagctgatccagtcttcatgtccttccagtttctttccattccttaaggctttgttttnnnnnnnnnnnnnnnnnnnnnnnnnnnnnnnnnnnnnnnnnncacgtgatctcaagggcatcttggaagtatttnnnnnnnnnnngagatatgggggaaaaaannnnnnnnnnnnnnnnnntggttccagactcccctttccaaacctagaaaaatacaatgtacccaagtatacccaagatccctttcttactgttgcctatcccctaactcacctgcccacagcccccatcctttccccttcaacaaaaacaaaacctaccttacttgaggaattaggtaggtaaggaatgat

SEQ ID NO: 5732 - DNA, 3296 bp, Macaca Fascicularis
  misc_feature (1)...(3296): n = A,T,C or G
agaagatgcctgccttcaacagattgtttcccctggtttctctcgtgcttatctactgggccagtgtctgcttccccgtgtgtgtggaagtgccctcggagacggaggctgtgcagggcaaccccatgaagctgcgctgcatctcctgcatgaagagagaggaggtggaggccaccacggtggtggaatggttctacaggcccgagggcggtaaagatttccttatctacgagtatcggaatggccaccaggaggtagagagcccctttcaggggcgcctgcagtggaatggcagcaaggacctgcaggacgtgtccatcactgtgctcaacgtcactctgaacgactctggcctctacacctgcaatgtgtcccgggagtttgagtttgaggcgcatcggccctttgtgaagacgacgcggctgatcccactaagagtcaccgaggaggccggagaggacttcacctctgtggtctcagaaatcatgatgtacatccttctggtcttcctcactttgtggctgctcattgagatgatatattgctacagaaaggtctcaaaagccgaagaggcagcccaagaaaacgcgtctgactaccttgccatcccatctgagaacaaggagaactctgcagtaccagtggaggaatagaacaggagcagtgtgacatgaggtggcctgaacacctgagggactggacatcccatgttcagcaatgtcaatggcatcaggagggtgccccaagggtcccattgcatcccttcatgcatccatccttctattcattcatccatacatccacctgcctctgagctttcacctctgacttcctaactccatcagacctctacgtaccataagactctgccagaaccgagaagccaacatttctacatagactcaacgtcaccctgtcctagttttccaacaagacactccaaagccaactggatttctcccctgtgctccaaatgactttgtacaagtgctggagttagcacctccctctacccttaactggctggaactggttcattctccattactgcaagagaatggatgtcttaatagaaggaagcaggagtgattagttcgggttacagcaaaagtgtgtcatgaacttggattccttgaagtcagttttgtcaagttcatggcccactttgctacagcatcagagtgaaacatgcctgtctaggttctccagtgacagaaagatcctgaagcatggactaacgtgctttctggagcttaattctcctgagctagatcctgatgggtctctaagctaccctccaagaagacaaggacaggagacttgggaaggaccaatggtaatttaagtggctcttcaaaagtcatgcaacatgtttctgaacacgttcttgatcctattgcgagaatgtatgtgtgccctccctgtgagcacactacctgggcattaggactgaaattcctgagttcttcctctcaaaatttctgtgccaccagtattattcctcattttacaaataggaggcaactaagactcatacagggctaactgaataagaggcttaagaggataaactggagcagaaataagccttaggtgctgcccagtttacacttcctgggatggatttttttgtttgttttgttttgttttttgtttgagatggagcctnnnnnnnnnnnnnnnnnnnnnnnnnnnnnnnnnnnnnnnnnnnnnnnnnnnnnnnnnnnnnnnnnnnnnnnnnnnnnnnnnnnnnnnnnnnnnnnnnnnnnnnnnnnnnnnnnnnnnnnnnnnnnnnnnnnnnnnnnnnnnnnnnnnnnnnnnnnnnnnnnnnnnnnnnnnnnnnnnnnnnnnnnnnnnnnnctgacctcaagtgacccacccacctcagcctcccaaagtactgggattacaggcgtgaggcactgtgcccagtggataactttgtttctggaaagactgacattggacttgtctatggcaatgcttctttcacaagcacacactgggctgaggtcaactctgatagattcagattactagaaattggccaaaaaagcagagagaagaacatgaggtgacttaaagaacttcctttatgtaaagatttgtgaaataccctccagaaagagaagcaagagctagacacacttcagaatatatcttagtttgtcctttcccaatttaacatgaaaatgaaaaaacaagaacaaaaaaaaaaaaagaagccttcctctcacctcattttgcaaatgaaaaatccctaattcagtgaattcacctagtcactgcaaatgtatctgaatagtgcttggtgtgcttgccagtctgatcatccactcattctagtaacatctttttgcacccactctgtcaagcgctagcctagaccttcagtgtgctatgcagtcatcagtctgaaaaacagcatcatccaaaccctacttaatctctaaaatctcagctggtggacagctcatgatcaccagcctacttccaatctccacccacctccctgtctcttcccataatcttataaaagacccagactagatgtgtgtttctctggaagctttatctggcctgatgttgcttattaaagggcttagaagagttctcaagggctattattatcactttggaaaccccatctgttgtcttggtgctggatatttcccatgactgatcctcggtaacacaattcactaaaggccaagcttggctcagtctgattttcccgttcttactgcttcacagccatgaatgtgattgctcaatccagttggccccaagagcaccttgccctgttgaccttcactgtcacctcagtcttgaatcagagccccaacctcaaacactccttgcctgtccctaccccagcctttattctcaccacttgtttaatggcatgcccctttagtttctccattcccaaacacccacacactcagacttccttctcagttgcaggtttctccttagatgttcacctagaaatattactaggaaagtcacttttcaaagcaggaatatgctgggaagtgtgaagagcagggcatggttaagagacagcagctccctcctctctccccaaaattattggatcaaaacaacaaattccacccatctcagaatctgtgagtcctcctcacataaatctgagggaaaaggctgtgccatttcatctttgcaggaagaaagagaagcaagagctagacacacttcagaatatatcttagtttgtcctttcccaatttaacatgaaaatgaaaaaacaagaacaaaaaaaaaaaaaaaaa

SEQ ID NO: 5733 - DNA, 741 bp, Macaca Fascicularis
  misc_feature (1)...(741): n = A,T,C or G
annnnnnnnnnnnnnnnnnnnnnnnnnnnnnnnnnnnnnnncatgggnnnnnnnnnnnnnnnnnnnnnnnnnnnnnnnnnnnnnnnnnnnnnnnnnnnnnnnnnnnnnnnnnnnnnnnnnnnnnnnnnnnnnnnnnnnnnnnnnnnnnnnnnnnnnnnnnnnnnnnnnnnnnnnnnnnnnnnnnnnnnnnnnnnnnnnnnnnnnnnnnnnnnnnnnnnnnnnnnnnnnnnnnnnnnnnnnnnnnnnnnnnnnnnnnnnnnnnnnnnnnnnnnnnnnnnnnnnnnnnnnnnnnnnnnnnnnnnnnnnnnnnnnnnnnnnnnnnnnnnnnngnnnnnnnnnnnnnnnnnnngaaggatattgtcagtctttaggggttgggctggatgcagaggtaaaagttctttttgctctaaaagaaannnnnnnnnnnnnnnnnnnnnnnnnnnnnnnnntcagttattaatttttaaggatnnnnnnnnnnnnnnnnnnnnnnnnnnnnnnnnnnnnnnnnntaaaaggctttgagttnnnnnnnnnnnnnnnnnnnnnnnnnnnnagatgatgaacaaaggagaatgaaatgtatgtgctcttagcaaaaacacgtgcgtgcattgcaatccttataaagaaggttggtgaattttaagaatttcacaagcttccctcaaatctgagggagcnnnnnnnnnnnnnnnnncatgatgtagagtgtggttatgnnnnnnnaaagttaca

SEQ ID NO: 5734 - DNA, 3028 bp, Macaca Fascicularis
  misc_feature (1)...(3028): n = A,T,C or G
ttagctgaaggcagcctccagagaatgagcagcgttttccccaaaaccttcatgtcatccattttttgcagagatggaagaactgctgtgactccctgctggaaggaaagcaagaaacgcttccctgtggttacagatggtaaatgcctgaacgtgacaatgtcaaaggaacagtctccttgattggacagcatggagtgggaaatgcgaagacacagaagggccttcctgtcctctccccatcttgatgagcagtccttcaggtacggcctaaaattcataaacctagaaacagaggaggcctgtgatttaaagcgaaaatgtagccaacaacaaaacaaaaaaactcaggagacagaaggggaaaagtggtaattttttcatttttcatagcaagtgaacaatagatataatttaagagttgctaaatcaagaaatagaaggttatacataacaaatatacagagttatatgagtaaccactggaaaaagtaaaagtagactctaaaccgtccaaagcaccagaagggaaacagtgcatgcacgtactcaaataacaaaaagggaagcaggacgccagaatgtagacctgtagtcccagctattccggaggccaagatgagaggatcacttgagcccaggagttcaaggctggcctgggcaacataacaagaccccattctaaaaataataacaaaaaaggaggaaaattggcaaccaaaaaaaaccccacaaactagatgataattaggacttaaaatatctgtgttaacaatagatacagatgagacaaattattattattattggaaaatgatatgctacacatctagaagataagagaatccaaattgtaaattatttgaaagaattagagtagttagcaagctggctgactgcagaattttaaagtatcttttttcctataaacaagcaaaatgattgagaaaacagctggttaagaccccactcacagtaactcctgaaaagaacagcacatctgaaccagatatgggcatgtgcttggattggaatgtttcacactgtaactgggctcacgcctgtaatcccagcacttcgggaggccgaggcaggcagatcgtctgaggccagaagttcgnnnnnnnnnnnnnnnnnnnnnnnnnnnnnnnnnnnnnnnnnnnnnnnnnnnnnnnnnnnnnnnnnnnnnnnnnnnnnnnnnnnnnnnnnnnnnnnnnnnnnnnnnnnnnnnnnnnnnnnnnnnnnnnnnnnnnnnnnnnnnnnnnnnnnnnnnnnnnnnnnnnnnnnnnnnnnnnnnnnnnnnnnnnnnnnnnnnnnnncaaaaaaaaacctgtagagttgttaattccccctaaatcaattcataaatttactgcaaaccaattaaaatgccaggaggatttgggagcttactttggaactcagcaaaatgatactaatagtaatctgaaaaaaaatacatgagaattaccaggtgtggccgtttgtattttccacatgcttttctgcagtgtgacccttgactccctcctatcaaaaggtagggcctatgtcccctcccctcaaatgctggcagatctgtgactgcttcagccaactgagtacagaggaaatgacctcgggagacctgtgagcctaatctcggaaaagccaacagtttccattggtgttcttgggatacttgctctgggggaagcagccatcacgtaggaagtccaactaccctgagaccacagtgctggaggagctacaaggatacacgtggctgcggccccagctgcccactggccacaactgccagccatgtgagtggagcgtctgggatgccccaccccatcgagtcctcagatgagttacaaccccagccgatatccaacacgatcacaggagacctcaagcaagaatcacccagcagagccgttccaaattcctcaccaacaagatcataaacaaaataaaacacctgttttaaactgctaagtttgaggataacttgtgatgtcacaacagtaactggaattccatttaaaaggaaggaagggggccgtgcacggtggctcacgcctgtaatcccagcactttggggggccgaggcaggcagatcacaatgtcaggagtttgnnnnnnnnnnnnnnnnnnnnnnnnnnnnnnnnnnnnnnnnnnnnnnnnnnnnnnnnnnnnnnnnnnnnnnnnnnnnnnnnnnnnnnnnnnnnnnnnnnnnnnnnnnnnnnnnnnnnnnnnnnnnnnnnnnnnnnnnnnnnnnnnnnnnnnnnnnnnnnnnnnnnnnnnnnnnnnnnnnnnnnnnnnnnnnnnnnntatctcaaaaaaaaaaaaggatggaaagaagtgaggaaggtaaggaaggaaggacaggatggggggaggaagggaggaaggaagggagggagggaggaggaaaggagggaaggaagaaacgaaaggggtgggaagggggaaggagagctgaaggggattggctctatcacatcttatgacataatgaatcaaaatccattcataaattcatttaacaaatattgaaggtctacaggtccacaagctaggcattagagagacaccgtgttgtgcaaaatctttgtctttatgggatttagatttcagtgaaaaagacaaatttcagacagtattaagtgcgctgaaggaaaataaaaatcaggataagagaaagttctccttaaaagagagtgctcggccgggcgcggtggctcaagcctgtaatcccagcactttgggaggccgagacgggcggatcacgaggtcagnnnnnnnnnnnnnnnnnnnnnnnnnnnnnnnnnnnnnnnnnnnnnnnnnnnnnnnnnnnnnnnnnnnnnnnnnnnnnnnnnnnnnnnnnnnnnnnnnnnnnnnnnnnnnnnnnnnnnnnnnnnnnnnnnnnnnnnnnnnnnnnnnnnnnnnnnnnnnnnnnnnnnnnnnnnnnnnnnnnnnnnnnnnnnnnnnnnnnnnnnnnnnnnnnatcaaaaaaaaaaaacccaaaaaaaaaaaaaaaaaa

SEQ ID NO: 5735 - DNA, 182 bp, Macaca Fascicularis
ctatttactcagagtatatgttccctccaggtcagctgcccccagaccccatccttaccgtttgtcaaacaaaaagtgtctccgccctgagtcaggtattcaagcatttacagctgtggccacaacgggacattttacaggtgcgaatgagagtggcattatgagtaatgtggaattcaggt

SEQ ID NO: 5736 - DNA, 597 bp, Macaca Fascicularis
ccaagggaggttttggaagggggccaaggtcctgcaattgggtgggtggggctccaagccattgttctttgcacattcatgccaatgtgacctgattggctaagcacaggctggagaagctagataaacctgtttaaattcagagccaaaagacactcaaggatgttttctgagggggcgtgagggttggaaaatcatcctatatttgatttatctcctacctcatgtccagagtcaattccttagtcttggataagggagaggaattgggagacatccttgtttttgatgagctatacaaccctatggccagcagagggaagtactgcatttcagagcgagaatttgagatctatgaaagaatttaaatcaagaatatgaggccgggcgcggtggctcacgcctgtaatcccagctctcagggaggcagaggcgggaggatagcttgagcccaggagttcgagacctgcctgggtaatatagcgagaccccgttctccacaaaaaggaaaaaaaaaaaaaaaaaaagacaaaaaaaaaataagcgcaactccccttaaagcaacaaccccccccccctttttttcatattcttgcc

SEQ ID NO: 5737 - DNA, 761 bp, Macaca Fascicularis
  misc_feature (1)...(761): n = A,T,C or G
agcacgacgtggatgcgctnnnnnnnnnnnnnnnnnnnnnnnngctcctgnnntnctgggctgtggccnntgcggccggagaatgctggctggaacaagaaaccaatcccctggcaccactttcaagacgcttcacggtgcccggtaccgtccgccctaggtctcaacatgagcatacttctaacctaaccttcctgcctcctcttnnnnnngccagcgtgagctcagcttggaacaagacaaaataacttagttcctcctgtactccggagtccagacccggccaagannnnnnnnnnnnnnnnnnnnnnnnnnnnnnnnnnnntctctggtagaacctaaggacttnnnnnnnnnnnnnnnnnnnagcagaatgaggccaaatgcagagatgaggctaaggcaagaacatgccccaactaaagcatagattccccaaagtgaggctcagggtggacggcagctggctttcctagcggatgctctaaaaggttttgactgtgttggggtgggggttgggtaagggaannnnnnnnnnnnnnnnnnnnnnnnnnnntcgacagggctgcatgtgatgtccccgaactgctactattgaagaacttcccaaaacttctttacaaagccctaaaggaaagtttgcatctatgaaaagccaataggctgagccatccaattgcctcatggaaattgatgtacattcaggggatggcaaaaacagctgtaaaatagtgaaaaagagcagtcattgtgctcttttt

SEQ ID NO: 5738 - DNA, 755 bp, Macaca Fascicularis
  misc_feature (1)...(755): n = A,T,C or G
gnnnnnnnnnnnnnnnnnnnnnagtacgagaaatcatttgaagttctgcaaaaaggagatggaaatgcacacagtaagaaagatacagaggtccgcagacgggagctcctagaatccatttctccagctttgttannnnnnnnnnnnnnnnnnnnnnnnnnnnnggtgctagataagtctgcgtgtgtgttggtgtnnnnnnnnnnnggatctgccactggannnnnnnnnnnnnnnnnnnnnnnnnnnnnnnnnnnnnnnnnnnnnnnnnnnnnnnnnnnnnnnaaggacggagannnnnnnnnnnnnnnnnnnnnnnnnnnnnnnnnnnnnnnnnnnnnnnnnntagagcaagataaaaagatgaaagacaatgggagagaaggttgttnnnnnnnnnnnnnnnnnnnnnnnnnnngtatgaagaacctgaaatcctgggctagtgtaaatcgaggtgccattattctttctagtcttcttcagagttgtgacctagaagttgnnnnnnnnnnnnnnnnnnnnnnnnnnnnnnnnnnnnnnnnnnnnnnaaaaaacaaaagcaccagcaaannnnnnnnnnnnnnnnnnnnnaaactgagcacataggtggaaagagttaaaagcaagatggaatcatttnnnnnnnnnnnnnnnnnnnnnnnnnnnnnnnnaaggggtannnnnnnnnnnnnnnnnnattggggtgctctgtatatgtgtttcttctttgtatacgaatctatttatataaa

SEQ ID NO: 5739 - DNA, 774 bp, Macaca Fascicularis
  misc_feature (1)...(774): n = A,T,C or G
gatgagtcatgaatgagggaaggaagnnnncaatcacaacaagtgactcattcattgctgttagctctggcagttggataaaaagttttagcaaaagcagcaacaaatgtacttgaaatactagcacagtaagggaattcctctctttcaggatgaatgccatccacacaaaagagctcctgttgacatctcatttacaatctcccccaggacacagacaagaccctttcaataaactcggctcagaaacacctattgttcaaaatcttcaactcgccacaggctaccaccactccctacggctttgcaaaattaaagatttagaagaaggatggggacggtggaagctatgaaaagaggcaggaaaaaagcccctttgacccgatgctgtcagagagcgtgcatgaagaagaaagttaatggtatnnnnnnnnnnnnnnnnnnnnnnnnnnnnnnnnnnnnnnnnttcgtgaactagtgattgtgaattccaaatttgatgccaactttatgtgtaaagaagctaactcctgccaannnnnnnnnnnnnnnnnnnnnnnnnnnnnnnnnnnacccattcccagcttacaaaagccccatagcagctgcaggaaagcatcaggtgagtctgatacgggctgtctgtttcctctgggatttgaagcttgcctgtcctgtccaagtggaatcttgtgcctaagtgctagagtccacccctctccactgattcccttctttccatttctgccatttcccttcttcttttaataaaac

SEQ ID NO: 5740 - DNA, 731 bp, Macaca Fascicularis
  misc_feature (1)...(731): n = A,T,C or G
cggagagtgaggtggcccgggncnnnaacatnnnnagaaatgccctggtatnncatctagatggnnnnnnnnnnnnnnnnnnnnnnnnnnnnnnnnnnnnnnnnnnnnnnnnnnnccgcatccccctggctgaatgggaaagccggattgcggtaacatnnnnnnnnnnnnnnnnnnnnnnnnnnnnnnnnnnnnnnnnnncacctggaggtgcagcgttggggcctggcacagcagannnnnnnnnnnnnnnnnnnnctggtgtcctaggcagctgtcacctgcagggatagcatagtgggagggcagggcagaggtgctgatggctgtggagatgggtgcggcccatggaagtctatagcagggatcccttccgcctttccccttttgggttggggacagctgcatgctgcctgtgggagatctcagctagttgnnnnnnnnnnnnnnnnnnnnnnnnnnnnnnnnnnnnnnngttagctagtatgtcctctgcctcaccctgcaggaggtggatgccagtgtggtgcgtgagatctgctccaagtacatctatgaccagtgcccagcggnnnnnnnnnnnnnnnccattgagcagctcccagactacaaccggatccgtagcggcatgttctggctgcgcttctaggcgggaagcctgtgtaaacaagagagctgggctggggctcnnnntccccccaccacaaacacagcactccggctcctctaac

SEQ ID NO: 5741 - DNA, 617 bp, Macaca Fascicularis
  misc_feature (1)...(617): n = A,T,C or G
ggtcacnnnnnnnnnnnnnnnnnnnnnnnnnnnnnnnnnnnnnnnnnnnnnnnnnnnnnnnntaaacggcgcggaggtgcannnnnnnnnnnnnnngccacgggagacgcagtacaacagcacatatcgtgtggtcagcgtcctcaccgtcacgcaccaggactggctgaacggcaaggagtacacgtgcaaggtctccaacaaagccctcccggcccccatccagaaaaccatctccaaagacaaagggcagccccgagagcctcaggtgtacaccctgcccccgtcccgggaggagctgaccaagaaccannnnnnnnnnnnnnnnnnnnnnnnnnggcttctaccccagcgacatcgtcgtggagtgggagagcagcgggcagccggagaacacctacaagaccacgccgcccgtgctggactccgacggctcaccccacccccgcgtccaccatgaccctgnnngccacgctgacctgtgttccctccccatttatctttcctgttccagggaggtggggnnnnggactatctctatctgatnnntcaacttcatgtgtgcagtgagttnannnnnntncttccatattacaatcnngaacgggatgtataaa

SEQ ID NO: 5742 - DNA, 2400 bp, Macaca Fascicularis
gtgaaaaaaaagaaaatgatagtgatgtgttttaagttaagaaaatcaggaaagtttataagaagggaaacattttgagcaaagacctaaagaaaggaagagaaagagccattgttttcccagtagcggataccctagagaacagcactgcacacatgctcagaatggagtgtgcttggtgttgaagggacagggtgggcaagggtgcaagagagatgggggagaggagtgcactgaggctcaggctaaaagaaacaacaacgacaactcacctcagaaaagccataaatagagtctacatcatttacttctaaaagaaagaaacattaggatgatgctgggaaagtggtcgtggtgggaagagctgagtatgtcctatttcaacctacaaaggtgtgggtggcccggggttgacaaccagctgagggagtctgtggagtattagggaacattaatggtcctgcctgtccacacagaatggcaacaaatgtcagtgagacaggcgcagaggtggccagacaacccagggaataccatccccagatgacagctgtgagcaaagcagaactgcctgaagggcccaatgacatgaagtacggagtggaagttttgtacaccagctagtgacaacgatttccagtcatggaaagacaatcaagaagtaggcacttctgaagtttgcttccaaatggagttaagtaaatgcttactcgtcccatccaggttacagaaagtgattaggagtgacagggatggcacctggggatggcgaattgaaacctcctttgaaactgatgtgtgacatgttgaagaaacatttctgttttacagcttctcatagctgtaggtagaggtcatgcaggatggctttcagattgctagggctgccataaagtaccacagtctgagtggtttaagcaaaagaaagtttttttcttacaattctggaggctagagtctgagatgaaggtgtcagcatgcccagtttcttctgagacctctcttggatggtgaatggccatcttctccttgtgtcttcaaatggtctttcctctgtgtgtgtctaatgccctcttcttttaaggacacaagtcatattgcatcagtgaccacgccataacctcgttttaccacaatgatagctttaaagaccctatttataattatagtcatatttgaggtactatgaatttggatacaacatataaattatgggaggcccataaaaatttctattaattcagtccataacactttttatttatgcaaatgcattagtaagttataaaagagtcagtcaaatttaccttcttggcctgtgctgagatgcagacaccatctctccatcctttctgttgtggcctgatatgggttggctgtgtccccacccaaatctcaccttgaattgtaataataccgtgttaaaggtggggccaggtggagataattgaatcatgggagtggtttctcccgtattgttctcacggtagtgaataagtctcaggacatctgatggttttataaatgggagttgccctgcacaagctcccttgcctgccaccgtgtaagatgtgactttgctcgtcgttcaccttccaccatgattgtgaggtctccccaaccatgtggaactgtgagcccattaaacctctttcctttatgagttacccagtttcagatatgtctttattagcagcatgagaacagagtaatacactacccttctgccccaacacctgtgctcctaggcacatgggagaaaatctttctcacaatcacttgccattgtgaaaatggctccttacacatgaacatgagaagatggggttcttatcatttcaacagaggataaaggcttgtttgattcactttcaggctcaatttgctgctcactaataaagtattcatcaggaattcggaaaaatgtgaaatccataagatcaggaaatgtgagactgaatttatgaagtttcaagtgcagccaggtgcctggtgagtgtcagcacccaaagaaaggaaggcagctggcaggcaagggcttcagaaggaagccaacaatgtgagacactgtgcatgggagccccaaaggaagaacagagtgaggagggaaaatatgaaaagacaggaacctctgactctttcattctccctgcagtcatccccccagaagaaaagaagtcagaggctgaaacagaaatgtataatgtttcaaaatctatgaaggaaaggaatggattcttatgaaggagttttctttctaggatttgtttacaaggaataaagcagttgtcatataaaaagtagtgtgggaaatgtcattataaattcaccacgtataattctaagatatttttgcagtcatatgaaccttagagagaaaaaaaaaaaaaaaaaaaaaaa

SEQ ID NO: 5743 - DNA, 3152 bp, Macaca Fascicularis
tagacagtgggagtgccatgcaaagataagcaaacaagggagcatttagggagactgcgaaaagcaaagcataaagaaaagacaacaaatgaaagctgagatgtgagtaccacatcatgccacacaaaacaaacaaatgcaaaacaaacacaaaaccccactgcactcaccaggtcaggctatttaaaagtaaccatttgggaaagtgtgggtaatctgtaacaaaagccttgaattgtggccagagaagaatttaaagcatgttctcaagagcctaagctaagtgtgagaacatcttctgtccggctgtacatgctgaggtgactgtgtttctatcatattcagctccacattttctactgtgcccgacatgtggtggccatgaaatagaaattgttgaattaaactaggttgactttcatggattaatgtaacagaatacctagctattatcttagcagaaggtagagataagggaaaagaactgtaagtctggaagagaagatagacttgatggcccagtgagccaggacagcagaaaagcactggtcaggtgctgtgtcaggaaaaagcagctatggacaaaggatgactatggaaagaaggtatagagggtcctggacatgatttttgctgatgtaataatactacatagggccagaactcattggcgatgtctttggtagactagctccataattctgtttcaaaaatgctatagcattctgctttccctttcacctcaagtttcactttcaaagaatccatccaattattacccctagtttatcccattgtagagtgttcaataattctagcaggggactcctaatttgtaaatgtgcagttccaagtgttttcttaccagcctttcatcaatagctattttagcagtcttcattacttcctaatagtctactttctttggtgtatcactaaaaaaaaaaccaaattcagtattttagtcattgttgagtagtcattgatttcatgcctgccccatttatttagagtctgttttctcttactctctttttgatttaaaaattttacatatacttagttttcttattattgttaatctctttggctagtactaatgcttctatttttttgtgtggccattatttgctttcagctgtgagaaactgattcgtactcttctacaataaactattgtttcttattaaatgctaaataataatacataatgatggtagtgaaagaaaatagaagatagtttcctgcccttgcagtgatcacagtctaaaagaggaaacagaacacagactcagactcatatgactaaaacatgcctaccatcaattaattactactatctggaaaacactaactattcagagatctggggaggaggggttggtggctattttagttgagtgattttaatgactggaggcagataagtctatttgagaatatcttcatggaacaagtgagtcttgatggaagcaactgtgagtgaagtttaagacaagggattagtgtgataacctttgcatgtttgaaaatgtctaagaacctgaatgctgaaattattagctagatatgtgatgtttggagtaaaaaagaatgaaagggagtgcagactcaggacacatctttctttggttattcaaataaaccagtgacatattttgaaatattttaatcacaaattaatgcaaagtttatcggatcacatattttttgttgttgttcatgatagctgttgtttgggactaaaagtaaaaaggtgctggatacttttcctatcgaatgtctttcatcaccttgataaggacttggagtgcagtataggaaaacctaaaaatcttcactactgtggagacatcagttgttggatgatttttaatattgacaccatgtattttatcaagcaaaaacccttacctaaattatctaaagtatctagaacatggctccgtcatgtctacacaatggtattttttatttcctttcaacactagattcattttagccacccctgaaattatgttcattaccagatattctttcctttacattattcctctttatcttttgaagtctttgcatcctttaggtctaaattcaagtcttttttcaaaagcttttttcttaatattttaactattttcttacaattacttctaagagttactgccatatagttatacacttcgtatatgtgattgtcttggtcttgaattgcaaattaaaatatgaacttttataggcaagtaccatggttgcttctgtatcccacagagttaagcagggggatgaaacataatcgatttctaataaaagtttgttgattgactagttgaaaaatagcaattcctttatgttgtggaggcaaaaggaatcagagcaatgacatgaatctcttgttgtccatatggattctgtagatatggattttacttactagttaaacattaaaacaaagccacagtatttccattgagtctagacaatcaactatgtctcagtgaacataaaatgctacttacttctaagtcctcttcccacaatgaggttttattcccttttttgaaggcttatagcattgctttttattgatttctgtctgcaacaacccaatgctgtttacttggtattaaataatagcagtgacagcaacattaacaaagtgattctttctcttttaatgtcagaataatctgaagggagttcagtaatttcagtggcttattgggagtgtgatcatataatttattattccaactgagatacttctgacaatgaaaatgaactttattaataattacaatgggatcatagatattaactaggactgtccaaaacatactaaaacacatgatcatcctatatattagtgtcttggaatttgctatggagtaataagaaaaattaattaaggtagaatagagctatttattttctattccttcttatctcataatccatttcttagtggcttaagggttgtcattagaaattccatgtattaagaattctagccaggccaggcaccttggtccaaacctgtaatctcagtgctttgagaggctgaggcaagaggattgcttgagatcaagagttcaagagcagcctgggtaacatagcaagaccctatctctaccaaaaaaaaaaaaaaaaaa

SEQ ID NO: 5744 - DNA, 504 bp, Macaca Fascicularis
  misc_feature (1)...(504): n = A,T,C or G
acttgcgcaaccnnnggggtttcccctgcagtggggctggggctggagagggtgtgggagctgcgggttgcactatcacttccctgaaccgtggcccttcctgctgtcctgctggtctcctgtgggtgggggtgacaggtaggcacaaccccctgcccgtgcctccagcggctccccgatccctgtgttgtatgtaggagcctctgtgctgtagttcttgtttgagtaaattttgcagcagctctagaaataaggaagagtttgaaaagtttgaaaatctccagtcttggccaggcacgnnnnnnnnnnnnnnnnnnnnnnnnnnnnnnnnnnnnnnnnnnnnnnnnnnnnnnnnnnnnnnnnnnnnnnnnnnnnnnnnnnnnnnnnnnnnnnnnnnnnnnnnnnnnnnnnnacaaaagaaaaaaaaaattaggccgggcgcggtggctcaagcctgtaatcccagcactttgggaggccgagacgggcggatcacgaggttag

SEQ ID NO: 5745 - DNA, 1862 bp, Macaca Fascicularis
ctgatttccgccgccgtccctcctcttttttttcccggcagatctttgttgtgtgggagggcagcagggatggacttgagcttgcggatcccctgctagagcagccgcgctcggagaaggcgtcgcagccgcgaggaggagccgccgccgccgcgcccgaggccccgccgcccgcggcctctgtcggcccgcgccccgctcgccccgtcgccctttgcctccccgcagagtcccttcgcggcagcagatgtgtgtggggccagcccacggcggggactatggtgaaattcccggcgctcacgcactactggcccctgatccggttcttggtgcccctgggcatcaccaacatagccatcgacttcggggagcaggtaagcccggccccgtgccccgcgcccgctcgccctgccttggccttacacgcccagacactggggcggaggggagtcacctgctccgagtccctctttatcctggaacgtttggtcgggtgtgcagcttgtcaagggtgacttttctagcaccccattccctctctccgtcccctcaattattcagcagagttttccagccctctctggaaaatgttaaagactggatggtgtgaagcttcacctatgtatggaagggtttttagtgcacggcagtattatgtaatttacaattatgtaaacctcagctctgtaattaaaatgtagtttctagtagcttaagtactgggtttttatttacccgtggctggcggtaatggtgacggtggggaaattctgttttataatgcgtccaagttgatttcccagatacttctaatttttaaacatctgtttcgtagcccaggtaaggattaggggtatcccgaatgtgtgctgataagccggtcttgaccatttctagtttgggatttcttttttttccttttcctttttctttccttctttctttctctttttttttttcaatggaccactaaagaagggagcacgtttttgtttggtgtcgccttctcgtccttgtttcttttcacgttttctccatgtggcgtcattgcaaatctagcgctgcaggctctcccgcgatggggcattggcactttgcaccttgcatgtggggaccgttttggcagggccgccagcgggatgcagctgcgtcctaaggccagggagaggatttggtgatggggaggcagtgacatgccaccctgatgggcaggtgtcccaagtggccagagcgtgtgacgagtgggactcccgtattgtggtactgtctgtctgctttcaagtcaagagacttaaacggatatttatatagaatatgcgcctattttgatgcaatactcattctaaaagccaaacagctttcaggaggcaattacaaaccggagatttgtttgactccttcgtttgacgaatatctgtttggatttgtctctctgtgctcagaacttttgaataattgcaactctataagctccctaatacgtagcccacattgtaagctactttctactttgaattttgttgatgataggtgtattacaccttgctgggagcgaatggtggcttatttgtcagccatttacaaatcctaagatggagaggtagcacgggagaacaaaggtcaatgcagccttaggttcacatgcttttgagatgattaagacatgcaaaattaggctgggcaaggtggcttatgcctatctatgatcgtagcactttgggagggcaatctttgggaggcttaagctagaggattgcttaggctaaggtgggaggatcgctttagctcaggagttaaaaaccagcctgggcaacatagtgaaacctcatctctatttaaaaaaaaaaaaaaaaaaaaaaaaa

SEQ ID NO: 5746 - DNA, 2248 bp, Macaca Fascicularis
  misc_feature (1)...(2248): n = A,T,C or G
ctaaaagagtaaaaaattagtttattttagaaataatgaaattcagtccaaagtagcagtacctttgatgagtatctctgaagccctcaataagatttaacttgttttaacttgatctacatcgggatttctcaatagcggcactattagctgaaagtctttattgtggggaactgtcctgtgtattgcaggattttagcaacatccctggcctctgtctactagatgccagtaggaacctcctagtaatgacaatcgaaatgtcatggccaaaattgctcccagtttatagccactattctacatcatataaagaggtagattgtgtgaatatgtaatatatgttgtataaaactgtacaataagtatacaatgtcttcgcaagataaattattatacccaaaattacatgtgtggttcatatgcaataaaatacaattttgaagaaagcgtataggaatcagtgaaaaataacaactacagaatattttaaggcacatagagaaaatatcaaaaaggacattatagtatttcactgtagaagtgcttaaaactttggtctcactgaatagatcaaaagtttataattagcacaccaattggaagtaaacaggtgcttctaaaatgcttgaaaagaaaaggctctttgaagtagtttaaacgtgtctttcaaaattgtttttataagcccttccttaacgtaagggtacttcatctcacaaactcctggttagtggaatccaaattaatgaggttttactgtatcaaaattatttttataattcaaagagacagcaataagaagaatctaatgtggatgtgatttttctctttgaacatttctgttctgttgcactgaccttagcgtgcgtgcacacacacacacacatcgccaccactaccatcatcatcttatcctcacctttggaaaatgagtactgttgatccatgtaatcctttgcatagtctcatctttcctatctttcttctattctggaacataagaaaaatactcctagtaacgtggacaatgatacagaaagtgactctgagccttagttaccatcaaaattacactttatctgctaaagcgatatcagaagataaggcttgcaaaccacagtcccaacaagttgaccttgtctccctatgacttcctcaaaagataaggcctttttagtgttacagcagaaaatgggccttttaatttattcatctatgagaagctagaagtacttctctgataataacatgagcaataatccctaccttgaaatcatccattaatcttggagtttggagggagggatgattgattcctcattggttttaatcgcctacaaaagcagtactactgactttgtttcttacacttcactgagccccagactttagggccccaatcactgtcaagatcattgtccgatggaactttggaaggacagtgacagaactgaatgagatgttttccagtgattcagtcacaaagataagtctttcaaatcttttgaaagtgattctcaaattaataaatcaaaatccaactattttccctcaaagtttttagggatctgaaaggaaaaagtttactgttggagtccctttttatgtgaccaatgtaccagttttaaaggtaccatctatactttatctacatgaagggatcaccatgactttgagagaaaaaagaatcagattaggcctaagattggttgaagattaaaatagactcttacgttcaagcagaagggaaaaatgaagccaatctagaaaagtaagctaaacatcctctccttggcttaggatcattgggacaaactgggagtatatctgtgtgattacaccctgctgctatgagaaaaaagaactgtaacctgaccatgttggctcacacagggcaatgccaaaagaagtcaaaacgtggccgggcacggtggctcaagcctgtaatcccagcactttgggaggccgagacgggcggatcacgaggtcagnnnnnnnnnnnnnnnnnnnnnnnnnnnnnnnnnnnnnnnnnnnnnnnnnnnnnnnnnnnnnnnnnnnnnnnnnnnnnnnnnnnnnnnnnnnnnnnnnnnnnnnnnnnnnnnnnnnnnnnnnnnnnnnnnnnnnnnnnnnnnnnnnnnnnnnnnnnnnnnnnnnnnnnnnnnnnnnnnnnnnnnnnnnnnnnnnnnnnnnnnnnnnnnnngcagaaaaaaaaaaaaaaaaaaaaaaaaaaaaaaaaaaaaaaaaa

SEQ ID NO: 5747 - DNA, 193 bp, Macaca Fascicularis
accagcgggtatagggcaccccttttgcaccgactttcagaccatggttctcctttcctccttgaggacaccaaattggatgagagcaagtttgagagaagaatgaatcaactgctatccttcccctcacccctcagcccaggagggaaagggcattttctttttcatctttgaaaggcattgtgggtctgtc

SEQ ID NO: 5748 - DNA, 1896 bp, Macaca Fascicularis
  misc_feature (1)...(1896): n = A,T,C or G
ataaataccccagctccctcacccatccctctggttggataatgctgaggcacacattccatgctgtttccagagttccccatgggatggagctccaggtgcccacagtgtggagttgttgaaaatgcaccctctatatgctccgttctcatctttgtctcacccccaacccccagtgtttccaaatcactgcccagatacactgttggtacctccactcccttgctgtgtgtttcttgcttatccagcttggggtcaatcaggagaagggagcaccatccacacctgcctctgtcgctctcgagccctattccctgcaatgtgctgttccttgtgtccttctctgtctcttgttcataggaaatatcctttactcatcttgccttgagcttctccaagcctggcagggccaagaatagggtgaactggagacattcccaggcaaggagcagcctcaggtgcgctgcagggctcttgcccactctgcggtcctcctctggttggaagggggctggggctgtcattaacactgccctgttgtccactgcacggatcttttcctgaagctgtaaactaaccagtgctgctccaccggtgggtgtgagcctgggaggatgagtgtgcctcagacccactgagctgtgctgggaaagggcaggatgccgctctgggctgcctcggggcagtggactgagcccaaacctactatggggcagggcacaggcatgcaaagcagggaagccccttcatgcccccagctggcaggagatgctggcccagagacccccggggaacctgctgtcttccccctccccaggtccctgtgccctcgctcctgtgtaatcccctcctgcagggatgctgaaccctgtgaaggaagcttggcttggggcttatgccaggctccccaggtctggtcctcagcagcctgtcgaagctggggggcatccaggacccaggaatggctgatatttgggtgggacaggaagctcaagccagcatctttgatttatgctgcactagtctggaatttggcctgagcacttgcagggtgtctgtgtagaaagggcatgtccagtggtctgggagattctgttctcagcagccaccactcctctggcaaggcctcctttgctctctacagcctccctccccgctgcctgagagccttccaggccccttcgctgggctggatgacaggatacaaatccacagggacctggggttgcttcacaaacccacctcctctgaccttctctcccactaggtggtcctggaacccatccccagtggggttcaagttaagctggtcctgggagcaggagggaggagctcagggttgaggcctcattagcatattcatcagcagtaatcagggccccgctgtgatcgaaagccctcttagggcttccctgcctcttgctggctggggagcgggtgaggggcgatcaaggcctcaacttgaaaggactgcagcctagagcgagggggtggagggaacagggaaggatggagggacagtgaattccctagggaaaggagcatctgtaaaaacaatctgtggtcagaaagaaaggtgccgagcagagcannnnnnnnnnnnnnnnnnnnnnnnnnnnnnnnnnnnnnnnnnnnnnnnnnnnnnnnnnnnnnnnnnnnnnngatcagtctggacaacatagtgagaccccatctttccaaaattaatttgctgggcatggtggcttatgcctgtagtcccagctattcagaaggctgaggtaggaggatcatgtgagcctaggaggttgaggctgcagtgagctataattgtgctgtcgcactccagcctgggtgacagagcaagatcctgtctcaaaaaaagaaaaaaaaaaaaaaaaaaaaaaaaaaaaaaaa

SEQ ID NO: 5749 - DNA, 732 bp, Macaca Fascicularis
  misc_feature (1)...(732): n = A,T,C or G
atgagagccagcccnnnncagagtanaagcnagtgacnnnngggcttcaacgcgaccctggaatggacacctcnnnaagatacgggnnnnnnnnnnnnnnnnnnnnnnnnnnnnnnnnnnnnnnnnncaaannnnnnnnnnnnnnnnnnannnnnnnngnnnnnnnnnnnnnnnnnnnnnnnnnnnnnnnnnnnnnnnnnnnnnnnnnnntatgccttcnnnnnnnnnnnnnnnnnnnnntgcggactcagtgaaacagcccccatcaccacggacctnnnnnnnnnnnnnnnnnnnnnnnnnnnnnnnnnnnnnnnnnnnnnnnnnnnnngagnnnnnnnnnnnnnnnnnnnnnnnnnnnnnnnnnnnnnnnnnnnnnnnnnnnnnnnnnnnnnnnnnacccagctcttttgctgtgtccgtgcctctccccggcccaannnnnnnnnnnnnnnnnnnaagatggatatccaaggcaaccctaagtacagagccctgactcacctgggaatttgctcccnnnnnnnnnnnnnnnnnnnnnnnnnnnnnnnnnncnnnnnnnnnnnnnnnnnnnnnnnnnnnnnagggnnnnnnnnnntggactgtcgggtggatgtgaaagttcctaannnnnnnnnnntaagaagacgtgnnnnnnnnnnnnnnngcctccaggnnnnnnnnnnnnnnnnnnnnnnnnnnnnnnnnnttcggcaccatgtctggtttgga

SEQ ID NO: 5750 - DNA, 568 bp, Macaca Fascicularis
  misc_feature (1)...(568): n = A,T,C or G
ctacggggctgaccacgacttgggccgcctgcaccctcgtgtgatggcctccttgagggcccagagccccatccccaacctctacctgacaggccaggatatcttcacctgtgggctggtcggggccctgcaaggtgccctgcnnnnnnnnnnnnnnnnnnnnnnnnnnnnnnnnnnctnnnnnnnnnnnnnnnnnnnnnnnnnnnnnnnnnnnnnnnnnnnnnnnnnnnnnnnnnnnnnnnnnnnnnncagaggaatctgcccaatggctggggcatctcccttgacttacccataatgtctttctgcattacttnnnnnnnnnnnnnnnnnnnnnnnnnnnnnnnnnnattcctgaagagaggcctagtttaaatcacaattccgaatctggggcaatggaatcattgcttccagctggggcaggtgagatcattatgccttttataacatcctgtccctactaataagatactgacttgggccgggcgcggtggctcacgcctgtaatcccagcactttgggaggccgaggcgggcggnncnnnnnnnnnnnnnnnnnnnnnnnt

SEQ ID NO: 5751 - DNA, 740 bp, Macaca Fascicularis
gaaataaaaaggtttgcctagaatgtagcatctagtgacttttttaaagccctaaagtttacataaagaagctctagttcctatagaaataactgaaagcaaataaaagttcttaacaatcccctcttttgaagtgcattttttaaagcagggcaggagacatttggactctagctatatgacatattgggaaaggccgagggtggagggaagatttcacttcattgtctagtccagaatcttgagtaagctaaagaaaccatcgtaatctaaaattgcttcatttaacactaacaatttagactttttaaaccaagcattgaataatggctggataactgccaaaggaagcgccgctccatgaagtctgcttacttatttaaaaattgtgtatcaattttaaatactgttcattgtgtgcagatataaggggaatagggcattctgtagaattatccatgtctagtttgtaaagtgcgtcctgtgtactgcagatgtgtgttctctgggctttatgtatctgtacagtagctttcacatttaaaaaattgtggacaaacttgtctggggggtttgaggggagaatggtggtttatatcaataatgatgctgtactatagtccatgtaacaaaagatctggaagtcaccctcctttggcccgcggaaaattttggtaatcttctaggttctaaaatgaagatgtatgggtactctggcagactgcatgttgtataatttg

SEQ ID NO: 5752 - DNA, 742 bp, Macaca Fascicularis
  misc_feature (1)...(742): n = A,T,C or G
aatgacgagcnnnnnnnnnnnnnnnnnnnngannnnnnnnnnnnnnnnnnnnnnnnnnnnnnnnnnnnnnnnnnnnntgtgcccttcaagcgcctgtctggtgagcccctgtccctgcccttggtggtagtactgggaggaagggccgcttccagaggcttctcttcttcctccccagcctcccaccatctcctcctggggtctctggtctggccactttcctccctttgggactcccctgtattagaattgtgaatgagaaggcaagagaaaggagatgtagcagaggccactcatcttcaaatctctgatcctggaacgatagaatttctttggctttgatcccagccaatgtgcgtgtggccccgccccatggagtctgttgcacccactaactctgtgctcccttccctctcctggggcgggggaaggtgtgtctctcctccagtggtctttggagaacacacgctgctggtgacggtgtcaggacagagggtgtttgtggtgaagcggcagaaccgaggtcgggagcccattgatgtctgagcctgccggagggcgagggtcggagaagcggattgggtcctgggcctctgtgatgaggcaggcacagccgtcagtcttggcttgctgctagaactagggccttctgctcgcccacctcccacccctacctggatgggccgaagcttggagactgtgagctgtgttaaggagaacaagggcaaggagacctcccttt

SEQ ID NO: 5753 - DNA, 538 bp, Macaca Fascicularis
tgtgcacatgtaccctcgaacttaaagtataataataatccccccaaaaaagttgcaataatctcattacatattaacataaataacagcttttatgaaaaataacttttcctcatcagcagaaaagtgaaaagagtgacatcgttttacatctttacaactccttcaatgtctggcttagtaaaagataaccagataattatatcttcttctgtattatccatcggcgtaagtttgattgaagcatggcaagaaaatcttccctcatatagagaacaccggaaaaagggagacgtcagagaccctcttaatgggctggggggcttcagctttgttgtaacagctttttgacctctaatgtgcaaaggaatcatttggaaatcttgttaaaatacagcttcttattcggtgggtgttggatggggcctcagattgtgtctttaaaaccagcttccaggtgtgtggaaggtggtggtggagattgtttccctcttcaaatgtaaaggaggcttaaaaaaaactatagcctatcaaataa

SEQ ID NO: 5754 - DNA, 716 bp, Macaca Fascicularis
  misc_feature (1)...(716): n = A,T,C or G
ctgttgatataaatatatgacgttattaaattcttaatctagatagactttataaatcggnnnnnnnnnnnnnnnntggtggtttgtctaacacggtcacaaaaacccaggcgctgccggttgtaaacattctcagaagtttaatggcagcaactttccttcaactatgcaagcgctcccgccgctggtggggggaggaaggttccgccagcgacgtcccagcccctgggtccgtggagaggttgggtacccccatcagggcccctgggccagcagaacagcactcctgggcggctcctgtgggcttcaggactggccagctccagccgcaagggcgattctgtggacgtttgtgtggatggtgcagggttcttggaatttgtagaccgagatcggtggaggtttagaagtgcaagagtctaaaggctgagtacaaaaaaaaaaaaaaatcactgttgtgtgttttctttcgcatgaggcatcagcgtcaccttggtgtggtcgttgcctcccgggcccttggcctggcctcctctcggtttgggttttgctctcacccacataagcctcccatgccctgcccttcttgaggccttttgtgttcccctacgtctgggctgtgtccctaccaggcttcccagccttcagggtcagccattgagccacatgctttgctcagttctgtgtttcagccacgtttccacggtggaccccgt

SEQ ID NO: 5755 - DNA, 513 bp, Macaca Fascicularis
gggaagtggtatctgtctcctttcaagagctgaagtgtcacaaagcaaaaataaacttcaaagacccccaacccaaccccaaacatcttgttaatggacactatcctcacccgcagcactcaaaatttaacctgaaagaccaattcaggccacgatggcaagggggcactgaacattcttcattatggtctcttccctttcagaattattctgtgtgaagcctgccacctggaggcatcatcggcatgataaactttggtctccacaacctcttatcataacccagacattcctttctattgataacagccaattgccaatcagaacattttaaaatctacctaaaacctagaagctcctcctccccaaccctgaatcaagttgtcgtgtttctgtggaccaaaccaatgtatatcttaaatgtatttcattgatgtctgttatcttcctaaaatgtataaagccaacctgtgccccaaccacggtgagcacatgttctcagtgtctcctgag

SEQ ID NO: 5756 - DNA, 696 bp, Macaca Fascicularis
  misc_feature (1)...(696): n = A,T,C or G
gcagcacaggtggctgttggtgtttggcgtctctcgctgccgtggtgtctacgaagctcctctgtgctgtggcaggcctccgagtttcannnnnnnnnnnnnnnnnnnnnnnnnnnnnnnngtggacaactgcgtttacttggtccatgactccactgctggcccaggcccctgcacggatgttctgaattcgttcatctgttcatctcctggggagctcccggttgcttctgcagctnnnnnnnnnnnnnnncacccggctggtgtcccgggaaccgccgcggaggtcctggaacgtcccgcgtggtgcccaccgctgaggaacctcgtttggtctcctgggagggctgcctcttcccagactctcggcagcacggctctgcggcaggtcagagttcagctgtggaaaaggctggagttctgtgctggggcgggggatgctgcaggcaggtgtcctgtgagcagagtgggggccgccagnnnnnnnnnnngcacctgctcccctgagtgcccctnnnnnnnnnnnnnnnnnnnnnnnnnnnnnnnnnnnnncacgagggtcccagggttctccctgcagacctccaccacttctccccagaagccagggccagccagagcattcgaggctccctttagccagggtctcctaggggatctggggatggaattttggctgaccctgtcnnnnnnnna

SEQ ID NO: 5757 - DNA, 720 bp, Macaca Fascicularis
  misc_feature (1)...(720): n = A,T,C or G
tttgtatatgcatgtgtaagaagctattttatagcttgccaggtttacaaactcagatccttttaaaagctgtttaaattgtttcattagaaatttaactcagttcatatgactaattttgtgtattcttttttgacctaaactcaccaaatggttgctaaaaattacatatcttaaatattgtcttaagtattatctactatatatctttaacacttctgaatacaacannnnnnnnnnnnnnnnnnnnnnnnnnnnnnnnnnnnnnnttgccattcatcattaaatgtgcactatactgtcttctagtcgtcttgactatgccagttgtagtaccagcttctgtatctgcactgaattctgcctcagtaatatgcctttgtttaaaatttaaatattttttcatattttttaacctagaaaataattataatgaaaatgttaagtatctcattttaggatttcgatttannnnnnnnnnnnnnnnnnnnnnnnnnnnnnnnnnnnnnnnnnnnnnnnnnnnnnnnnnnnnnnnnnnnnnnnnnnnnnnnnnnnnngatnnnnnnnnnnnncatagaaaaaaaaatcatctaactcaatctattaatactgtctannnnnnnnnnnnnnnnnnnnnnnnnnnnnnnnnnaatgcacgttcctgtacaagcatgatagtacaacagtgtcctatgcgatgcagnnnnaaaatgagatact

SEQ ID NO: 5758 - DNA, 1939 bp, Macaca Fascicularis
tcctgactctggaacttctaatagatataaagcttctccagttttccagcgcgttccagtttgctggcgtgattcactggatcagcctggtcattctgtccgtgttcttctcagagactgttctacggattgtggtgcttgggatctgggattacatcgaaaacaaaatagaggtgtttgacggggctgtgatcatcctatctttggctccgatggtggcgtccactgtggccaatggacccaggagcccctgggatgccatcagcctcatcatcatgctccggatctggagggtgaagagggtcattgatgcctacgtcctgccagtgaagctggagatggagatggtcatccagcagtatgagaaggccaaggtcatccaagacgagcagctggagaggctgacgcagatctgtcaggagcaagggtttgagatccgacagctgcgcgcacacctggcgcagcaggacctggacctggctgcggagcgcgaggcggcgctccaggccccacacgtgctcagccagccgcgcagccgcttcaaagtggtggaggccggcacgtgggaggaggagacagcggctgagagcgtcgtggaggagctgcagccctcgcaagaagccatggtgaaggacgacatgaacagctacatcagtcagtattacaatgggcccagcagtgacagcggtgtcccagatgcagctgtgtgcatggtcaccacggccgcaatagacatccaccagcccgacatctcctcggacctcttctctctggacatgcccctcaagcttggcggtaatggcaccggcgccacctcggagagtgcctcccgcagctcggtcacccgggcccagagtgacagcagccagatgctgggctcttccacagactgcagcactgcccgcgaggagccatcctctgaaccgggcccctctcccctgccgctgccaccccagcagcaggtggaggaggccacagttcaggacctgctatcctccctgtcagaggacccctgcccatcccagagggccttggacccagcccccctctcccggcccagcccagcaggctcggcccaaaccagccccgagctggaacacagggtaagtctgttcaaccagaagaaccaggagggcttcactgtctttcagatcaggcctgtcatccacttccagcccactgttcccgtgctggaggacaagttcagatctttggaatccaaagagcaaaagttgcacagggtccctgaggcctaaagcctgccatgggctgggtgggaggaggggagacagccatctcaaagctctcctgggaccctggaggctgccaagggccacatgcggggcctaggagcccacctggcctccctcagggtgctgcctgcctccagggaggcgacgccaggccaggaggccacaagcttcagacctcaaagcccagagctggcgcctcttctcaccctgctcaggggagggtggtgctcatggctgggttttttttttaaccatttttacaaaaaccagcctgtggcccagcttcagcagggtagagtgcggggggccagctcagcctcttccgttgccttcgttcctgacgcccaccctggactctagggaacagcactgtgagcaggggctgtccagccccacccctaagccgtctttcccaggaatcctgagtggagtccaacacaatcacacggagaccaccatctgagcctatgtcatttgtcctcattcatttgtcctcattttctcattccagcatgagcgtttctgagtctcttcaagacaaatctagttttcaccttcacaggatataaagggatcaatctagaggtgggtgggagggtcctagggggcagggggacaatcattttccaacctggctttaataataaaaaccagctgcactgagaaaaaaaaaaaaaaaaaaaaaa

SEQ ID NO: 5759 - DNA, 678 bp, Macaca Fascicularis
  misc_feature (1)...(678): n = A,T,C or G
gctgcccgttgnnnnnntagacagagcccacttttggtttgctctcattcccagcagtggtgcacgtcatgcattctgttctgagattagactatcagcctttacacagcagtcaagagttatccagttatctttgtgaaaaccaaatttagataacgttccatcaccccaccccgacccttgcctctaacataatcannnnnnnnnnnnnnnnnnnnnnnnnnnnnnnnnnnnnnntgtagctttgcattttgagcgtgatgaatttgattgagattcattttttccccctttcttaactgtaagctccttgaggttaggtcgtttttgttcaccatagggctctctagccctgtggtgaactcaggccttagagctcttgccatgcagtcccactgctttgaatgctctttccccagttattcctcacttcgctgagaaccttgcctgcatatgaccagctcagtcctccatcctgtttcacacaacctcctctcccaaatccccctaacctgctttattttatttcatnnnnnnnnnnnnnnnnnnnnattacctcattatttatcttttattttttatttttgacttattttttgttgcttctctccccctagtagaatgcaacccctttgagggaagtgatttatctgtgttgttcatttctggaaccacagt

SEQ ID NO: 5760 - DNA, 677 bp, Macaca Fascicularis
  misc_feature (1)...(677): n = A,T,C or G
atagtttaccaacaagatacgtatatttttaactgcttcaagtgttacctaacaatgttttttatacttcaaatgtcatttcatacaaaatnnnnnnnnnnnnnnntattttaggaaactctccatgattatgacttgaccaactctattgtgagaaacagggatcataaagagcacgtttttcatgaccaggaaacttggacatttacgtacaaaatgaactgcctctgataattcttactgttctgaaattaggaaagtgctgcatgatcttacatgaagaaatagagtcggcaaacatttatgcaggcagattaataacagaaacacatcatatgttagacacacaaatacagtatttccctgaggaaaaaaaattaactgcttaaattaaaagggaggaaaaagacacatttattaccccaccccacaccacccactacctgaacaacagccaaggaaagaaaggagatgttcaaacaaaccacaaacagtgtgttgacggcactctcagcccttggcccgtgtgatcactgtctctgaaacaccgaccacctccctctgcagccagcgtgtagcttcagtggtgagaaattgtccttgagttattttccattttatttccttgtgtgtatttcatgactggacttcctgctctgtcagcttttgtatatgaa

SEQ ID NO: 5761 - DNA, 763 bp, Macaca Fascicularis
  misc_feature (1)...(763): n = A,T,C or G
atatgtagactttgagatatactgatcaaatgtgaagaaggnatgttaacttatgctannnngatatataatgtaatttattgactagtttgaaataatgtgaagtnnnnnatataagattaannnnnnnnnnnnnnnntcctgaaaactatccaatttgtttatttttctcaaaattcatactgnnnnnnnnnnnnnnnnnnntgattgggaggaggtgaccaggtgctgtagctaagtagtgctatgaccatgannnnnnntttgtacctctctaagctcagagttttcatgtaaaatgagatgattgcattgaggtttcaaaagttcctcttaagtaaaatgtgcttttattttgttttagttttagttttagttctggtacatgtgcaggatgtgctggtttgttccataggtaaacatgtgccatgtcggtttgctccacctatcaacctgtnnnnnnnnnnnnnnnnnnnnnnnnnnnnnnnnnnnnnnnnnnntactctccctacccccacaataggccccggtgtgtatggttcccctccctttgtccatgtgttctcatggtgagctcccacttacaagtgagaacctacattgtttggttttctgttcctgcgtctagtttgctgagnnnnnnnnnnnnnnnnnnnnnnnnnnnnnnnnnnnnngacatgatctcattcccttttgtggctgcatagtattccaaggtgtatatgtaccacatttgctttatccagtctattgctgatgggca

SEQ ID NO: 5762 - DNA, 702 bp, Macaca Fascicularis
  misc_feature (1)...(702): n = A,T,C or G
cccaacaacaagcccaagctgaacactgggcagatccaggagtccatcggggaggcagtcaatggcattgtgaagcacttccatannnnnnngaaagagcgagnnnnnnnnnnnnnnnnnntctgtggagagtgtggccttgtctcggccctggnnnnnnnnnnnnnnnnnnnnnnnaaatcaccccggctcttcaaaaatgtcttcatttgggatttcctggaaaaagcacaaacctattatgagacattagnnnnnnnnnnngtagtctctgaggannnnnnnnnnncaagagcnnnnnnnnnnnnnnnatttgtcnnnnnnnnnnnnnntactccccggaacatcggcaaggacnnnnnnnnnnnnnnnnnnnnnnnnnnnnnnnnnnnnnnnnnnnnnnnnnnnnnnnnnnnnnnnnnnnnnnnnnnnnnnnnnnnnnnnnnncacatgtatgaggatnnnnnnnnnnnnnnnnnnnnnnnacttgtcaattnnnnnnnnnnnnnnnnnnnnnnnnnnnnnnnnnnnnnnnnnnnnnnnnnnnnntcccttgtcaagnnnnnnnnnnnnnnnnnnnnnnnnnnnnnnnnnnnnnnnnactaagaaagactcaccctgcagctctgacctttcttcccannnnnnnnnnagcgattgtgcaggaggagacaaaatgtacactcactgtaaaaagaaaac

SEQ ID NO: 5763 - DNA, 768 bp, Macaca Fascicularis
  misc_feature (1)...(768): n = A,T,C or G
gtcaagagagatgtaagacgctcaaaagaaactagctgaacagatgcctgcaatcgctcttctgcatcctcnnnnngacacttattcaaggccagctcatctggccccctgcagcatttccagactgcccagtccatggtccatctctctgctgcacgtccacagcaggctattcctgtcctgagaactagtctctnnnnnnnnnnnacccaacacaaggcccctctcagtaacactcaagaaattatcactaggatgaaatcataaagattttatctagagaggaaaaatggaagaaggaatggaatggataggaaagagtaagaaagaagaacttgggtcatgggtttgagtgacagggggaaaagtgattttatcactaagtgaggtccagaagaaaaactgactgggggagggagctaatttttctttttgacgccttgggtttgagatccagtgtgatgtctgggtacagatactcataggaagtgggaaggccagtatctacagaagaaaaacctccagaataacctcattcattgactccttctgtctttcagaatggacttttgctctgtcctccaagaataaatctcaagagagagttaaatagcaagtgaatttctactaccctctnnnnnnnnnnnnnnnnnnnnnnnnnnnnntggaggctcaccttagagcttctgagttnnnnnnnnnnnnnnnncctccacatttgggcannnnnnnnnnnnnnnaattgtcgtagttaatttgggatgggga

SEQ ID NO: 5764 - DNA, 709 bp, Macaca Fascicularis
gccctagctggttttattcttggtaaacaaaaagagggggaggatttgaaggaaactagttttctgtacaaaggctttgaggtccatggactatacttgtcccatttatcatcccaagtggtgctttgaccctgccataccctggctgttaagataaaaagatttgtggacattaaaattatgaatatgccagtaataatccagcacacattgaaatattgacacagattaccataatttgtgcaacatcttataaacaatgtcatttccatagtagtctcaggtttcaccagcctggcccactgtatctagactttaggttcattttaataattatgctttccttttctgtatcatttgggaagttgataaatatcacttccttagatacctttattcaatgatatgtctggattttacaattaaattggaaaaggtaagtttctgtttgggtgggttgagagttggactatcaattctaatctacaaaaggaaattcatgatttcactctgacacctaggatctagccaaggttagtctgcagtatcagatggtcaaactcatctactattagccgtattttgtgagttgttcatctaaactttgtcaaaatgcctttgccatgattttgttgctatctgggtttcaaacacggacagttaggaagatgtgcattgaagtaggaaaattttgttcagatttgctgtt

SEQ ID NO: 5765 - DNA, 721 bp, Macaca Fascicularis
  misc_feature (1)...(721): n = A,T,C or G
ttaaagagcacagagatcntatgtctccctagtgcccctaatgagactgccaagtgggggctgtagaaaagccttgccttctccagggactggccttgtttctgtattcactggatccataatgggttactgttgttttgcatgaaggtaaaggatactcagnnnnnnnnnnnnnnnnnacttatagagagattattgcattattaaaatgcacgtgtgtgtgtgtgagtgtatgtgctgataggatgggtaaaggctaggggagtcctgaaataaggaaaggaaaccacagagaaacttgtgtcttcctgctctcctctccggctgcctcgcagaggggctaagcctcactgtcttggtgttattaacctaaacagataggcacgagaggttgggacagaggaggctaaaggctcaggaggttcaacctctgactcacctgcctgtctctgggccctctgctgatacttggatgctattgttgggtggaaagaaaaatgagagtgggcaaggggaggaaagtgactaggatgacatttaggaaggaatgtctgatcctcccaggtccctggaggggacaccttttaatctattgcctagcattaatattttctctccttctatctctgaaatgttttatgaaatgagcgttcttgaattggaagttctgtgggatcaatctttgatggtgagggtttagaaaggaaaaattaagtaaaat

SEQ ID NO: 5766 - DNA, 2752 bp, Macaca Fascicularis
taatcaggtggtttctatggaggtcgaactggctggaaggaaggccggttcctgagtttctttacttatgtagcagggactcaaggaagtctgatttgcacctggcctctgactcagagcccatgagggttcctccgtgaggccactggctgccctggagctgacaacatcctacacaatggctagatggcttgtcaccccaggccgcagaggaacaactgtttctagggtttggccagacttcacattctccattctttccatccctgttatgtggaatgcacacgatgccatataattacttcagtcccttcttaaaggaaaaagaatctggacccgcactccaggacactggcagtttgaaggttcgctcaggaatgttctttgtctgcagacctagcagctgtacagatcactcttgtgtttttgcattattaattaacttcaagtgcaattttggcaggcaggccaagggtctcaacagactatttggaatgagttctcttttaaggcctttaacgtggtgagacattttcaaatcaaaaagtacagtaggagccagcctttattttgtctgtgtacacaataaaatattccacttctgtaggcagatcagctggtcttggtcacaaattaaatgtgcatattattactgtgcttattaggcaaaaacctaaactacagaaatttttgctatttccactgctttcttatgcactagaaaaaggcatgaatttggtgtctttttttaaaaaaggttattttcttctttatattctggggagatgtcatagacaatatttttaggttgagaataattgtacatactcacggcttatgtagtgatattttccatacatggaacataaagtgatcacatcacaccagggtcactagcacagccagcatcttgggcatacaccactcagccttgcagggaaggtggcagacatgagtgctggcctgcctgggtctgttggagatgagccggggggacaggcgtcatgtggggaagatagtgaacaggagtgtggggctctcagggtctgtgtggaggtggccccaggtggatgggcttcacgcctccctgtggtcctggtctccatgtggctcctgatccctgagttgttgccggtctcttctgggccttgccgtgggtagtataaccttcatggcggcttgctaggactatgtttaaaagaagaatatgatgtatgtttaataattattggcattgatgtatgtcaaatggtactctgtgtctgttgggttcagtacaggattttatttgttttccctatcatttttaccttcgaacatctgggtcagggttagacagattaatacggcttattccgctacccttagtgtcatccagccttccccatcgacacctgcctggccctgcgtgcctccagcttctgcacctgctgggccagggactgtcttccacacccccacggtgctggctgccctccaccgtgttggagagtttcgttctatcatttgcagtgtgcatgaaacatctcacacttagagacaagagaaagggtttgtgtttctttttaatcctactttcccactccatctgcagttagggacccacgtgcagacaggtcatgagcgcagtggccaggcgagagctgggactcaaatctgagctgcctacccaggtccccagctgccctgctgtgggcaggaattccacacccacatgcaacgctcccacagggtcagccaaacagagcactccgcagcctggagatggcaggccagagtgtggccgctgcaccaggcaggaggtggggcgggcatctcatctcaccaggcctgtactggcagaggcagagccatgacctgaccctggtgctgggctgctggctccctcccgctggctctcagatggcatcacccaggtggtcacgcaaaggctcttggatgtgtgagacagggagatgttgtctctgctagggtttgcagagatggcagcctctgctgtgattttgtgcttctccccagatcctgaggaggatgaaggggctggccctggaggctgagagtgagctagagagacaagacgaagccctggatggcgtcgcagcagctgtggacagagcaaccttgaccatcgacaagcacaacaggcggatgaagaagctgacctaggggcagagtgtccctgcattcctgtctctgcctgcacatccccctgagatggaggactgagagtcggtgccagggctgcagaggcctgtggccctccggtgtggtcttcctctggatggggctgctactgtggggccacctccacactaggggcctccataggtgtgcgctatgcctgccccccactcggctctccctgttgccggacaggacccggccacatgttctgcagatgccgcagaagtgtggaccatggcgggaccccaaggacacttggcacaggcctggaagaggccaatgcgctgccctcgtcttgtcttggctccctttcatggacagactggccttctaagctgtactatgaatttgtgagtgaagttagaacccagctcactgagccagctcactttgagggcatcctataaacacccagctgttcttttatcgtctcggttttggccaaaagtgaaattagcatgactgcacctttcaaacagaaatactgatttctgcttttatggccccatttccatccagaaataaagggaaatgctggctttaaaaaaaaaaaaaaaaaaaaaaaaaa

SEQ ID NO: 5767 - DNA, 650 bp, Macaca Fascicularis
  misc_feature (1)...(650): n = A,T,C or G
cagcctcccaagtagnngagactacccacactttggtcccagctacttgggaggctgaggtgggaaaatcactttagcccaataattcaaggccacagtgagctataattgcaccactgcactccaggcaacagagtgaggccctgtcttagaagggagaaagtgtcagatagtgatgaggtctggggggaaaaatagataatggggattaggagtgtggatggtggtattccctcaccaagaggtggcatgtgagcaggcagctgggaggtgaaggtgtgacccatgtggaaatctgagggaaaagcattccaggctgagggaannnnnnnnnnnnnnnnnnnnnnnnnnnnagtgccactgagcagtgagctgctataggggcaggtgatgaggttggagagtggggtcagacaaacatacacttcttaaaacaagttgtacagcacctgcctcaagcttgagctaaagctgaaaattgacacctcaaagcaggtggaagccaagagatggaggaaagccctccttccctactagaatgagtccacctcagacagccagatgtcggacctctgcctctgttcctagatctctgttgctagatgaaggaaagggccccaggggacccatgttcaaatcaagggctccct

SEQ ID NO: 5768 - DNA, 768 bp, Macaca Fascicularis
  misc_feature (1)...(768): n = A,T,C or G
ttttgtatttnnnnagaaacaggttttcactatgttggccaggctnntctcaaactcctgacttcaggtgatctgcnnnnnnnnnncacccaaagtgctaggatgacaggcatgagccaccgcgatcagccagaacccactaattttagatgtacaatttggtaagttttgtaaccaccacagtaatgacctagaatattcccatcattccagaaggtcctgtcattcccctttgtaatgaacccacgctctgacccagcgccctgcaaacacagatctgctttccatcattggtttgcctgttttaagaattgcagccaaatggaatcttacagtatttagtctcttctttttttttttccacacttaatataatgctttgaagagccatctgtattgttatattgacgtttgtgtaagtagtccgttccctttatttnnnnnnnnnnnnnnnnnnnnnnnnnnnnnnnnngatatgatttggctttgtgtccccacccannnnnnnnnnnnnnntgtaatccccttaatccccacatatcaagggagaggccaggtggaggtaactgagaaattatnnnnnnnnnnnnnnnnnnnntgttttcacnnnnnnnnnnnnnnnnnnnnnnnntctcatagttttataaggggctcttccgccttctctcggcacttctccttcctgctgtcatgtgaagaatgtcttgcctcctcttcaccttccaccatgactgtaagttccccaaagcctccccagccatgctgnnc

SEQ ID NO: 5769 - DNA, 711 bp, Macaca Fascicularis
  misc_feature (1)...(711): n = A,T,C or G
tcacaaatgtaatcaggtctgactttctagtttgttttgtgtgtgtgtggaattacttttattgttttttctggttgcaaaaataatatatgctagtttttgngggttttttttagaaaatgcataaaatagagcatatatttctccagttccctttttctcaggctaaccactgcttccagatctttacagatttttctttacatctttacttttttaacaaaaatagtcagagataaacattgttctgcatgctgctttgatatctaacaatcattgatgtctttccatatcagtgcatgctgatcaatttcattgttttaacagggtcaaaggattctactgttttcatgggctattacttatcttatcttgtcccagccatctacatgtagagtacttctattttgttgttgttgttgtttttctgggaattgctgaaataaacattcgtatacatatttaatgcatctgtgcaggtacaatacattcttagaacctgcattattgagtcaatggtaagcacatttgaaatattcataataatttccatattttccctcgaaaagaagtacagcagcaccactgacattgtatatgggttctttttcaatctttactgaactaatagatgaaaaattctttcctatggggaatgttgcagtgggggaggctgtggtgtgtggggtcaaggtatgtgtggaatttctc

SEQ ID NO: 5770 - DNA, 729 bp, Macaca Fascicularis
  misc_feature (1)...(729): n = A,T,C or G
taacagcataatttagtatgttaacattggttacttttttatctcttcttccatcattttccctgcttcctttttcttttgtcatattcttaaaacaattttgcaaccacaggtacccacattgctgtcactgccagccttgggctactaccgaggataatggagccagggccttggagaagcacagaggaagtctagaactgagggggcctatgacacaggaannnnnnnnnnnnnngtctcaaaggaacacctgcctctaatgtttacagaagtgaagaaaggactaagggacttaaagacatgcaggtgtcttcatcctgattctgtctttattattgcgcaatggctataaaataatgagcttaattttttttttgttttctgggttggctaatggaaatcgacgctagcacttccccaatattagacttacctaattccaaagtagcattcaaggaaagaaaaagcagtggagcaggatcagtaagctcagactctccatctccnnnnnnnnnnnnnnnnnnnnnnnnnnnnnnnnnnnnnnnnnnnnnnnnnnnnnnnnnnnnnnnnnnnntggcttcagttacaatttgtttgaccctgtattcagagctgcaatatgattgttgtgggccctaggtagttttgccttcttagaccccttcttccatacaaaatttaaagtgatattttacaattgtgtttgtatgaaatgaatgtattaat

SEQ ID NO: 5771 - DNA, 722 bp, Macaca Fascicularis
  misc_feature (1)...(722): n = A,T,C or G
agggcggcccagagagggctgcgaggatttccntnnnnngagaggagatcagggccacctgcacacactgcttagagcctggaagnnnnnnnnnnnnnnntgacatcatgtaaacctcagcacacagcgatactcggatttgacaaaataacatttgagtatcagattcgccctcaccccctaccctagaaataggacaattcacttcattaaannnnnnnnnnnnnnnnggaaggcagtgcagaggcagctgtgtgggctgcagatttcctgtgtggggttaaggatagaaaacaacgcatctccctccggcccttcccgcagctttttcctccaccttagatagattgtactctccaagccgcaccgctttcctccaccttagatagattgtactctccaggccgcaccagagggaaatctccctccggcccttcccgcagctttcctccaccttagatagattgtactctccaggccgcaccagagggaacgcggcctactgagcggacagaatgatgccgaaatattgcttatgtctctacgtggtattgtaatgaatatctgctttaatgtagctatcatttcttttccaaaattacttctctttatctggaatttaattaatagaaatgaatttatctgaatataggaagcatatacctacttgtaatttctaactccttatgttgaagagaaacctccggtgtgagatatataaa

SEQ ID NO: 5772 - DNA, 708 bp, Macaca Fascicularis
  misc_feature (1)...(708): n = A,T,C or G
ggccattaaatccaaacacttgtctccgttccttctcatggtcacactgggtcatcagcctgtcccagtcactgcagcaacgccttgtgtgtgtttcatattttttaaacccacacaaagccactctctcactttttcctacattaccaacctcagagtatttcagcccatgtcgaacttttgttctcagtatcagcccatggtttcaggatcaaagctgtcatgttggagattggtaatggttttcctgtctttgtacagttgaattcttagtcttccttcatcctcgccctctgttggcacaggcattatctgcaattttagaaaatgacaagtagagatactacattgagaaactaaaccctctccttggggtcctgatattcccatgtgtcccagtgctgacaacccaatcttcccagtactttcaggcctgctctacaaaaatacctttcttgtagaaattttacagtctgccattttgggtgcccaccccaatttttaccttttagtaagttcgcatgaaattttgttaaaatctgaaaatcacatttcagaataaagaaacaatnnnnnnnnnnnnnnnnnnnnttactcttgagtgtctccttttgatagggcttgtttctggaccagtttgtctaagtcctggctcttattggttcatatgaaataatgttaacttcacttctttgtatattatgtata

SEQ ID NO: 5773 - DNA, 316 bp, Macaca Fascicularis
  misc_feature (1)...(316): n = A,T,C or G
aaaaataaataaaaaaaaaactnnnnnnnnnnnnnnnnnnnnnnnnnnnnnnnnnnnnnnnnnnnnnnnnnnnnnnnnnnnnnnnnnnnnnnnnnnnnnnnnnnnnnnnnnnnnnnnnnnnnnnnnnnnnnnnnnnnnnnnnnnnnnnnnnnnnnnnnnnnnnggccggggattaaaacatttaaacgtgttgtgtgtacccagatattatgttaatttaggaaaaactaaaatttctatgaagtggttgtgactattttctgtagtcgatacaattgggatatctgatctatttctctgtctactttggaaatga

SEQ ID NO: 5774 - DNA, 730 bp, Macaca Fascicularis
agcatgtgactaatgttgctgcataaaatatatgagattttattaggcattatttatgatcttttctatgaaaagataaggacattaaaatgtaagatgcatgatgaaaatttaagtagagaggctctttgtggttaacttataatattgagtgatgcatgaggtaggtgttcactatgaatgaaaaatattcttaattttagttaaaattaagttatatgttattttattgtacttctatggaataatatgcagtatatttttaaattataaattatgtgtgaacttagcttttcaattcaacatttttaacatgttaaatactattgtgaattcaatgaagtgttctcatgccactaacattaacctattccactttattcaagggtgtaggtaaaagatgataatacacttttgtaagataatggactgtcatctctaggaatcttttttgccagtgactttaaattgccaataagttaaagaatattgttcctataggttaaatttttattcttattttcagatttaaatttatttttcttaatttttgtggatacataatatgtgtatatatgtatgccatttatggtatattttgatgcaggcatactctatataataatcacattagaggaaatgagactatccattacctctagcatttattctttttactacaagcaattcaattctactgttttagctatttttaaatttacaattgtta

SEQ ID NO: 5775 - DNA, 732 bp, Macaca Fascicularis
  misc_feature (1)...(732): n = A,T,C or G
tgcagctctattttctagctactgtgctgagtgctnttatggactatctcattaaatcccttcaacaactctattcagtaggttccattttatagattaaaaaaactgaagcacagatatattatgtgacttgtccaaggccacacagctagcaggtggaaccgggatttgaacccacgcagtctgacacaagagctcatgtgtctaatcattatctgtggtttggggggacaccattacactgaaatgaatgagtcactaagtgagtcactgtatataaaatacttggaaattgtaaagtaatatacaaaagatattaatgaagtattattcatggtaaacaaatcacatcagtagcaaatacagggtgagaactcaatcttatgttatagttcttaagaagaatatgtgaagccaggaacatggttaaaggtatagatcagaaaatttctgacatgtgataaatatttcagtgacttttcagatttatttcttgttagccactgtgtctatttggtgctacaaaaactgaaagaaacaaaatccctgatataagggcttataacaaatacacagtttggagatgaactaaggatattttacatttatggggaaggattggacaatagtatcattttctcaccacttgcatgtacatcatgtctttccaanttgttttcattatttttctgaaaaagctgcaaaattgtgcagtggttcaacctgaccaca

SEQ ID NO: 5776 - DNA, 739 bp, Macaca Fascicularis
tctcactgctagaatattcaccaagggttgcatttgggaagtctcttaccagctcctgcttagagctggtagggccatacatgtccacgctcctgactggtggctctcctgctgaatggggcctcagcaggtgcccaggctgctacaaccttggccactctatttctctaccccaccattgggcattgtaattagcctttccccatgttaatttattcagtttttccaagggtcaactgaattcaccacttcctgtgtaagaatcatgatctccttttaatttcaccactaagatcctggcagcttcccctagctggttcctccgtagtcctactgggactgtcagctcatttaaatgtgggtctgcaggaggctttagctctcccccaagccccttgcctttcacagaggaaccattcatcaggataaatgattattgctgccctatgggtcttgctcaatactgttcatacctggagagaggaggtattgaaacatctcctttatgtgtgacttttgcaaattttaaaaacttgtttatggtttaggccccttaaatactgtgtagcaggatgaagtctaccattaccaactgagtcaccttggacgggtctgtcaacatctaagcctcagttccctcgtctataaaaatgagggtagtccctacctcataagagatattgtgaggatggaaagcgaaagtgtgagaaaatacctcccaagtgcctggtacatagtg

SEQ ID NO: 5777 - DNA, 737 bp, Macaca Fascicularis
  misc_feature (1)...(737): n = A,T,C or G
taaggggacaggcacattgcagttgtagatgttcgtnnncagcatctagtagataatccattggtgtttgtcccaccgtggtgtgttctaacaagaatgtgtccgactttgaatctnnnnnnnnnnnnnnnnnnnnnnnnacttaattcttattttaactctccacctgaaaaccagttcatatttctggccattttatgtaagcaaaaccgaacacttggtgaaatattttgttactcttggaattgactctggctctnnnnnnnnnnnnnnnnngtaacatcaaatcttggggtaaagagctgcccaggtgaattaaatttttccaggacactagctagtgtgccttggattgattacctcttctactgcattgaaaggtgccatgttttgctgaaatactaaattcccaacacctgggtaaacaatgacctcccagagagtggctcccgtgtgcctctccctaggaccaaccccgtgaacatgttttgtcacacttgtctcatgtttctacttcacaagtcagttgagtgtgtttaaggtaagtacaggattnnnnnnnnnnnnnnnnnnnnnnnnnnnnntaatcaattctcatgttgatttcattttattgtaaagataaatttaaacccagttttgcttaagcacattgatgtaattttttggtattatttgacatgaaaaaaacagcaaaattgagtgatagatacaatatgaaacttgttgatgaatga

SEQ ID NO: 5778 - DNA, 733 bp, Macaca Fascicularis
  misc_feature (1)...(733): n = A,T,C or G
ggataaagaaaacttatatcaaaacacnnnntnctgaaggtaattttacatttttgccttcctaatgaaacatggtgtattttgaaatttctttctctcagggagaaaagaatgggaactgtgaggaaaagaatggcatgagcaatgggaagacctaggtcccagcacaagtagtagacgctgaggaagagaagaagtatgttgtggagtaagtgagtggggcctgagttgagaagacgctggccttggatttttaagctgtcaagtgtctggttatgttggtctctgcttttcattacagatatatgtgagttttactttctattaagggaagtggctctagtcaacactatgccagggtttcttaattttcaaaggtgaacaaatgagattctggacattaaatctcagcatcttaaggtaatggttcacagaaattaatttgggaggaatcatagaccaaaaagtaaaagctcggactgggcacgnnnnnnnnnnnnnnnnnnnnnnnnnnnnnnnnnnnnnnnnnnnnnnnnnnnnnnnnnnnnnnnnnnnnnnnnnnnnnnnnnnnnnnnnnnnnnnnnnnnnnnnnnnnnnnnnnnnnnnnnnnnnnnnnnnnnnnnnnnncaggcacctgcaatcccagctactcaagaggtggaaacaggggaattgcttgaacctgggaggtggaggttgcagtcagccgagattgcaccactgtactccagcc

SEQ ID NO: 5779 - DNA, 4621 bp, Macaca Fascicularis
agtcgattcaaaggggaaacttcagcgtgaagtgcagctccgctccggctccctccagctttctttccttctctggaatccgaggcgcggatcttcctcgccccaccgccctagttttttcgggagctcgccggtgccctctagggtgtcggctcgtgctgggaggtgccctcaatcctggtaatgggggacggcgaggcaccgtaggagtggcgaggcggcgcccagggtgacactgccccggaacggggcgctgggtgcgcgcgggcgggcgggtccctgcgcgggctccgccgctgccgcagctgcgagcgcgccacgccactgagcctcctgcagcaatggctcgtccgtgaaacgcgagccacggctgctccttttaagagtgcctgcatccttcgtttgcgcttcgcaactgtcctgggtgaaaatggctgtctagagtaaaatgtggcagaagggaccaagcagtggatattgaacctgtgaagtccaactcttaagctccgagacctggggtaccgagaggtaccagctctgaaaagtgcatcatgaattctggagttgccatgaaatatggaaacgactcctcggccgagctgagtgagctccattcggcagccctggcatcactaaagggagatatagtggaacttaataaacgtctccagcaaacagagagggaacgggaccttctggaaaagaaattggccaaggcacagtgcgagcagtcccacctcatgagagagcatgaggatgtccaggagcgaacgacgcttcgctatgaggagcgcatcacagagctccacagcgtcattgcggagctcaacaagaagatagaccgtctgcaaggcaccaccatcagggaggaagatgagtactcagaactgcgatcagaactcagccagagccaacacgaggtcaacgaggactctcgaagcatggaccaagaccagacctctgtctctatccccgaaaaccagtctaccatggtcactgctgacatggacaactgcagtgacctgaactcagaactgcagagggtgctgacggggctggagaatgtcgtctgcggcagaaagaagagcagctgtagcctctccgtggccgaggtagacaggcacatcgagcagctcaccacggccagcgagcactgcgacctggcgattaagacagttgaggagattgagggggtgcttggccgggacctatatcctaacctggctgaagagaggtctcggtgggagaaggagctggctgggctgagggaagagaatgagagcctgaccgccatgctgtgcagcaaagaggaagagctgaaccggaccaaggccaccatgaatgccatccggggagagcgggaccggctccggaggagggtcagagagcttcaaactcgactacagagcgtgcaggccacaggtccctccagccctggccgcctcacttccaccaaccgcccaattaaccccagcactggagagctgagcacgagcagcagcagcaatgacattcccattgccaagattgctgagagggtgaagctatcaaagacaaggtctgaatcatcatcatctgatcggccagtcctgggctcagaaatcagtagcataggggtatccagcagtgtggcagaacatctggcccactcacttcaggactgctccaacatccaagagattttccaaacactctactcacacggatctgccatctcagaaagcaagattagagagtttgaggtggaaacagaacggctaaatagccggattgagcacctcaaatcccaaaatgatctcctgactataaccctggaggaatgtaaaagcaatgccgagaggatgagcatgctggtgggaaaatacgaatccaacgtcacagcgctgaggctggccttacagtacagcgagcagtgcatcgaagcctatgaactcctcctggcactggcggaaagtgagcagagcctcattctggggcagttccgagcggcgggcgtggggtcctcccctggagaccagtcgggggatgaaaacatcactcagatgctcaagcgagctcatgactgccggaagacagctgagaacgctgccaaggccctgcttatgaaactggatggcagctgtggaggagcctttgccgtggccggctgcagcgtgcagccctgggagagcctctcctccaacagccacaccagcacaaccagctccacagccagtagttgcgacactgagttcactaaagaagacgagcagaggctgaaggattatatccagcagctcaagaatgacagggctgcggtcaagctgaccatgctggagctggaaagcatccacattgatcctcttagctatgacgtcaagccccggggagacagccagaggctggacctggaaaacgcagtgctgatgcaggaactcatggccatgaaggaggagatggccgagctgaaggcccagctctatctactggagaaagagaagaaggccctggagctgaagctaagcacgcgggaggcccaggagcaggcctacctggtgcacattgagcacctgaagtccgaggtggaggagcagaaggagcagcggatgcggtccctcagctccactagcagcggtggcaaagacaaacccagcaaggagtgtgccgatgctgcctccccagctctgtccctagctgaactcaggacgacatgcagcgagagtgagctggctgcggagttcaccaacgccatccgtcgagaaaagaagttgaaggccagagttcaagagctggtgagtgccttggagagactcaccaagagcagtgaaatccgacatcagcaatccgcagagttcgtgaatgatctaaggcgagccaacagcaacctggtggctgcctatgagaaagcaaagaagaagcatcaaaacaaactgaagaagttagagtcgcagatgatggccatggtggagagacatgagacccaagtgaggatgctcaagcaaagaatagctctgctggaggaggagaactccaggccacacaccaatgaaacttcgctttaatcagccctcacgcacccgacttctgccgtgggaagtaaactgcagcaggccactgaggacagaagggcccatgtacttgttgggaggaggaggaaagggaaggctggcaggtaggttggcacctggacaatggagtgccccaactcagcccctggggtggactgaccatggtgacacagtggactgtatccagaggtgcccactcttgcctccctggcccacaacagcatgtcaacacatgttctgtgcctgctcagcagaaccttgtttctgctttcagcattcactctctctttcctcttctggtctggcggctgtgcatcagtgggatcctaggcatttgtttctgtaagattttccattctatcctctttttggtagatggtgggctcttctaggatctccagtttctcctctttcctcctgcttcatgggaaaacagacgtgtgtgtgcctccagcatttaaaaggactgctgatttgtttactgcagcaaggctttggttttcaagtcccaggtctcaactttaagatagaggcggtcataagaggtgttctctgggagttacaggtcatgggaagagggtagacaggtgttacttacagtcccagatacactaaagttacagaccaccaccaggactgtgcctgaacaattttgtattaagagaataaaaacttccttcaaccttcattttggaggcagggccaaggaagggagcattctctcgattctgggatttctccctctcagtggagccttattaatatccaagacttcgagttgagaatctttttgatacctatagtggaactaaaattttatcaggggtttcttcaagagcagagaaacattagcacttcctgccccagggccctacataattgctgttctgctgaatcagatctctcccacatgggtacatttgtagctctggacctgtctctacctaaggacaagacattgagatactgaacattttgcaaaactgatcacgcctacttaagagtgtgcataacccccagttcaagacttagctcctgttgtcacgatggggacagggtgaaggaatggttgttaaggctgcttttctgcccccagatacatggtgatggttagcatatggtgcttaaaaggttaaagttcaagcaaagcgctcacagggctaggcaggaccaaagtacctgaattctttcaggaaggtcttccatcttaaaacaaattcattattctttttcagttttaccccatctctgttctacactgacacacttgaaggaccatttactgttttttttctgtagcaccagagaatccatccaaagttccctatgaaaaacatgttccaatgccacagctgactacaaattaaacttgatgaggtttctgcagtagagtgtgtccatgagctatgggtgggtctattttcagagcatgatacaaattccacagccttctgttcaatggaggatactccagccaccaattcagagggtagacagttctatccgaaaagcaaccactgagaggccagcagtggggctgcccatctccaaaacaaaacaaaaaaaaaaaaaaa

SEQ ID NO: 5780 - DNA, 732 bp, Macaca Fascicularis
  misc_feature (1)...(732): n = A,T,C or G
agatacaggtttagaagagaaaagagcaacagannnncagtgttgcagtcactcggttatctgtgaagggttgtgcaaaacaggaaggtctaggaatgactagatatcttgttggcataaatgttatgaaaaggcagaatactggcaagaaatgaggaagagagagaaaaacaatataactttcttgagtgcaaaggtgctagacaattaggagcccagctgggactggtgcagggagggccgaacgctgactagtgtggcctcactgccccagacttccttttagaggaaggcctgtcctgctggaactggggccaaggggaggctgcctatgaaggcagaagacgtggatgaattcaggcactgggggtggggggttatttataaacgcaaggtggttgatttaagccaaaaggagataccatcctgataagctctgttaaagagaagatgtgcctggtgtgtgtgatgcggctggggtatgaaaacactgagaaggagatgaaggagtgtgcgtagcatgggggtgtgtacaacttaacacctggacttttactgggggagtgggaaagtgattctgtaaccaacactagaattgctttggatttgtaatcaaattggttctatgatttgtctttgactattcacagataattgtaaatgctggttttataagcccaagtcattttacatttgcttttccaaaatnnnattaaatttgaattttttaat

SEQ ID NO: 5781 - DNA, 609 bp, Macaca Fascicularis
  misc_feature (1)...(609): n = A,T,C or G
ggccggacggaggaggacttgnnaggnnnnnnnnnnnnnnnncctcctcctgtaggggtgcaactttggggcccagaggtgcgggattctgaccaacggcattaaaactgaggcgaaaccgggcgcggcgtggctctggggttagaatgggagatgggggtggcgttgcagagtcgggaaggggcgggtcactcaatcctggcctgggggagaatgctggagggagcacgccgctgagatgcccccaccccaggtttcccccatcagagttaagaggaaagaaggctattcatttactgagcacctactgtgtgttgggacgctgtacagagannnnnnnnnnnnnnnnnnnnnnnatgaggtggtgtcctgcacggaatagaaggggaaaggaccccagagaagtggctgtgacccgtccaagggcacctggccagtgaatggcagagcctctggcactggccagctgcctggcctcgggcaagtcacttcacttctctgggcctcagtttcctcatctgtcaaatggggttaataacagaacctacctcgaagagttgtgaggctgaaaagggttcatatgtgtcaagtggttaggacagtgcctgg

SEQ ID NO: 5782 - DNA, 868 bp, Macaca Fascicularis
gttttttgctgcggtctaacgcaggtggtagtggtttgggttcgttggtcccgatgcgcgcggtgtccatggtcttcgcgccaggttggcgcgggagaaggccgagggaccccagagttcgaggagttggtgacggtcacgcagtccgtcgctcctctggcggtggggcagtcggaaagtgaatagcagtctttcaagcgaccggtccgtgagggagcgtgtgccgggatgggttcccagcgctcggggccgttaaacagttcaagccgcgtcctgcccagtgagggctgtgttagcgtcctctccggttccagccgggaaggaggcactgagacgacagctgaaggtcactccgttaaggctgtcgctgctgtaggggccctcgccccgctgcgtgttcgtgccacccagcgtactgagtgctttttcaaaactttatggacgtctcaaaacacgtgtgacagatggtagattttaaaatatctacacattgctttccggtggtgatgaactacccacacgagaacatgcctctcacaaaggatctccttcatccctccccagaagaggagaagaggaaacacaagaagaaacgcctggtgcagagtcccagttcctacttcatggatgtgaaatgcccaggatgctgtaaaatcaccatggtccttagccgtgcacaaacggtagttttgtgtgttggctgctccactgtcctctgccagcctacaggaggaaaagcaaggcttacagaaggatgttcctttaggaggaagcagcactaaaagcactctgaatcaagatgagtgggaaaccatctcaataaacacattttggattaaaaaaaaaaaaaaaaaaaaaaaaaaaaaaa

SEQ ID NO: 5783 - DNA, 682 bp, Macaca Fascicularis
  misc_feature (1)...(682): n = A,T,C or G
attnnnnngctccgtttctacccatgaataaaacaaaagattggcccagaggcactgcaggggcatcctagctgccaagcaggtggcagacatcactatgtaggtgggagaagagcccctggaaccctgatcttggacccagaagagaagagcagtgaggatggggccaggcctagtagaagagagggacaaggcagtgccaagggggagaaaggtcccccaaagcaggggagggcaaagcgggaggattggtgaagaaagaggatattgggattctgctggggtcctggtcagaactgaggggcttgacaaaaacccagttcaaaactcacacaaaaccctcctgtgtggacatgtccgggcctgcccttgggagaggctctgggactttgagaagaaagagcatcnnnnnnnnnnnnnnnnnnnnaggagagctgggtctgaatagatcctgtgcacctgtatgtggggttaggctgccagggcagcccacccctgctttaacctacccttgctcaaggtacccacaggtagccctgctgttggggggctcctgtgagggtggaagtcaagctggggaagggccccccagtcaaactcagctgaggaaggggcccccattctctccccattgggggaagaaaagaaagcccccactgtacagtcttgattttcctaacct

SEQ ID NO: 5784 - DNA, 736 bp, Macaca Fascicularis
  misc_feature (1)...(736): n = A,T,C or G
gaaatagaaggagccaggtccatgttgatgctcctagtgtgttcaaataactcttgaattcaccaggtctcactgcatttatttaaagatggagccctttgtcccnncctcnnnnncagctcacccatggaactagaaattcacaaacctgaagctgaaccacaggacaagaaattaaacagcaacggccacatggcctattttttcacaggttttgcattgaatgttttagaacttaatcccccacccccttactcgtgtataccaaaactggttttattttcattttcctaaattattttctgatacaataaactgttaactgtttatttatacttttacaaggagcacttgttatttttcaaaaggaaaacaaaagcctctctgttttcatgttctccgtatatctataccacagctgtctctctagacatatttatatatcatcttctcgagagagttaacctcctgtagtttaatgttatgtttttttctttaaatgcatatcataatcatgttaataaacaaaaatgacacaatatatgtgggtgggggcggggggcaggtggctgggtgtgatttccgtacaggtgaacttttattccagatttttttaagttgtttctgtatttcaaagnntatgtatttggaaaacattgtaaatgaaacacctatattaactttcctgtgtatatttagtactctgatgttgctattaaaaaaaaaaaaaacataa

SEQ ID NO: 5785 - DNA, 707 bp, Macaca Fascicularis
  misc_feature (1)...(707): n = A,T,C or G
ggcaggnnnnnnnnnnnnnnnnnnnnnnnnnnnnnctaaaacatgaggggaggcgtggggaggcctggccgagcccgccggccagcctgacaagccaggctgnnnnnnnnnnnnnnnnnnnnnnnnnngtaaggctcggtggctgctgcggtcccacacccttcaccggccctcgggacccagggctaggcataacctgttggtgctgtcccccaaaacgcaggcttaagtccactccccgccccaagttctctgnnnnnnnnnnnnnnnnnnnnnnnnnnnnnnnnnnnnnnnnnnnnntggatatcccccacatggacnnnnnnnnnnnnnnnnnnnncaacaagaataaaaaactggtcaagaaactagccaagaagtannnnnnnnnnnnnnnnnnnnnnnnnnnnnnnnnnnnnnnnnnnnnnnnnnnnnnnnnnnnnnnnnnnnnnnnnnnnnnnnnnnnnnnnnnnnnnnnnnacaacgaaaacatggtggccaaagtggatgaggtgaagtccacaatcaagttccaaatgaagaaggtgttatgtctggcnnnnnnnnnnnnnnnnnnnnnnnnnnnnnnnnnngagcttgtgtataacattcacctggctgtcaacttcttggtgtcattgctcaagaaaaactggcagaatgttcgggccttatatatcaagagcaccatgggcaagccccagcgc

SEQ ID NO: 5786 - DNA, 1666 bp, Macaca Fascicularis
  misc_feature (1)...(1666): n = A,T,C or G
gataactnnnnnagatacagagagaaatccatcttttcccaggtctccttcactgaaaacaaaaatctacttacatacactgtcaccttagcatcagagtcggattaatgaactgcggaacaagaggttgtgagaatctaagatggaacctttctttcttttttttttttttaattttgtattttccatccaacagcagtgtgtagagagaatattatgcagatgccgttaattttttaccctatgtttacatcttgaggcagaagagtctgcagctatgtggtgagctatgtaaggaaaaaaatctgggctgttagagtgaaaaagtgtgttttatgtaaattttgaaaggaaaatgttaggagtatggtttttaaacttgggcttcattttaaactttttcttttaaacccagttatctcacttgatttgctagctccagagaagagatccgaatctgtgcccagcgctaaaggctcagtgttagcatggcttgtgctggccggtgtgccatattcttgttggagatgaaccgtagcaccagagcccattcttccttgtcagtcttgacnnnnnnnnnnnnnnnnncctagttatttgtcaccacataattggtgttgattggaaacttctgagatgggacagaactgctgggttgtctttttccatgtaacttaagcatagtaatataaataaagtaatagttggatgcttttggtcctgtgttgcttttaaaaacaccttataaaagaggagaggatttgataagcaattttcatagtagtaaagtttcttttcatctcaaactaaattgaccatgcatataacgttctttgtttaaatgaaagcatactgtttaaaccggcagtattgcattagagaacagtgaacaaaatgtcaatgtgcattcatgcaaaaaccatttaatctgcatctgtttagaaaagggggaaatgaagcaacttatctaaaaatactgctttacacagcatttcagcctcttcccctcagttttgcattgatttttgacaagtctgtagagcctaatagttttcatcaaaggcctagatctcttaagagcatttttttcagctcttccctcagaagttcagctattgaacccaaaactgtactttgtaccctcaaatagaaagggatcnnnnnnnnnnnnnnnnnnnnnnnnnnnnnnnntttatgacattacagagtattaaaatgtaaatgtttctttatccaaactacttctaggtattttagtatttgtttctggtggaattaaatgatggtaaaattggctaattatttgaatgaatgaatggatggatggatgttttgcatgctcaatttctaggtcctttgtctagaaaggaaatttgcctcagttgaattagtgaaatatttctgtcattgataatgaaagtgacttctgagtacagttaagttcctcttatttgccactgggctgttggttagaagcataggtaactgattaagtaggtatgatactgcatttgaaataagtgaacacaaactaccctttctccaccatggactcaatctgagaacagcattcatttccattcatttccatactggcttttgattatatgcagattcctagtagcatgccttacctacagcactatgtgcatttgcgtcacaataa

SEQ ID NO: 5787 - DNA, 684 bp, Macaca Fascicularis
  misc_feature (1)...(684): n = A,T,C or G
attgtaagaaaatagttgctttgctttttgncatggtaaatgcaaaacatttaaatattcattaagtaattgctgacaaaacagctaatgttggtaaagagaaagacctttagttaaaacacagaaatgactgttgaggataataaaccaatacatttgagcttgcttttttgtgctgcaaatgctggcctggggagggatgagtccttatcaatgcctaaatgtaacatgtttccccaattagaaagagttcaatctcaatgtctcttacattgtaaggttccatctcagtgacctaattattaataaataataataataataataaataacctaaacattaataacctaaataataataaataacctaaacattaactcccaatgcttgtttagggtgtttctagaagtcatctgacaatcaggtataaaaggaggtaaaggaatctgacatttcctgggttatgttcaatgtaacacccttgtgaagattatgttcttgaagaaacgtaatactgtaaaactaccaccatcaagagtgaaaggacaagccacaaagtagatgcagatgcttgcaatacatatatctgacaaataacttgtatctagaatgcatgaagaactctcacaaattcttaaaaacacaaaatttggcaaaaaaatttttgtanttaacaaaatagg

SEQ ID NO: 5788 - DNA, 726 bp, Macaca Fascicularis
gttttttgctctagttttacagctctgtctgaaggtgcaccagccttacaaggaagatcaaacagtaatcgtgttctttgaagaatacttcttccttctcattaaaaaaaaaaaatttaggttgcttgcacccaaaggcaaaaaatagccattccctctaccgaaagaaacaagttactcagataggaaagaagaacagatatttaataaggaaatactccttcccattcccactttgagggaggcctcttaagacgtgaagaggaccaaaataacaattacagtataacttcacatgggtgggggggtgtgtggaattcaaatgtagttgatcaaaatcaagttgttactttcctttagacttgattccaacatgtaaaaaaatcaggcgctttagtgggagtaaattttgacttcagcagtgaaagggtaatgcaattaagagttagggtagtgtttctcaaacctcatcctcagaggtgctttagaaattgactacctttggtttgaatttatttttagaaatatgtcttcttttcaatatttttaagactgtaaaaggtacaccatgatttctcaaatgtgttaaatgaaattttaactcattatgtttcaagttttaaccagtgtgttgactttataagacatttatgatattaacttaaactttaaaaggtggtatgcacttatatctttaatgtattggggtttcacgtaatttttcct

SEQ ID NO: 5789 - DNA, 1695 bp, Macaca Fascicularis
acgcgccacagcctcacagccggcccgagtctcctgggaggcggggctggaagggtatgggtgaaggccagttgaggccgcttgggaaggacagcctcgcctgctcccgacctaagtcggaacatctggatgaccggtgcctccaggacgcaggtgcaggtgagactcgccctgccacagcaccctgcgtctccgcggaggccctagggagcccagcgggtaggcttaaaacgaagaaagaatggttaaagcccgagtcgcgactcttaatcccagcccgacagcgtgaatgcatctcagtccacgtggggcaggcaggtgtccagatgggcaatgcctgctgggagctctattgcttggaacatgggattcagcctgatgggcagatgcccagtgacaagaccattggtggaggggacgactccttcaccaccttcttctgtgaaactggtgctggaaaacacgtgccacgggcagtttttgtggatctggagcctacagtcattgatgagatccgaaatggcccataccgacagctcttccacccagagcagctcatcactgggaaagaggatgctgccaacaactatgcccgtggtcactataccattggcaaggagatcattgacccagtgctggatcggatccggaagctgtctgaccagtgcacaggacttcagggcttcctagtgttccacagctttggcgggggcactggctctggcttcacctcactcctgatggaacggctctctgttgactatggcaagaaatccaagctggaattctccatctacccagccccccaggtgtctacagccgtggtcgagccctacaactctatcctgaccacccacaccaccctggagcactcagactgtgccttcatggtggacaacgaagcaatttatgacatctgccgccgcaacctagacatcgagcgcccaacctacaccaacctcaatcgcctcattagccaaatcgtctcctccatcacggcttctctgcgctttgacggggccctcaatgtggacctgacagagttccagaccaacctggtgccctaccctcgcatccacttccccctggccacctatgcaccagtcatctctgcagaaaaggcataccacgagcagctgtcggtggcagagatcaccaatgcctgttttgagcctgccaaccagatggtgaagtgtgatccccggcacggcaagtacatggcctgctgcctgctgtaccgtggagatgtggtgcccaaggatgtcaacgctgccattgccgccatcaagaccaagcgcagcattcagtttgtggactggtgccccacaggcttcaaggttggtatcaactaccagcctcccactgtggtgcctgggggtgacctggccaaggtgcagcgtgccgtgtgcatgctgagcaacacgaccgccatcgccgaggcctgggcccgcctggaccacaagttcgacctgatgtatgccaagagggcgtttgtgcactggtatgtgggtgagggcatggaggagggtgagttctccgaggcccgtgaggatatggctgccctggagaaggattatgaggaggtgggcatcgactcctatgaggacgaggatgagggagaagaataaaccagctgcctggagcctgttcactatgtttattgcaaaatcctttcgaaataaacagtttccttgc

SEQ ID NO: 5790 - DNA, 1633 bp, Macaca Fascicularis
  misc_feature (1)...(1633): n = A,T,C or G
aacataatacctaattttcagttggcatcccactgtggagttccaggccacccaggggagtgaaagaaaggttaatgaatggtttaaaaggggcctgcccccacagacctgtccccttccctttgttctcttctccttcgcctgaagtgttgagctgcacatccagtctgacctccgctgctgaggcttcacatctatcaggtggggcctagcagggatctgggtgggaggttcggtcagatgcaaacagcagccagccctgtagaagccacgtgcaaagcagttccttactcgctgacatgacagccacgcatttcaacaaccaccacaacaaatcgcataggggatcagaagaccatgctactccattttatactaaccacttagcagcagcctcccaggaagtcatcaaatacatcactgtaagtaatactgagggtgacaaaattcatctttccaacttaacaaatggtacttaattatctagtaagaataagaaacctttttatattgtcaaacatattaccaggaaataatttaaggcctgctggcaataaaatcataggactaatcttttaaaatcacatttgatgacatatatacaaacacatacacacatatataatatatgtacgtacatataatttgtatacctatatatctaaataaaccccaatcctttgacaccattaccactacagacttcaagctacttggagccgtgttacataaaagtaaaatacttttgaagctcctctttttttgtgtgattgatattggacccagtccatgagcctaacaagaaaaatcactcttttgtgcttaaaactttgtagcctaaatggaattatccaatttgatcacacacattatttgctaatttgattttggctattttccaaagtcaaatccagattcaaaggatgatgactcacccctatttcgggtttttgaggaaatgggcccaggctgtgaagggctgaaactccagagatggagtctgagcaatcgtggtgacgctgggaaaagcgtaggagtgagaactgttttgtgtaatcttatacacgtttagaaataagtcctgtggcttttgagttatacctgcagaacacggggcaatgttctttctttgagttgctaagggaacaatgcctcccaagacacagaggtctgaaataacaaggtgctgggcaggcattgtgagaagtgtggcttggtgagagggcaggaatgagtgaatgggatgggagctgatcaggccaggaggttccctcggacctgcctctgtgctgcaggcagaaaacctgagaaacgtttattctatttgttctgtgccctatattgataacttttctctgttgaaaaagtttgctttgagtataatatttatttttagcgatgtcctgtccccaagtttgaataaacaaagatactatttcctaatggtcaaggtactatccagattcaggtgtgttaaaaagaaatgggtcaggcatgnnnnnnnnnnnnnnnnnnnnnnnnnnnnnnnnnnnnnnnnnnnnnnnnnnnnnnnnnnnnnnnnnnnnnnnnnnnnnnnnnnnnnnnnnnnnnnnnnnnnnnnnnnnnnnnnnnnnnnnnnnaaaaaaaaaaaaaa

SEQ ID NO: 5791 - DNA, 2535 bp, Macaca Fascicularis
aggagccggcaccgacaccgaagccgaagccgaagcccaggcccgggcggggatgctggggatgccccgcgagtgaggcccccgctgcagccgcgttcatggcggtggccaggaagatccgaactttgctgacggtgaacatcctggtgttcgtgggcatcgtcctgttctccgtgtactgccgcctgcagggccgctcccaggagctcgtgcgccctctgagtgggggatgccggccgcgccccgcgaccccagccccgggcagccccctgcgctctgggggaccccgggcggtagtggccgggcgcgctgagctggtgctgaagggacagctcccggccgagccctgcagccccgggcggctcatggtccccgaagccgaagccgaagcccagggcggtttggcggccaccctgcgtgatgacggccaggaggcggaaggcaagtatgaggagtacggctacaacgctcagctcagtgaccgcatctccctggatcggagcatccccgactaccggcccagaaagtgcagacacatgagctacgcccaggacctgccccaggtctccgtggtcttcatcttcgtcaacgaggcgctgtcggtcatcctgcgctccgtgcacagcgtggtcaaccacacgccctcccagctcctcaaggaggtcatcctggtggacgataacagtgacaatgtggagctcaagttcaatctggaccagtatgtcaacaagcggtacccgggcctcgtgaagatcgtccgcaatagccggcgggaaggactgatccgcgcccggctgcagggctggaaggcggccactgccccagtcgtcggcttcttcgatgcccacgtcgagttcaacacaggctgggcggagcccgcactgtctcggatccgagaggaccggcgtcgcatcgtgctgccagccatagacaacatcaagtacagcacgtttgaggtgcagcagtacgccaacgctgcccacggctacaactggggcctctggtgcatgtacatcatccccccgcaggactggctggaccgcggcgacgagtcagcacccatcaggactccggccatgatcggctgctccttcgtggtggaccgcgagtacttcggagacattgggctgctagaccctggcatggaggtgtacggtggcgagaacgtagaactgggcatgagggtgtggcagtgtggtggcagcatggaggtgctgccctgctcccgcgtggcccacatcgagcgcaccaggaagccctacaacaacgacatcgactactatgccaagcgcaacgccctgcgcgccgccgaggtgtggatggacgacttcaagtcccacgtgtacatggcctggaacatccccatgacgaacccaggggtggacttcggggacgtgtctgagaggctggccctgcgccagaggctgaagtgccgcagcttcaagtggtacctggagaacgtgtacccggagatgaggatctacaacaacaccctcacgtacggagaggtgagaaacagcaaagccagcggctactgcctggaccagggagcagaggacggcgaccgggcgatcctctacccctgccacgggatgtcctcccagctggtgcggtacagcgctgacggcctgctgcagctggggcctctgggctccacagccttcttgcccgactccaagtgtctggtggatgacggcaggggccgcacgcccaccctgaggaagtgtgaggatgtggcaaggcccacacagcggctgtgggacttcacccagagcggccccattgtgagccgggccacgggccgctgcctggaggtggagatgtccaaagacgccaacttcgggctccggctggtggtgcagaggtgctcggggcagaagtggatgatcagaaactggatcaaacatgcacggcactgaccccgcctctgcctggacccccacggacctcgggaaggcgctgggccaagccagtgtcactgagtggccggggtatgcccagcagacacagcagggcagggctctatgtgcggccaggacagcagaggccaaggggccggggtgtggctgagtgaccagggtgtcagccactgcagctggagtacagctcctcctaggacaggcggctctacccaagggagggcgtctggggacagtgacgccgactcaaacacgtgccttctccacggtatctcctggccaggctgctgggacggccgccacctctgcatgtaccacagcccctacgccccacagggtggccaagccccagaccacacgccaggcagcgccccggcgtcctccacccacggcctcccatgctccaagcagcctcccccagcccttgcaaccgctcagccctccaaccgagacctaagttcacacctcacaacacagctcctcacggtctggtaagaggggtgctgggggacatggatggcgacaaacctgcagctgtgtctaggaggctggtgcgactgcctcagcagagaccaaataaagaggattaggcagcaaaaaaaaaaaaaaaaaaaaa

SEQ ID NO: 5792 - DNA, 676 bp, Macaca Fascicularis
  misc_feature (1)...(676): n = A,T,C or G
ccatttacaattgcgttcaagaaaattatatagcttatatgtaaagctaataaaacatataaaggatctttatcccaaaatctacaaaattccaatgaacatatttaaatagacctaaataaatagaggcacatacaatgttcatggattgaaagactcaacatattaagatatcaatttctgctaatttgatctataaatgcaatacactgccaatcaaaatttagtcaatagaggcaagctgattataaaatttatatggaaaggtaaaggaactagaatggctaaaacaattttcaaaaggaagaataaaattggaggagccatactacctgattttaagacttattgtaaagctacattaattgcagaggtattaatgggtggtattggtaaaggaacagacacatagctcagtagaacagaatagtgagttcaggcgtaagagacnnnnnnnnnnnnnnnnnnnnnnnnnnnnnnnnnnnnnnnnnnnnnnnnnnnnnnnnnnnnnnnnnnnnnnnnnnnnnnnnnnnnnnnnnnnnnnnnnnnnnnnnnnnnnnnnnnnnnnnnnnnnnnnnnnnnnnnnnnnnnnnnnnnnnnnnnnnnnnnnnnnnnnnatgcagactctgtctcaaatatgaaaaaagaaaaaagaaaaaagatctcacccttaata

SEQ ID NO: 5793 - DNA, 5909 bp, Macaca Fascicularis
acaaaatggcggcggcttagctcctacccctggcggcggcggcagcggtggcggaggcgacggcacctcctccaggcggcagccgcggcttctttctcaggcagcggcagcgcccccggcaggcgcggtggcggtggcgcgcagccaggtcttgatttcccagttaaagatgttcttcacccgaatgcagtctttcctgttggtaaaataagacaaccatcaacattgcctgtttgtctgcttttgaagctcttaaggatggatgtttgtaagatgttgcttaatacagtctggaatactctgtccatttgttgaattgtaaatgactttcaaatgtgcaagttctgttaaatacaaagagaacctctatgggtaacttttgtgttgaagaagtcatttgtcaaccatggtaaaacttgcaaacccactttatacagagtggattcttgaagctatacagaaaataaaaaagcaaaagcaaaggccctctgaagagagaatctgccatgcggtcagtacttcccatgggttggataagaagacagtctctgaacagctggaactcagtgttcaggatggctcagttctcaaagtcaccaacaaaggccttgcctcctataaggacccagacaaccctgggcgcttttcatcagttaaaccaggcacttttcctaagtcaaccaaggagtctagaggatcatgtaacgatctccgcaatgtggattggaataaacttttaaggagagcaattgaaggacttgaggagccaaatggctcctccctgaagaacatagagaagtatctcagaagtcaaagtgatctcacgagcaccaccaacaacccagcctttcagcagcggctgcgactgggggccaaacgcgctgtgaataatgggaggttactgaaagatggaccgcagtacagggtcaattatgggagcttagatggcaaaggggcacctcagtatcccagtgctttcccatcctcgctcccacctgtcagccttctaccccatgagaaagaccagccacgtgctgatcccattccaatatgtagcttctgtttggggactaaagaatcaaatcgtgaaaagaaaccagaagaactcctctcttgtgcagattgtggcagtagtggacacccatcctgtttgaaattttgtcctgaattaacaacaaatgtaaaggccttaaggtggcagtgcatcgaatgcaagacatgcagtgcctgtagagtccaaggcagaaatgctgataatatgcttttttgtgattcctgtgatagaggattccatatggaatgctgtgacccaccactttccagaatgccaaaagggatgtggatttgccaagtctgcagaccaaagaaaaagggaagaaaactacttcatgagaaagctgcacaaataaaacgacgatatgcaaaacccattggacgaccgaaaaataaattaaagcaacgattgttgtctgtaaccagtgatgaaggatccatgaatgcattcacaggaagggggtcacctgatactgaaataaaaataaacatcaaacaagaaagtgcagatgtaaatgtgattggaaacaaggatgtcgttactgaagaggatttggatgtttttaagcaggcccaggaactttcttgggagaaaatagagtgtgagagtggggtggaagactgtggccggtacccttctgtgattgaatttggtaaatacgaaatccaaacctggtactcctcgccttacccacaggaatatgcaagattaccaaagctttacctgtgtgaattctgtcttaaatatatgaaaagtaaaaatattttgctaagacactccaagaagtgcggatggtttcatcctccagcaaatgaaatttaccggaggaaagacctttcagtatttgaggttgatgggaatatgagcaaaatttattgccaaaacctttgcttgttagccaagctcttcctggaccacaaaacgttgtattatgatgtcgagccattccttttttatgtccttacaaaaaatgatgaaaagggctgtcatctggttggatacttctctaaggaaaagctttgccagcagaagtataatgtctcctgcataatgatcatgccccagcaccaaaggcaaggatttggacggtttctcattgatttcagctatttgctttctagaagagaaggccaagcagggtctcctgaaaagcctctctccgatctgggccgtctctcctacctggcatattggaagagcgtcatcttagagtatctctaccaccaccatgagaggcacatcagcatcaaagcaattagcagagcgacgggcatgtgcccacatgacattgccaccactctgcagcacctccacatgatcgacaagagagatggcggatttgtcatcattagacgggaaaagttgatactgagccacatggaaaagctgaaaacctgttccagagccaatgaacttgatccagacagtctgaggtggaccccaattttaatttctaatgctgcagtgtctgaagaagagcgagaagctgagaaagaggctgagcggctaatggaacaagctagctgctgggagaaggaggaacaagaagtcctgtcaactagagctaacagtaggcaatcacctgcaaaagtacaatcgaaaaataaatatttgcattccccggagagccggccagtcacaggggagcgagggcagctgctggagctctctaaagagagcagtgaagaagaagaggaggaggaggaggacgaggaggaggaggacgaggaggaagaggaggaggaggaagaggacgaagaggaggaagaagaggaagaagaagaggaagaagaagaagaagaagaaaatattcaaagctctcccccgagattgacgaaaccacagtcagttgccataaagagaaagaggccttttgtactaaagaagaaaaggggtcgtaaacgcaggaggatcaacagcagtgtaacaacagagaccatttcagagacgacagaagtactgaatgagcccttcgacaactcagatgaagagaggccaatgccacagctggagcctacctgcgagattgaagtggaggaagatggcaggaagccagtcttgagaaaagcattccaacatcagcctgggaagaaaagacaaacagaggaagaggaaggaaaagacaatcattgctttaagaatgctgacccttgtagaaacaatatgaatgatgattcgaggaacttgaaagaaggcagtaaagacaatcccgaacctctaaagtgcaaacaagcgtggccaaaaggaacaaagcgtggtctgtctaagtggaggcaaaacaaagagaggaagaccggatttaaactgaatttgtacaccccaccagaaacacccctggagcctgatgagcaggtaacagtggaagaacagaaggagacttcagaaggaaaaaccagccccactcccatcagcattgaggaggaggccaaggaagctggggaagccctgctgcctcaagaggaaaacagaaggcaagaaacatgtgcccctgtaagtccaaatacatcaccaggtgaaaaaccagaagatgatctcatcaaacctgaggaagaggaggaggaggaggaagaagaggaagaagaggaaggggaagaagaagaagaagaaggaggaaatgtagaaaaagatccagatggtgctaaaagccaagaaaaagaggaaccagaaatctccccggaaaaagaagactctgcacgtttggatgatcatgaagaggaggaggaagaggacgaagagccatctcacaacgaggaccatgatgccgatgacgaggatgacagccacatggagtctgccgaagtggagaaggaagagctgcccagagaaagctttaaagaagtactggaaaacgaggaggcttttttagaccttaatgtgcagcctagtcactcgaacccagaggtcttaatggactgtggcgtcgacctgacagcctcttgtaacagtgagcccaaggagcttgctggggaccctgaagccgtacccgaatctgacgaggagccacccccaggagaacaggcacagaagcaggaccaaaagaacagcaaagaagtcgatacagagttcaaagagggaaacccagcaaccatggaaatcgactctgagaccgtccaggcagttcagtctttgacccaggagagcagtgaacaggatgacacctttcaggattgtgccgagactcaagaggcctgtagaagcctacagaactacacccgtgcagaccaaagtccacagattgccaccactctggacgattgccaacagtcagaccacagtagcccggtttcatccgtccactcccatcctggccagtccgtacgttctgtcaatagcccaagtgtccctgctttggaaaacagctatgcccaaatcagcccagatcaaagtgccatctcagtgccatctctgcagaacatggaaaccagtcccatgatggatgtcccatcagtttcagatcattcacagcaagtcgtagacagtggatttagtgacctgggcagtatcgagagcacaactgagaactacgaaaacccaagcagctacgattctactatgggaggcagcatctgtggaaatggctcttcacagaacagctgctcctatagcaacctcacctccagcagtctgacacagagcagctgtgctgtcacccagcagatgtccaacatcagcgggagctgcagcatgctgcagcaaaccagcatcagctcccctccgacctgcagtgtcaagtctcctcaaggctgtgtggtggagaggcctccgagcagcagccagcagctggctcagtgcagcatggctgctaacttcactccacccatgcagctggctgaaatccccgagacgggcaacgccaacattggcttatacgagcgaatgggtcagagtgattttggggctgggcattacccacagccgtcagccaccttcagccttgccaaactgcagcagttaactaatacacttattgatcattcattgccttacagccattccgctgctgtgacttcctatgcaaacagtgcctctttgtccacaccattaagtaacacagggcttgttcagctttctcagtctccacactccgtccctgggggaccccaagcacaagctaccatgaccccaccccccaacctgactcctcctccaatgaatctgccgccgcctcttttgcaacgaaacatggctgcatcaaatattggcatctctcacagccaaagactgcaaacccagattgccagcaagggccacgtctccatgagaaccaagtcagcgtctctgtcaccagccgctgccacccatcagtcacaaatctatgggcgctcccagactgtagccatgcagggtcctgcacggactttaacgatgcaaagaggcatgaacatgagtgtgaacctgatgccagccccagcctacaatgtcaactctgtgaacatgaacatgaacactctcaatgccatgaatgggtacagcatgtcccagccaatgatgaacagtggctaccacagcaatcatggctatatgaatcaaacgccccaataccctatgcagatgcagatgggcatgatgggcacccagccatatgcccagcagccaatgcagacccccccccacggtaacatgatgtacacggcccctggacatcacggctacatgaacacaggcatgtccaaacagtctctcaatggctcctacatgagaaggtagacaacgtgggcagtccacaacacctacggggtatcactattggatcgatctgcacaaatacctttgaagagtacgatttcaaaaccagcaattggtgtgaatgcaaaaacatttgttggcaccatttatttaaaaaaaaaaaaaaaaa

SEQ ID NO: 5794 - DNA, 2575 bp, Macaca Fascicularis
  misc_feature (1)...(2575): n = A,T,C or G
ggaagcaaagtaaaataaaaatcccagaccatcagaacagtcacctgtcagcaggacaaggtgtctttcaagactgtcccttgcagaggggacagccatccttgccccaatagcaggactgcactgaggccaaggcaagtccagggattcattctttgtgtgtgtgtgtctccaaggaggtcctggctggaggtgggggctctgacccaggcccctgccccttctgtctggacctgtcccatggccagtctcatcttcaggggtcattggttgcctcgaggccccaggctgggaccagctccctggggtccattctttctcacagccgctccttagggtatgggtcaggagacttcccagtgccctgaagatgttgctttattgtcttcccctgatgaagccttaccccaaagccagtaaaaccagaaagaagaggctggaggtgggaggtggggtgggataatggttctgtaaccctctacccgcaccccgtccccatgcaatgggggaaatagccacttaaaaatcctttttggctcctgttatggactgaatgtttgtgcactccccctggcccctgcaattcatatgttaaagcccaaaagccccatgtgactatatttggggcttctaaggaagtacttaaggttaaatgaggtcataagtgtggggccctaatccgataggattagtgttcttacgggaagagataccatagagctcactcactctccatctgccatgtgaggacacagcaagaaggcagccatctgcaacccaaggggagagccctccccagtctctgaccctgttggcaccttgaccttagacttgcggtctccagaactgtgagaaaatggattcctgttgcttaagccaccaagcctgtggtattttgtcatggcagcccatgcacacttgtttcatgatagctaatggccaacagggtcacacattgaaactaggcagtatctgaggtccttcagtttgataccaagtttggcaggagtcagtcaccttatttaggtttatcccagaatgaaaagtccatgaggtgaatattatcgatatccccatttcacagatgaggaaactgaagctcagagtttaaacttcttgcccaagttaaagagccagtgagtgcacttgaaggcaggttctccagctctgacaggctctgactctgggacaggacccaagcttaaatgaacttgggatgatttactgggcagcatgtaatgggagcctatatcttacatcccacccccgactttctactctgccatgtgtctgactctctggagtgagaaggagagaacgtttggccataggcccatgcaatggtatcgcctcacttgtgtgtaatgtaccaactcttacatagaagccctgcccgtgtctccagagctcttaggaacaccctctctcaggacagtgtgtgtcccgaaagtgaacataccaggaacaccttaggtgtgaaggaagttatctattcctcaaaacacaaaatattagcctctaacatttcttgagggcttgctgtgtgacaaggtactgtgtatttcatgtttcctgtgatcctcacaacagacttttgagatgggtattattgttgttatttccactgtacagaagagaaaattgaggcttaggttaagaaaattacccagagtcaaacaatttcattggtctgggaagaccaggaagaccttagtgcctaagattgtttgtgattctgcaacagggaacacttgacagcaggtctatacaaagacagagttggtatctttggagggaatgagtttccagtcattgcaggtggtccagcagagaggtctactctcctaatggggataggatgctgtgacagagccgtgacttcggatggtagggttcaactagacgggtttaaagtccctttcaacccgagtctccttgactccacagaattaaggtgagaagacagagggtcacactgtcctctggggggtgagtacaggatgtacagggcatagagagggaggcaggaggtgttgaagacatgttgtcctgagcagctggttgaagctagttgaagctagcttcactttgccattgccctaatgcggtcttcatatcttggtaagtctagaatgggcatccagtgtctgcttcaacctccgagggatagagaggacactcacttccccaagatgagaacaaggaccttatgagattgcttcagaaggcatctggtctacctgccatcaggcagctggactgttgaaaagtttccttggggccaggcatgnnnnnnnnnnnnnnnnnnnnnnnnnnnnnnnnnnnnnnnnnnnnnnnnnnnnnnnnnnnnnnnnnnnnnnnnnnnnnnnnnnnnnnnnnnnnnnnnnnnnnnnnnnnnnnnnnnnnnnnnnnnnnnnnnnnnnnnnnnnnnnnnnnnnnnnnnnnnnnnnnnnnnnnnnnnnnnnnnnnnnnnnnnnnnnnnnnnnnnnnnnnnnnnnnnnnnnnnnnnnnnnnnnnnnnnnnnnnnnnnnnnnnnnnnnnnnnnnnnnnnnnnnnncaaaaaaaaaaaaaaaaa

SEQ ID NO: 5795 - DNA, 765 bp, Macaca Fascicularis
  misc_feature (1)...(765): n = A,T,C or G
cactagtacccagagagnntnnnnnnnnnnnnnnnnnnnnnncaccacagtgccacagagaaggcagttaatccaannngactaaagcaccacagtgccacagacaaggcaaagcttggcagccatgcannnnnnnnnnnnnnattcttagcctctgttgctggctgtaacctggggaaatctaagctttggttttcttctctgcaaaatatctacctggtaggtggttgtaaggatttaagaaaactgcttgcaaagcacttaggtcagggcaaggtagacagtaggtacataatgagacaaacttgaaatacagagttaaaatcatgatttcaactgactgcagccacaaagcaccaatgagaaagttattaaaatcaagggtgaacatacttactacacctgataggagttacagactgaacatctatgtctccctgaacagctgaagacctaactgcagcatgactgtgtttggagatggggnnnnnnnnnnnnnnnttaaggttacaggggtcctgagggtggggtcctcatccaacaggattcgtctttctgagaagacacaccaggggctcacctgctctccccctgtgcctgccccagagaaggcggccatcggcaagccaaggagagccctccccagaaatcacacggaccggcaccttgatctgggacttccagacaacaactgtgttgtttaaaccacccaatctgaagcttgttatggcaggnnnnnnnnnnnnnnnnncaatacgcaacacg

SEQ ID NO: 5796 - DNA, 2429 bp, Macaca Fascicularis
acaaatacttgttattctaggcttaacttttacattggctctagctaaacagaaatcttattattcaggaattaatcctcatttaatcaaatgggtagggtgtaatattaggaaattattgattgactctgcctgattggatttgtacttaatagctaattaggttaataactaggcattcacaaggcatggttttatttgatcccttttaaattgctcttaaggatgtaacaaagacagcacggggtgctctgagggcagtcactcaacttctggagcagcaggttaacttctgaaattcctccaaaccatgtgtccacgcctagtctggctgcatctgtgggccagatgtgggtggtgaatcctgtggattagaggcggcactaggcagcccccgactgactgcagtggagggtccacaggcagcctgcagagcccggcctgcaccatgccagctggacctgtgatgggacatccagaggggtgctaccctgaactctcagcatctctccactggcacagtgcctcagactttgttaaaatggggcctgttggctgcacactaaggagttgagagtctgatttttggacctgctgatggttaagttatagtgagtcagtgttaacgcgcaaagcgtttgacaagtctaatgtgcttctgggctaagcagcaccaggtttcttttgctaaaattgaactcctttgaaaaattcacagtggctaagttcaacaaagaccgtgggagcccgaggctggtaaacagtgagtctatcccgcatcccagaggactcttgtggcaatgcagttttgcggagaggagttttaatttaaagaaatgcaatcaggagatcagcaggtccttgaatgagtcagcctcagtgcatctgcggactcatcagacaccccaggctggcttcgggtggggaacgcacgagaacgaagcggcacctttgtctaacggggctctcctgcgcactcagaccctctcctcagggggctcgcaggcttcgctctcatttgaaaggggtgatttcaagcagagttgtgctgaggctagaaagcccccatgggcaggtcctcccagggctgggagtgggcatgctgtggggccggtgccgccaggacaggagggcggccacgagctccagctccacaatgccagaccgaccctgccacggggctggggctgggacttgctgtgctttgctggcagcagctgtttcatggggttttccaggctcttggagatcagggacacttgtttctcttgatcatggcttatatgagtatccctctctgtcaggccctctccatggagaaagcatttctaggtgtttgggctggtgcccgcagcctgtgcctgtcctgggaggcagggcccatcaacatggcgtccccagtgcccgggcggcaccccggattcctgaagtctagggaagggtcttctaggtccccaagccccacccctcatgcccttgatcaagagaccagttcactactcagatgtgtgtctccttggtgccttgaccattcatgtgacctttttggcatcacagatcaagtgtctgcaggtgggctcagggcctgtaggtcagacgatgccctttttccccagccttaagcacgggacagtggtctagaccagagtgcctcctccctgatgccgcctcctcagcagggtccctgggctccccgctgagcatgatgagcctgagcctgggcgtggttgcctggggtggaggcctcatgtctggcatagttgctggtcttcgcctgggggcaggctggtcaggagaccgattgggtaactctcctgatttcggcttctgtgaaacatgagaggctgcagtgctggagccactgcccagggtcccaacctgcacccctgcctggcttgtcacatgctctgtgtccagcctggtcatgcctgtccttttccccgcctcccctctgtaggcaaggtgcctggcgacgactgcccgctggtgtggggccagtgctcccactgcttccacatgcactgcatcctcaagtggctgcacgcgcagcaggtgcagcagcactgccccatgtgtcgccaggaatggaagttcaaggagtgaggcccagcctggccctcgctggagggggtgtcccgcggccccttcctcatgctggcgctgatggctgcggtagctgctgctggggacagcgcccctgggctgtaacaaggtggaaacaagggctggagctgcgtttgttttcccatcactatgttgacacttttatccaataagtaaaaactcattaaactactcaaatcttgctggaggccgctgggtgcctgtgttctcagcatattgatgcggtctcggtgtgttttgatatgaaaactctcatgaataaacatctccgtgaaacgctaaaaaaaaaaaaaaaaaaaaaaaaa

SEQ ID NO: 5797 - DNA, 715 bp, Macaca Fascicularis
  misc_feature (1)...(715): n = A,T,C or G
aattttcccaattgaaaattgataattaaaggtatttaaaatannnnnnnnnnnnnnnngataagaagctcaatgtagcaatatatttctattttgatttcaaattaagttttcattacacaaaaacaaattggctcaaaactagatgatacatttaaaaaaatttaaaatagccaaaatcatgttgaaatatgttatatggataatttatcaataaaaattattactgttaaaaattggtagaattctttcctccctgtgataatgatttaagttgaatgggaatttagtaacatacagggatgcatcttaatatccatatttgctcaacagtggtaaacacacaattaaaatttgtcctcattaaaatggacttttgtacactatgatttgaattaagtaatgaatatataaagtatttnnnnnnnnnnnnnnnnnaatgtataacattccatttttggctatattttgtaaaacatttttggtgtaatcagtatgactctcacatatgtcaaattaagtattctatttatttaagcggatatatacctaatgtannnnnnnnnntattgcactcatataattgtatatattgtggcttcaaaagtctgtacttattcttgctttaaaaaagtagtatgtgcatttctttccaatttattttaattaattatattaaggataacattctttactaaatgtaccttaaaatcac

SEQ ID NO: 5798 - DNA, 737 bp, Macaca Fascicularis
  misc_feature (1)...(737): n = A,T,C or G
gagccattccagatacttcnannnncttggctcagcctggctttncnctggttcagccccacataatgattatggctgtttgctgtcatttctgggttagggctcctttctaacaacctagactggaacaaggccctgtcannnnnnnnnnnnnnnnnnngtttttccatctgggaacagtacctctgcccctgattcccaatctgccatagttttattaactccattaaagaggcctgtatgtgttttggttagttacagttattttacaataatggtgggtaatggccccacctctgttatgagataatgttctaatcaatgtctctgcctttgtatcttttctgagggttttgtctgctcccttcattctaatgaaaggtgtattctagtgctgggcgcatatcatccaggataatattctgcccaactccatcctctgttactagatcccttaccagtcacatttgnnnnnnnnnnnnnnnnnnnnnnnnnnncctggaaggattctgggacaatattccagggattcattgacttcttggctccttttctccatttcctttgggggataggggaattgaccattcttaagtgcatactgtcaaggggcagctccacccccatggccattggatcatgagacactctgaagtcagaaggctggggcagatcacttcaagcaagcccccatgatggttctcagtcctgcttctctttgggtacatgcccctctg

SEQ ID NO: 5799 - DNA, 711 bp, Macaca Fascicularis
  misc_feature (1)...(711): n = A,T,C or G
gtactatgaccagatcatcactgccctggaggaggatggcacggcnnnnnnnnnnnnnnnnnnnnnnnnnnnnnnnnnnnnnnnagctgctgtggaaaacaaggtcacagatctatagggacccaggagccacggcctgctattgcttcagcccggcctgggcagccctggaacctcggggggagaggccannnnnnnnnnnnnnnnnnnnnnnnnnnnngcagttagtggaaggtgactcacagtctcctggtggctctggcctcggccctgctggacccacctcctaggccaggggcctcaaggnnnnnnnnnnnnnnnnnnnnnnnnnnnnnnagtccagggaccctatgacaccggtctgcagggagttggggactgagggcttccagagagtggccggaagagcctccaggcccctggggagactgtnnnnnnnnnnnnnnnnngccttggctgcactgggattcggagaggaaggaggagagccccatacttcctgtctgcctcctccaccattcctgacctcagttgagctgcctctggcctcgttgctgctgccacatcctaggtctaagagttgaatgcctctcctaggccactgcagactgacccctcagcagggctggctgtcacagggctaccctgcctcacagggagccatggtgagggccatctgctgcaggggggtctggggagagtggtggctca

SEQ ID NO: 5800 - DNA, 733 bp, Macaca Fascicularis
  misc_feature (1)...(733): n = A,T,C or G
tgaccttttttcnnnctggtttgagaaaactttggacactatttctacttgcccaggtgtgggctcaagagccttactctgtccatctcagtttaggggtgcagccagctcctcttcccaatagggctctttctccttttcctctccttggccctagatttgtnnnnnnnnnnnnnnnnnnnnnnnnnnnnnnnnnnnnnnnnnnttctggttctctgtgttttgtggactctgttctcactgttcacccagcactagcagtacnnnnnnnnnnnnnggagtcctggggaatggagagagcacagtctgatgtcctgccaaggagccaggaattgacttgcccatggtccgctggctttcccaccacttcctacaggatgggatctaagagactcaggagctgnnnnnnnnnnnnnnntctgtactgtcccaagnnnnnnnnnnnnnnnnnnnnnnnnnnnnnnnnnaatggaaatgagaaattgaattctccatggacttttaggtttatgggggagttttgattgtgtttcttggttttatttcagccaaacatgtctgctttcgattttttttaaaaaaactgtaagtggtctatatatatgttcaccttttaaatgtaaatgtttaaaaagtaagcatttatgtgtttccataactgacatctgatgcagacctcattctctccccctcttctaccctcctcttttccctcttttcatactcttgtatt

SEQ ID NO: 5801 - DNA, 714 bp, Macaca Fascicularis
  misc_feature (1)...(714): n = A,T,C or G
tgagcagtgaggagtcgatgcgtcttggtatggaggaaaagggcatgctgcatcttcttcctgacctccggggtctctggccttttgtttccttgctcactgaggtgtctgcctaaccaagcaggctagatagtgctggcacacattgccttctttctcattgggtccagcaatgaagataagtgtttggggattttttttttcctccacaatgtagcaaattctcaggaaacaccgtttatatcttcctcctatgctcttccagtcaccaactacttatgcggctactttgtccagggcacaaaatgccatggcagtatctaactgaaaccccacaaaactgcttagtaacagttttgaatgtgagaaatttagataatttaaatataaggtacaggttttaatttctgagtttcttttatatttttattaaaaagaaaataattttcagatttaattgaattggaaaaaaaatacttcccaccacaattatatatcctgaaaattgtatttttgttatataacaacttttaagaaagatcattatccttttctctacctaaatataaggaatcttagcataatgacaaatatttataatttttcagttaatggtacttgctggatccacactaacatctttgctaataatctcattgtttcttccaactgatntcctaacactacatcccacatcttctttctagtctttta

SEQ ID NO: 5802 - DNA, 701 bp, Macaca Fascicularis
  misc_feature (1)...(701): n = A,T,C or G
gggctttaaacttttaagtcagacannncaggactaatttgattttgtagatatcattgtaagaactttatatgaaagacttgataaagggatttgatttgttttcatcatttaagcacagtcttgtgatgatgagaatgtaagtgtgattcttttctgtattttgaggtccttaatccaaaggccattttgctaggattttttctgctatcagatgtgttttcactctaaacctagtcttttatgacatgaatcgattacttcctgttaattttctatcctcccttactatctccccttttttgttttcagtattcagtatttcggtattctagagtggattttgatataaaagaaaataattcttacatcatcttttgcaacaaatattgttttctgaattgataacaaatttaaaaagtagattcctattttcacatatgttcatatgcccctatgtttgggggcatcaatcagttttccctttccgtgtaaagatgttttgtaaaacaaaatagcctcaagacgattaattatttataagggaacagattttaacctttaaggttaaaatcttggggtaacagatcttctgggggttggaaatcttccatttctcttgagggttttttttaaatgaatgctaaatatgttaaaatttttgtttctacctcatgtgtttttttaaattattacttgaa

SEQ ID NO: 5803 - DNA, 706 bp, Macaca Fascicularis
  misc_feature (1)...(706): n = A,T,C or G
gatgcnnngataggcagtgagcattacactccagccaggtccatnnnngctccatatgttggctgtgagtggtttctattaaaatcaagtttctcatttcttcaccttttattctctaagaattcggattcatagacattgacatcctgaagaactgtcaagaaagcaagatatgtttccttcctctgcaaaagaaatactaacaacacttttcttatacacttgggcagaaagatgttaacataaaaagtttatagacctcaaaaatcactaaactttccagatnnnnnnnnnnnnnnnnnnnnnnnnnnnnnnnnnnnnnnacatgatttctaaggttccttttgcttcccaaattctctgattctaaagcaggttttagtttgctctttggaaacatgtatgcatatgtgtttattaagcctattgaactaggtaggacatataaacaatttaactttagtgtcattgtttaatcacagacatagtgtttgaaaactgtgttttaaaaacagaaacagattgatgggtaacaggtaaaatcatatgacatgtatagcttacatgtaattatttgttaaattttctttgtatgcatttgannnnnnnnnnnnnnntataatctattagaagtaatggttatggactaaaaggatatgttctttagcatgttatatatactcatattacatagcacctattacaa

SEQ ID NO: 5804 - DNA, 553 bp, Macaca Fascicularis
ctgccagcctcacctccctctcctcagtttccatctctgctagtggctgctgccccctctccctgcattgagtctttgtgcaggggatgaagacctactgtgtgcctggcactgtgccaggtgctaactatgtgttcccacatccagccagctagcgcccaccctgtgaggagcactgtctcacagcacagaggaggacctgagtccaaggcttttcgttattggtttcctcactggagttgtgggtgaggctcttcttggcaagcaccgcagggcagcacttgttgtcaagagctcagagcccaacagcaaggcggcatgggcatgagccactctggcgcatgggaagaggctttcttccgttggtcagcaagcagtttgctgagcacctattgggtgctgacccgggctagaccctggggatacagcagtgagtgaggggaacactcgggcctcctggagcagatagatgttcaggtgagagagaaacgataaagagaaaataaacaaatgaagatgccttcaggcaaggatcagtgccaagaagataaaa

SEQ ID NO: 5805 - DNA, 649 bp, Macaca Fascicularis
agggcttcctcctctgggcctctgaatcaggctgtcagtcagtccgttccatgcagctttcccccactggagctagggggagaaggcttcaggtcccggattatcttcttaacaacccatgaaaaaggcattgttgctccattttgtagaaaaactcagtcacgttagtaaaaaacctgatcaagatcacacggtcaataacagaggagccccacaacctggtcttcccaaagtcacagtccttatacctcaatacctgacctcccttgggcttaaatcatgtcagtatcaagcaggtgatgtgaacattgctttggatggcggccatgaaaatgccccactcagatttcctactgctgggagtgtcatcgaccaaggcctcagctcccaaggccatgcttcctatgggcttcctttcacccaaggctgagcacagcagggatgctaagacaggaccaaccttgggagatgcagggctcctctgaggacatctttagctcaaggactcccagttggttcgaccagaactttgctagagctgtgctgagtctgagactttgctcatccaaccctccttccctctctctcttcctggcaagggtcacacctacagcctggtctcacagttcccgcctctgctggctcactt

SEQ ID NO: 5806 - DNA, 727 bp, Macaca Fascicularis
  misc_feature (1)...(727): n = A,T,C or G
tcaaagatttggagaaatgaaagtcaaaacaacaaaatcaccgctagtcccaaccttctgtaacataaccactattnnnnnnnnnnnnnttctttccagtctctctatagatggggtgtgtgagtgtgtgggtttaactttggttgtgctcatgctgcatattcagttttatattctggtctttttttcatttaacatcttacgagtatttttccacgttacaacaggagtgtattgacttatactccttgcctgttcaaaacgtctttcnnnnnnnnnnnnnnnnnnnnnntctgtcttagggatttccagagaatgctccgtgtactgaagcacagacggtgtttctgtgtctcagtgtgtttctgtccctaggtttaaggcttcatgtcatggaggagattttatagatgttaagctaatgatcttagagttttaaaaaatctgtgacagtggcccacgcctnnnnnnnnnnnnnnntgaggctgaggtgagcgcatcgcatgaggtcagnnnnnnnnnnnnnnnnnnnnnnnnnnnnnnnnnnnnnnnnnnnnnnnnnnnnnnnnnnnnnnnnnnnnnnnnnnnnnnnnnnnnnnnnnnnnnnnnnnnnnnnnnnnnnnnnnnnnnnnnnnnnnnnnnnnnnnnnnnnnnnnnnnnnnnnnnnnnnnnnnnnnnnnnnnnnnnnnnnnnnnnnnnnnnnnnnnnnnnnnnnnnnncaaaaaaa

SEQ ID NO: 5807 - DNA, 1478 bp, Macaca Fascicularis
gtgctcgcggatcggcttttccgccctgaccgtgctcctgatgcctcccggccgccgtaggcgaaggttcgcggaagcggcgagcaggcgcttacctgagctgactcagaaattgggatgatttctctgtggatcctataaggagcctggacatggtgaagagaatgccttgaccatcaggagacagcttaccttattgaatcttgatcacttcttctgaccactttggatattaaaagaacaagtgagaacactgccttgaatctgcctaagaatgaaaccaaagaacagaggaaagcagacctaggagaaggagggaaagacaacatcccaataatagcattcaagtttctggatccaagcatgtctgctgctggacattactcctggtacttcttgttacatgatccagtgaatggcaattcgtgccctcctctccctatacgtttcctcctttttttgcttaaggtattttgaggtagatttccatcgtctgcaagaacagaaagatttctggagtagatagcacttcagctgcatcttgaaggatgaataggaaattctcaggtgaaacagggatggaactgaggatcttatttggtcatccaggctggagtgcagtggtgtgatcatggctcactgcagtctcaaactgctggactccagtgatcttcctgcctcagcctcccccagaagcgaggactacaggtctcactctgttgcccagcctggagtgcaatggcaccatctcagttcactgcaacctctgcctcccgggttcaagcaattctcctgcctcagcctcctgagtagctgggattgcaggcgcgcaccaccacacccagctaattttcctatttttagtataaatgaggtttcactatgttggctaggctgcttttggactcctgacctcaagtgatccgccagccttggcctctccaagtactaggattacagtgctaggagccaccgtgcccggccccctgtcttgtcttttacacatgaagaaaaagtggtcagagacgttaacttggtcagtgccaaaaacattgaaagtgagtagggccaagattttcatctagatttgttagactctaaatccaaattcacaagatcagaatatgacaaacctaaggaacaaaattctaggaaacatttctagaaactgtggctattgaaaaagcacagacctagggaatcaaattattttcactgccaccagcacgtgggtaggcctgggacagattccatgctctggaccccagattcctcagcaagaatagaaggggctagagacatcagggcattggatctggtgatctcaatgcccactcagctccaaagcattcttgaatgatgcataatttatgaaaaacatatatattgaaatttactgataggggaacagctgtcagcatcagatttttgttgtatgccttaaaaaacagattatacagaaaaaaaaaaaaaaaaaa

SEQ ID NO: 5808 - DNA, 734 bp, Macaca Fascicularis
  misc_feature (1)...(734): n = A,T,C or G
tagtattgtcaaacacttnnnnagcataaattggttcaaccactttgtggttgccaaacaactattactattactaatatgttacccttgccaagcaatttggcaatcatgaaggaggaatagcacaaccctgtgacccaccaaatctacttccaggtatgcaccctggagaaactcgtcaacaactccatgaagagatatgtacagaatcttcattgcctccttgtttgagcaaaaatnnnnnnnnnnnnnnnnnnnnnnnnnnnnnnnnnggattttaaaagatctatgcattttcctataataaaattgtacataggcattaaaatgcataagctagatctttctgtatcagtttggataaatctcaaaaacacaatgttgtgtgaaaagagcaagttgtggaaggaaatacatgatgtgatactatttatataaaatagaaatccacaaaacaattatatatttgagcatatatatatatatatgagtaatatgtgtatgtatatatatatgagtagaaagagcaccccacaccaccaggataatggttatctgtggggagagaagaaagggaagggtcagtgggagtccagctgtacatatcacattttattactttttagaaactatagagaatgttaaaatgttcacattttaaaaatctgcgtggtgnctttagaagtgtcgtgttattttctgtactttgcgatgcttgaaatattcataataaa

SEQ ID NO: 5809 - DNA, 882 bp, Macaca Fascicularis
  misc_feature (1)...(882): n = A,T,C or G
tatttaaatcggtttgtgtagtnnngtttcccaacacctgtggttacctaatgtttaatattatagaactgtcctcaaaaactttgtcaattttcaaggctataaggaacagaaggactcttttaattctgtattatcattatctttatatatatnnnnnnnnnnnnnnnnnttgggtgtaatttgccaagcttgaattctttaatgcatttgcataaattctatactgtttagagcttaaagctacagaagcattgttaggaattgcttggacactgaattttaaactttttgacattgttaacaagcatgttcatcttttcttgtcactagtccaagagaaatatgcttaatgtatattactaaaggctttgtatatgttaacctgttttaatgccaaaagtttgctttgtccacaatttccttaagacctcttcagaaaaggatttgtttgccttaacgaatattgttggagaaaaacacagtataatgagtgaaaagggcagaagcaagaaattcctacatcttagcgactccaagaagaatgagtatccacatttagatggcacattatgaggactttaatctttccttaaacacaataatgttttcttttttcttttattcacatgatttctaagtatatttttcatgcaggacagtttttcaaccttgatgtacagtgactgtgtaaaatttttctttcggtggcaacctctataatctttaaatatggtaagcatcttgtctgttttgaaggggatatgacaataaatctatcagatggaaaaatactgttacaaagtagaaaagctttagtaatttactcagtgtggtggttttatcctttttttctttttctnnnnttggtctataatgaaa

SEQ ID NO: 5810 - DNA, 739 bp, Macaca Fascicularis
  misc_feature (1)...(739): n = A,T,C or G
atgnncannnnnnnannnnnnnnnnnnnnnnnnnnnnnnnnnngcccgcctnnnnnnnnnnnnnnntgnnactctctcactcagtgacctcagtcaccaannncttctgcccttggggcagcccagacaaaagggaagtgctggccgtgctggtcctgccctgctggtggcctgccaggcctggcgccagtgagcagaagcgatgggatgagggtgacagggcctgctcctgtcctgaggcccagccttgtccctcctgccacgtcctgtctacatgcatgcctctgcctgatgccctgctccactctctggcctgcccgtggggcagtcggaaggcatctttctttctcccctnnnnnnnnnnnnnnnnnnnnnnnnnnnnnnnnnnnnnnnnnnnnnnnnnnnnnnnnnnnnnnnnnnnnnnncaggaggaagtgccttnnnnnnngagcctccaggacacatatgtgcagaaacggtggatgtgggacacacaggaccagaatggaagtgtgtgatgcacggtggctgctctggctgagaggccctgctgggtgtgtttcatcagtcccnnnnnnnnnnnnnnnnnnnnnnnnnnnnnnacagggactcagcttaggactttctcgaatgtcacctcaccaccatggcccttctgccattcttcnnnnnnnnnnnnnnnnnnnnnnnnnnnnnaggtcaagcgtgtccagtgggagcttagaaccctgaagttcta

SEQ ID NO: 5811 - DNA, 632 bp, Macaca Fascicularis
cagacagttaagcctctaaacatgagcactgtggcacatatttaaggttgccacggacaaggatcacacaacagagaacactgtagtaacattttggtgtgctcaacaacacccagaacatttaccagtttttgttgttggtttattatttttctgttaaaaaattgtgaaaagtttgttttagctggatgatattttaatagttgccactgttttggaactatagagatgtcactacttaacacatataccttatgttttgttttgttttgttttacactcagtataaatcaggaaaagttagccaaccatctagtatttagaatcctcttttttattgtcttctgaggatatggatgttcccataacagcaacaaaacagcaacaaaaacatttcataaatatcacttgatagactctaagcacctgcttaactttgaatgtgtcccaaatatttagtgtgtgtatatatatatatatatatatattcaacaaataaagcaaactataacatgcatttcacattttgtctttccctgttaggattttaatagcagaactgtatgacaagtttaggtgatcctagcatatgttaaattcaaattaatgtaaaacaggtcaacaacaacaaa

SEQ ID NO: 5812 - DNA, 677 bp, Macaca Fascicularis
  misc_feature (1)...(677): n = A,T,C or G
tgggcgctttagcccggaactgtggccgagaaagcagggtagacgtggccaagtcggtcacctcaggcctgggctnnnnnnnnnnnnnnnnnnncccgctgctctatgcctttgtaggggtcaagttccgggagcggatgtggatgctgctcttgcgcctgggctgccccaaccagagagggctccagaggcagccatcgtcttcnnnnnnnnnnncatcctggtctgagacctcagaggcctcctactcgggcttgtgaggccagaatctgggctcccctttcacccacacagtctgactttcccgctttccaggctcctccctccctcnnnngagccaattctggctctccccacatcctcgctcccgggactcactggcagccccagcaccaccaggtctccagggaagccaccctcccagctctgaggactgcaccattgctgctcgttagctgccaagccccatcctgccggccgaggtggctgcgtggagccccactgcccttctcatttggaaactaaaacttcaccttccccgagtgctgggagtacaaggcatagcatagagggcgctgcccnnnnnnnnnnnnnnnnnnnnnnnnnnnnnnnnnnnnnntgtggccatggtccccaagacctctatatttgcttttatttttacgtcgaaaatcctg

SEQ ID NO: 5813 - DNA, 734 bp, Macaca Fascicularis
  misc_feature (1)...(734): n = A,T,C or G
annnnnnnnnnnnntnnnnntactgagcnnnnnnnnnnnnnnnnnnnnnnnnnnnnccgcttcttttctagagtccaccttatccaaaggttagaacttcctccatggagctgcccaattctccagctgccagagtagcaccttcctggtgctgtccagggcagggacaggcaagtggccgtagggaggcacaggccaatttctcacatagtctaataacctggcccatcctgaagctctccccaccaattaccacctatcccctaagaaaacatcagtggcttccacctgcccaaccatatctcacctgggcggacactcccccatcaggggagtgaagggcttaggagatggggcacgtggaggaagagggtcaatacagaagagttttctgttttctggatgcaaggaacaatatatcacccagaacatcattatctcttgaattattatactgccgggactttttttcctattaaaatctatcagaacagccagatgcggtggctgcactttgggaggccaaggctgggttggtggatcacttgaggccaggagttnnnnnnnnnnnnnnncnnnnnnnnnnnnnnnnnnnnnnnnnnnnnnnnnnnnnnnnnnnnnnnnnnnnnnnnnnnnnnnnnnnnnnnnnnnnnnnnnnnnnnnnnnnnnnnnnnnnnnnnnnnnnnnnnnnnnnnnnnnnnnnnnnnnnnnnnnnnnnnnnnnnnnnnnnnnac

SEQ ID NO: 5814 - DNA, 738 bp, Macaca Fascicularis
tgtaaatacagtgttcagtccttcaagtgatattttatttttttcttcataccattagctacttgttttctaatctgcttcatcctaatgcttatattcatcttttccctaaatttgtgatgctgcagatcctacatcattcagatagaaacttttttttttcagaattatagaattccacagctcctaccaagaccatgaggacaaatatctaacacttttcagttgctgaaggagaaaagagctttagttatgatggataaaaatatctgccaccctaggcttccatattatacttaaattgtttacatagcttaccacagtaggagtatcagggccaaatacctatgtaataatttgaggtcatttctgctttaggaaaagtacttttggtaaattctttggccctgaccagtattcattatttcagacaattccctgtgataggacaactagtctatttaatattctcagaacttatggcatttgactatatgaaaactttaaatttatttatattcagggtgatcaaattcttaaacatgaaagattttctgtattttaaaggaacccatgctttaacttgctacgtaattaacgacaacaaaaaaaaatacagtagagctctttgttccagtgttatctctttcattgtcactttgtatgtatttgcaaatttttttaccaaagacaaacacaaaaatagaatactgtatttacaggaataataaaattaaa

SEQ ID NO: 5815 - DNA, 721 bp, Macaca Fascicularis
  misc_feature (1)...(721): n = A,T,C or G
gccatttgaccctgtgcttgaaacctcatggtcacaaaatggctgcccctgtgctggacatcatatttattttcaaagaaagtagaatgggaaaggagcagtcataaaacgttttctttcagaagagtctgttggttttggttagaaaaggaagtcccnnnnnnnnnnnnnnnnnnnttctcattgatccgacctgggtgtcatgtccatcccagcacaagtcctgctatggggctggaaggaagggcctaccagcaccaagggatacccacagtctcttgaacacaaaattgggattctgttagcacagaagaaggatagcaatggctgttgaataggtgatggnnnnnnnnagcctgccatggatgtgtaggctacagagctctcnnnnnnnnnnnnnnnnnnnnnnnnnnnnnnnttctactcagggtaattaaaattaaggaacagagctttattataagactgggannnnnnnnnnnnnnnnnnnnnnnnnnnnnnnnnnaatgtaaatcagtgaaatgaaaaaggtataaggacaagagaaacgccagcgctgtctgcagcgggtggccgcaactcccttccagctgatgctgttccaccatgggtccagtgggaccagatcttccaatgttcaagagaggagtctaggattttctgtgaaatctnnnnaatattagtatatttgatcaaaaatgttccnnnnngatgtgtgagt

SEQ ID NO: 5816 - DNA, 748 bp, Macaca Fascicularis
  misc_feature (1)...(748): n = A,T,C or G
tatgtccataatattatcattgtaatgtgtgaggaatgtgtaattattaataatgtatataaacatttgaaactaactctgtatattacctttctagcacatcacagttcagaccagccacattccagtcactcaggaggcacacatggccaatagctgccacattgaagtgcagctctgatgtcaggggggtgaatgaactgaacattccttttctgccagaagtgaaggcagagcctctccctaccaacatctttcttcagttctaagggnnnnnnnnnnnnnnnnnnnnnaaagagcaggtggcagcaggaataaaataactgcacgtagaccactgctggccacctgttgtccacttttcttccagagatcagacagtgaacaaaggatgttggggtcacaggataaaaaaactctgtgtcttcaattctgtccacacgcttgacctccaatgcttagatatggagaagatagattaaaagcaagcttattttgctatttggccttggccctaattgtcagagtatggttatctgttttttcctgtggtgtggagggtgtgtgggtataagcaccaatcacatacatacatctctacctgtatttctgcattactcaacattctcttacaagtcacccaactttaaatcagnnnnnnnnnnnnnnnnntatagggtgcccactgttagaagntaactagtaatcaacctgtcattgaatnnnnnnnnnnnnngtgagtgcatgt

SEQ ID NO: 5817 - DNA, 624 bp, Macaca Fascicularis
tatcctgtgtcgtgaaattgacacaccccctccaccccaggtggcctacagcaaggaacgtatcccgggcaagggtgttttcattaacacaagccctgaatttctggttggctgtgactgctaggatgggtgtcgggacaagtccaagtgtgcctgccatcaactaactatccaggctacagcctgtaccccaggaggccaaatcaaccctaactctggctaccaatacaagagactaaaaaagtgtctacccacaggtggtatatgagtgtaacaaacgctgcaaatgtgacccaaacatgtgcacaaaccggttggtacaacatgaactacaagttcggctacagctattcaagacacataacaagggctggggtatccgctgcttggatgacattgccaaaggctcttttgtctgtatttatgcaggcaaaatcctgacagatgactttgcacacaaggagggtctggaaatgggtgatgagtactttgcaaatctggaccatatcgaaagcgtggagaacttcaaagaaggatatgacagtgatgccccctgttcctctgacagcagtggtgtatacttgaaggaccgtgaagatggcaacagcggtacagaggaccctg

SEQ ID NO: 5818 - DNA, 640 bp, Macaca Fascicularis
  misc_feature (1)...(640): n = A,T,C or G
ccagcatagaaagacccaaaactacacagaaaccaaaaccagaatgccatgtggtggagccaaagggcagaatttctgacccctgtggctcagctgcccctccccgcaaataaaaaccaacaaagaagacaaatcaggacaataaagaagattcatgctaagctgtggcagaggggggaaggtatggtcgggtgggtgtgggacaaggaatggccatggaagaccacagggtagcttggaccctgggctgggagggggagagcaaggcccctcaccacaacttaagccaaacctaagctgccccaggtgccgtaggtccctgtcccagcagggaggctgatggcctgggcccatgcctctccccacctttgggagtcagatagtggccacccaggcctgctgggctggggcctgacacaggctctgccnnnnnnnnnnnnnnnnnnntggagagagaatggagtcactgtttaaccatggtacctgcctcagccccagcagaccacaggaggctggccccagacnnnnnnnnnnnnnnnnnnnnnnnnnnnnnnnnnnnnnncttggccacctcatgcccatcctggccatctagggtcagcacancccagatgaggccactgaaaggcaccggatgccc

SEQ ID NO: 5819 - DNA, 1236 bp, Macaca Fascicularis
  misc_feature (1)...(1236): n = A,T,C or G
cttttgggtacacggagtgttcagcaaagaccaaagatggagtgagagaggtttttgaaatggctacgagagctgctctgcaagctagacgtgggaagaaaaaatctgggtgccttgtcttgtgaaaccttgctgcaagcacagcccttatgcggttaattttgaagtgctgtttattaatcttagtgtatgattactggcctttttcatttatctataatttacctaagattacaaatcagaagtcatctnnnnnnnnnnnnnnngaagccaactatgattattaatgatgtccaacccgtctggcccaccagggtccttttgacactgctctaacagccctcctctgcactcccacctgacacaccaggcgctaattcaaggaatttcttaacttcttgcttctttctagaaagagaaacagttggtaacttttgtgaattaggctgtaactactttataactaacatgtcctgcctattatccgtcagctgcaaggtactctggtgagtcaccacttcagggctttactcattaacagattttgttggcatagctctggggtgggcagttttttgaaaatgggctcaaccagaaaagcccaagttcatgcagctgtggcagagttacagttctgtggtttcatgttagttaccttatagttactgtgtaattagtgccacttaatgtatgttaccaaaaataaatatatctaccccagactagatgtagtattttttgtataattggatttcctaatactgatatttgtcatccccaaagaaagtgtattggttttttaaaaaagaaagtgtatttggaaataaagtcagatggaaaattcattttttaaattcccgttttgtcactttttttgataaaagatgcccatattaccccttttcggccccatgtatctcagtacccctatctggagctgggctaagtaaataggaattggtttcacgcctgaggcaattagacactttggaaggtggcataacctgtctcacctggacttcagcatctggctctaattcacagtgctcttctcactgtatccaggttccctcccagaggagccaccagttctcataggtggcactcagtctctcttctctccagctgactaaactttttttctgtaccagttaatttttccaactactaatagaaaaaaggcagttttttaaaaaaaaaaaaaaaaaaaaaaagaaaaaaaaaaaaaaaaaaagg

SEQ ID NO: 5820 - DNA, 753 bp, Macaca Fascicularis
  misc_feature (1)...(753): n = A,T,C or G
agacagatagtgatctgaaagnnnnaaaggggagggggagaaggtttatcagccaaaagcatatgaagtgttctctnnnnnnnnnnnnnnnnnnngggtgaggggaggggcaagggggtgttttatagcatcactgagacattctcattcccccacctggaaaatagcgttatggcaatgggtgcctcactgatgttcttaaaggaaacgagttattaaaatacgatggcatcctccggaaggaaagaaagagtaggagcaggggggctatggagaataaatttctcccaattgcctcagatttcaaaatccagaatttgtattgtgtttcgaatcacaaacatagaattcttactgtgttggttaaagtaaaattcatttgcggttttgattttcatcaatgagctgtactttcccccatgactgtatgtagttttaataaaatcatttagagtaagtgggtgccaactgatgttgcagaatcttttgtctaggcactccaagatgccaataagtcattttaaaaatgtatgtcagaaatgtaaacaaacattttggattttttttaaacagtatttatttggaatgttttcatttatctaaataactattgctattatgaattatggaaaattactattatgtgtggcatatagtgacttaacacacacatcacgcaatctgcaaacccagaaaatgtgtatatctgtctttagaaattagtgtttatatcacttacagtggtttgtgaat

SEQ ID NO: 5821 - DNA, 689 bp, Macaca Fascicularis
  misc_feature (1)...(689): n = A,T,C or G
acaccattatgtgcgctgataagcgtttacgnnnnnnnnnnnnnnnnnnnnnnnnnnngaggaattctgtatagattagaattctgtatagattagagaatgttgaaacggatgatttctatgctgagtttgtgctggtgtatgtgtgaagtgagtgagttgggtgtattgtgcactaaacttttctgatagaggaagcgcgattaaagaatggtccgtgctgaggacttgttagatctagttcatcctccatttaataattatatgctatttctatattttcattcttctatcacctgtcttgcctttttcattattttattatgaaacttgtgtaaatacaattttgtttctgtacttttttggcataacataaatctgtgaacttgaaatttgaattttgtgttagagatttttttgttgtttgtttagtcttgtctcagattttattatgtaaatcccattattcaaagttgcctaaatccatttggaaatctttaaaaaaaaattggggattcttaaagttgaatttattggcttttctgatccagttttgtttggaccaaaaaccagnnnnnnnnnnnnnnnnnagcatatatttttatatttactaaaatggactgtggtgactttggataataaggaaaagtttaatattaaagcccatgtttattacagtataattaaca

SEQ ID NO: 5822 - DNA, 766 bp, Macaca Fascicularis
  misc_feature (1)...(766): n = A,T,C or G
tggagctgctgnnngagaagnnnnnnnnnnnngcggnnnnnnccctgggccctggggacgcggtcaggcgagtcctggagtgcgtggccaccgggacgctcctgacagatgggcctggacnnnnnnnnnnnnnnnnnnnnnnccagacagacgcccttgagcccatgaccctccaagagcgggaagacgtgaccgccagcgcccagcacgccctgagaatgctggccttccggcnnnnnnnnnnnnnnnnnnnnnnnnnnctcctgccacccagacaccggcttgggnnnnnnnnnnnnnnnnnncagcggggacctggcgaggccgaggagggcccaggggagaagaagcggggccagcgggatggagaggggctcgtgtgagccacctgcctccnnnnnnnnnnnnnnnnnnnnnnnnnnnnnnnnnnnnnnnnnnnnnnnnnnnnnnnnnnnnnnnnnnnnnnnnnnnnnnnnnnnnnnnnnnnnnnnnnnnnnnnnnntctgtaggtttcttttaaaacacttgtgcttcaggccgggcaccannnnnnnnnnnnnnnnnnnnnnnnnnnnnnnnnnnnnnnttgcttgagcctgagagttcaaggccnnnnnnnnnnnnnnngtgagacccccatctctccaaaatatttttaaaaatcagcttggcgtggttggtggccaggcgcagnnnnnnnnnnnnnnnnnnncagcactttgagaggccgaggtgggcagatcacctgaggtcaggagtcgaagac

SEQ ID NO: 5823 - DNA, 689 bp, Macaca Fascicularis
  misc_feature (1)...(689): n = A,T,C or G
aaacaggaaaaggctccaagctaggaagtgatannngaggtgtggagaacattctcnnnnnnnnnnnnnnnnnnnnncctggacaggagaagctggtgcaagcccgaggtcacgtgtgtctcagttgttttggaccctctgtagcttttacactcataaaatattacagttgcccctttcatatttgggtcattcaaagagcccacctcnnnnnaggctcctgctcaatatgcacagcatcnnnnnnnnnnnnnnnnnnnnnnntttttctaactgtaacacaggtaatatggggtggggaggcttgggatatacctaaacgtggcacangacttgtattnnnnnnnnnnngatgaaaaggaaactatgcacttgaatgttaattaaaattttaatttaattcattggatagcttgtgccagaaagaacagtcaatattcaagaagcaannnnnnnnnnnnnnnnnnnnnnggcctccctgtacggggagtttccttgtctggaacgcaaacacctacaagtagagtgtgagctggttcttgacaatcagatctcatcagccctttgaaacgttctgggcnnnnnnnnnnctcggtctgcatggttggtgtaagtataatcaagtagtgaaattgtatggtatacacctacannnnnnnnnnnnnnnnnnnnnnnnnnnnaatttgcta

SEQ ID NO: 5824 - DNA, 783 bp, Macaca Fascicularis
  misc_feature (1)...(783): n = A,T,C or G
tcactgtccatataggagaaagtggctcattnnnagtagaggtatgggtggctatcatttcaaaattattgtgattctcacctccctctccacctcagtgttttgtctgtctgtgcccaagaaagataagcaactatttcctgttggatggggttggcaggaagctgttaaagatttatgccagagccttgcaggatggagcacgtctgggacaactaagagccaaggcgcaccaaggagttttccacccatctctcatggtcacagcgctagtcatacatttttgagaagttgcttcttttacatcagaaaaccagtcaatcatatggagacttcttttgtgatgaaaaagggctttagaagttaaatacacacatgcacatgaaaacatgcacagccacagcctcaatcttgtatttagtttggggaaagagaagagaatttcctgtggattattttttcctcaagtgtacctctctggttaacccaaactctgcaagaaagcactgtgattaaaannnnnnnnnnnnnnnnntaaatattccatggtttcagttaaatttcagtctttacacatgaggtcaaaggagtgaccaaaatacaaagcaaggaaaaaatgaaatacccagtttttgctgaatgcttaatttattttttactgtgccacttcaatatttataaaatccagnnnnnnnnnnnnnnnctctgtagtaatactaattttgtgccttttgtctgctttcttaagannnnngttgttcacactttgtagatattagacaa

SEQ ID NO: 5825 - DNA, 548 bp, Macaca Fascicularis
  misc_feature (1)...(548): n = A,T,C or G
agcacaggagcccatcgttggctctaggattccaccgccggaagcctgttcagacaccccttaggctccaaggcctggtgtgagccactagggggtgctnnnnaaactgcaccccacaccccacatcctccatcctgactgcagcatggggttccccggcaggggtgggaggcagcagggtcagcctgggcgggaacctctcccaactctgttcaggtgttcagacctcttagcccaacctgctcgcccccgccgggttcactgtccctgtggtgctggagagatgggcataagtcaggaacttgggaggatcaccaccctttcaggggcatgaggccctggggcctccgccggaagggagccccctgctacccccagcaaactccagaacagcagaaagcgggtgctctagaggagcactcagctcagggggagggagcttttggctgagcttctacagggctgagagctgcgctttggggacttcagcctcccttccagtatgggcnnntggggggtccagactacctgatgccccttcccccatt

SEQ ID NO: 5826 - DNA, 3359 bp, Macaca Fascicularis
gaaatggatgcaagcagctccgggggccccaaaagcatgcttcctgtggtctagccccaggaagcccttccgtggggaccttggcttccagggatgccaccggttctggacgcatggctgattcctgaatgatgatggttcgccgggggctgcttgcgtggatttcccgggtggtggttttgctggtgctcctctgctgtgccatctctgtcctgtacatgttggcctgcaccccaaaaggtgacgacgagcagctggcactgcccagggccaacagccccacggggaaggaggggtaccaggccatcctacaggagtgggaggagcagcaccgcaactacgtaagcagcctgaagcggcagatcgcgcagctcaaggaggagctgcaggagaggagtgagcagctcaggaatgggcagtaccaagccagtgatgctgctggcctggggccggacaggagccccccagagaaaacccaggccgacctcctggccttcctgcactcacaggtggacaaggcagaggtgcacgctggtgtcaaactgaccacggagtatgcagcagtgccttttgatagctttactctacagaaggtgtaccagctggagactggccttacccgccaccccgaggagaagcccgtgaggaaggacaagcgggatgagttggtggaagccattgaatcggccttggagaccctgaacaatcctgcagagaacagccccaaccaccgtccttacacagcctctgatttcatagaagggatctaccgaacagaaagggacaaagggacattgtatgagctcaccttcaaaggggaccacaaacacgaattcaaacggctcgtcttgtttcgaccatttggccccatcatcaaagtaaaaaaagaaaagctcaacatggccaacacgcttatcaatgttatcgtgcctctagcaaaaagggtggacaagttctggcagttcatgcagaatttcagggagatgtgcattgagcaggatgggagagtccatctcactgttgtttactttgggaaagaagaaataaatgaagtcaaaggaatacttgaaaacacttccaaagctgccaacttcaggaactttaccttcatccagctgaatggagaattctctcggggaaagggacttgatgttggagcccgcttctggaagggaagcaacgtccttctctttttctgtgatgttgacatctacttcacgtctgaattcctcaatacgtgtaggctgaatacacagccagggaagaaggtattttatccagttcttttcagtcagtacaatcctggcatcatatacggccaccatgatgcagtccctcccttagaacagcagctggtcataaagaaggaaactggattttggagagactttggatttgggatgacgtgtcagtatcggtcggacttcatcaatataggtgggtttgatctggacatcaaaggctggggcggagaggacgtgcacctttagcgcaaatatctccacagcaacctcatagtggtgcggacgcccgtgcgaggactcttccacctctggcatgagaagcgctgcgtggacgagctgtcccctgagcagtacaagatgtgcatgcagtccaaagccatgaacgaggcgtcccacggccagctgggcatgctggtgttcaggcacgagatagaggctcaccttcgcaaacagaaacagaagacaagtagcaaaaaaacatgaactcccagagatggatggggggagacactctctctttccttttgcaattactgaaagtggctgcaacaaagaaaagacttccataaaggacgacaaaagaactggacccgtgggtcagagacgagagagcctccaatttctctctgtttggctttttacaacagaaatcaaaatctccactttgcctgcaaaactagcccagtagcaccctgcgaagtgtctgacaaaggcagaatgcttgtgagattataagcctaatggtgtggaggttttgatggtgtttacagcaaactgatacctattgttttgtgtgctcactgaaatattcatgatttaagagcagtcttgtaaaaagttcattagcatgaaaggcaagcatatttctcctcatatgaatgagcctatcagcagggctcttgtttctagcagtgctaaaatatcagaaggcagaagaggagatgtgcttattatgatcctagtgagtacattaagcaaaatcaaatggaccagaaaagaaaccgtaaatatcgtgttattttttttcccaagattaatcaaacataatctgcttatctttttggttgtccttttaactgtctccgtttgtttcttttatttaaaaatgcacttttttttcgcttgtgagttagtctgcttatttaccactttgcaagccttacaagacagcacaagttagcctacatttttatatttttaaagaagatacttttagatgcagtttgagaactttcagttcaaagcatcaaactgatcctgtatccgaggacatgccaaatgctgattcagtccggcactgagtgtcaggcctggaggcatagggaaggaatggtttgtactgatggagatatacagatactttatctgaagagtgttttcgaagaggagcaactgaacactggaggaaagcaaaatgacacttgatgctttacagaaaaggaaactcattcagactggtgatattgtgatgtaactaaaagtcagaaaccacattttcccctcagaagtggggaccgctttcttacctgtttaaataaaccaaagtataccgtgtgaaccaaacaatctcttttcaaagcagggtgctcctcctggcttctggcttccataagaagaaatggagaaaatacatatatatatattttgtgaaagatcagtccatctgccagaatctagtgggatggaagtttttgctacatgttcatccaccccaagccgggtggaagtaacttaattcgtttttaaattaagcagttctactcgatcaccaagatgcttctgaaaattgcattttattaccgtttcaaactattttttaaaaatgaatacagttcacatagagtggtttctacattcatgtgaaaattattagccagcaccagatgcatgagctaattatctgtttgagtccttgccttctgtttgcccacagtaaactcattgtttaaaagcttcaagaacattcaatgctgttggtgtgttaaaaatgcattgtattgatttgtaccggtagtttataaaattcaattaaaacacaggccatgaatggaaagtggtattgcacagctaataaaatatgatttgtggaaagtaaaaaaaaaaaaaaaaaaaaaa

SEQ ID NO: 5827 - DNA, 834 bp, Macaca Fascicularis
  misc_feature (1)...(834): n = A,T,C or G
gaacgtgcataagctggagnnngagacgtggaaacatgtggaagccatatatatagacattgcagatcgaagccaagtgcttagcaaggattacaaggcagaggaagacccagcaaaatttaaatctaacaaaacaggccgaggacccttgggccccaactggaagcaagaacttgtaaaccagaaggactgcccgtatatgtgtgcgtacaaactggtgactgtcaagttcaagtggtggggcctgcagaacaaagnnnnnnnnnnnnnnnntaagcaagagaggcgtctgtttacaaacttccacaggcagctgttctgttggctcgataagtgggttgacctgaccatggacgacattcgaaggatggaagaagagacgaagagacagctggatgaaatgagacaaaaggacccagtgaaaggaatgacagcagatgactaaagccacccttccccctctgcactttttgcaagacagtggtcaacaggaaggcccagcagctccatcctcccaagnnnnnnnnnnnnnnnggacgcagccgttctgtgcccattcttcaggcaactttcgatcccttactgtagctaattctagatgccctttaatattgtgaacaaatagaccgnnnnnnnnnnnnnnnnnnnngtgtgcaggagcctgctcctctgatacgtggcgtgtaggctgctgtatttacagctcctccgtctctctccattgtgttctgacccatttctgtgtgtgcccccagcctttatttccaagtgacattttcagtctttcaaatagctgccttttgtgatgtggtgatttaaatgatttaagttcat

SEQ ID NO: 5828 - DNA, 865 bp, Macaca Fascicularis
  misc_feature (1)...(865): n = A,T,C or G
ggaaggggttaatggtaataactggaagtgaaagtccaattgtagtggtgctcagtggcagcatggaacctgcatttcatagaggagatcntctatttctaacaaatcgagttgaagatcccatacgagtgggagaaattgttgtttttaggatagaaggaagagagattcctatagttcaccgagtcttgaagattcatgaaaagcaaaatgggcatatcaagtttttgaccaaaggagataataatgcggttgatgaccgaggcctctataaacaaggacaacattggctagagaaaaaagatgttgtggggagagccaggggatttgttccttatattggaattgtgacaatcctcatgaatgactatcctaaatttaagtatgcagtgctctttttgctgggtttattcgtgctggttcatcgtgagtaagaaacctgccttgctgttcctgggaagatgccatacttttcgttactggatgtttggagtagatactggtctgtgattggtggaatggagaacacacgtgttggtgcttcttggtagcactggtttgcattagtttatgtttccacgccagagtttgtgtgggcgggcgcatgtgtaccacagagtgcacttgaggggactttcagtcacaggatttcataattgtcattgtcacactttcacatttttgtacatcagtgaattttttatattaaaaggttgagccaaagcccccagtgtttgtattttgaagccaagcttcacttctaaagtgcctacagagacttgtaaatgaaaatgcagctctgcatgagtttgaaaccgtcatacctccttctaataggaatggcatatactgaggtggtcgtaag

SEQ ID NO: 5829 - DNA, 661 bp, Macaca Fascicularis
  misc_feature (1)...(661): n = A,T,C or G
tagtccccnnnnntccagccgtcagnnnctgggccccaatgcagctgccctctccagatacctggcagcctcatatnnnnnnnnnnnnnnngcttggcggcaggggcctgggggaggggcccccgcagcctcccggggctcctggtcctcctctgctccnnnnnnnnnnnnnnnnnnnccgcccccccagccccagccaccaccnnnnnnnnnnnnnnnnnnnnnnnnnnnnnnnnnnnnnnnnatccacgtgggtgggggtgggcggctgcggccagccaaggcccaggtccggttgaaccaccctgctctcttggcctccacacaggaatctatgggccttcgcagggcccagggggctcctgatgcccgcttccatatgtgagccaggacatgagacttccccaaagcaaggacttcagccagatgccacagaccctcagaacttgacccggaagtccagacactgaacgcaggcctcaaaactgctgcggctttccagctcctggtttctgcgtcggcgaatggcccttcttgccttgatccacagcgatggggaagggaatgtcatgaatgttttgttaatactgattgtttcatgcgatgatgtgtattctcccattctggaggctgtgggggatgacgacaatgaatggaaggt

SEQ ID NO: 5830 - DNA, 772 bp, Macaca Fascicularis
  misc_feature (1)...(772): n = A,T,C or G
gcagaagtnnnnngtgatggcnnggttaggtagcctaacatcattcagnnnnnnnnnnnnnnnggtgtgnnnnnnnnnnnnnnnnnnnnnnnnnnnnnnnngccaagggcaggtttctggagactcgtgtgcccagaatggcaagggcaccgggctggcgtttccgtatatgtgtcttcattagcagaaaaatgatgatggattttatttcactcacactccaatttgtaataaaatgccaaannnnnnnnnnnnnnatccaaacaagccaccattnnnnnnnnnnnnnnnnnnnnnnnnnnnnatgttgccattcttggaaactgtcccattgcttcannnnnnnnnnnacgtagctctgcctgcctgtcacccccnnnnnnnnnnntgctcaccacgggaggatacctgtgtgccagcagcccctcagggactctcagccctggcactggcaccccagggttggccccgtcagcagaggcctggctttcgagccagtgggtgtctctccttcgggcctgggcgacttgctcctgccagccatgccctcagggtaggctnnnnnnnnnnnnnnnnnnnnnnnnnnnnnnnnnnnnnnnnnnnnnnngggtcctctggaggaggggcgagctgtggagnnnnnnnnnnnnnnnncccctagctcactcaggaattcannnnnnnnnnnnnnnnnnnnnnnnnnnnnnnnnnnncctctgctccccactccccaccacgnnnnnnnnnnnnnnntcnnnnnnnnnnnnnnnnc

SEQ ID NO: 5831 - DNA, 706 bp, Macaca Fascicularis
  misc_feature (1)...(706): n = A,T,C or G
agcatgaaatacatttcatctcctcaaagggactgcaaggttgacatgagttggaaagggaaccctggannnnnnnnnnnnnnctctattggaacagtctgaggactnnnnnnnnnnnnnnnnnnnnnnnnnnnnnnnnnnnnnnnnnnnnnnnntgaaggtggtcacattctgttggctctctatactcagcctctcctccagaaacagatcggttccagaacattcnnnnnnnnnnnnnnnnnnntccttgtccccacactagtccccctcccccagggcttcctccagtgacagttagagctaatctctgagacannnnnnnnnnnnnnnnnttcaaacccaggctgagtcctggccacctgctggattgtgacatatgannnnnnnnnnnctgagctcccacttctgcacaggctccttctggggcagcaccaaggcccagctctgatggctcgccctgtcaggcaccagctgcttcatcctgggctcttacccacatgcacatcctccttcctagcatcggattacctgcgtgtttccccagacaaaagcacttcccattcctgaaccttgcctaccctgggctgagctgatgggaatagatttaatgacagtgactcccaggaagggggtcctgtgactttgctctggtaagaacaaaaggtggaactggtgacctaggaaaagtgtgaatctaaaaaga

SEQ ID NO: 5832 - DNA, 1826 bp, Macaca Fascicularis
gcaccgcggcgggagcaggaggctgcggggcacaaagagcggcggggcggaccctggggcgccggcgttccctgcccggtgggttcgcagcaaaccgcagccacaggaggggtgcgctttgcctctgaaggacagcaggcccctaagttttcatggactgaatgcatgagttgtgtacgccctgccgcaccgagatgttagaggtttcccaagttacgcccccgcaggccttctgataccgacatattaaaagaagcccggaggaagagggcgacgcacgcgggtggcttttaggccatctatttggggaaaaaatgacagaaggggcatggtgcggtggggaggaagcgggtcctccggccctggattccgattctggcccgaggctcagctaggatggccccagaccccagagaacgtcctaccctgtgcccgtttccactcccacctcccgcccccgagttccgggctaaggagcacgacttggccagagaaaacgtgagacggcgccgggacagggaccctcctcccgcagcgcacatcccaccctccttgctcagacactgctctggttgcttgtgcttctaggaggcgccactgcgggagtcagccgtaggagggatgggctttgcctctgaagcacagcaggcccttaacaagttttagcggactgaatgcacgagctatgtacgccctgccgcaccgcgactttaggacccccttcaccagctccagggggtgctggttaggacccccttctccttaaccagcccccctcctctgtggtgatgacagtgacaaccccaggttcaaattcctgttaaccacctgggggaactctccagggccccctttctcaccagttatacggagtcatgggactaattaaggcatttgtcacaggaatcgttgtgagggttaagtgagcggcttgaggcagctggaaaagaagaattctgtctgggaaaggaggcagctgggcctgggacatcggcctgggacacggggctcccctgaaccatgtaagaattggccttacctggcccgtccagtggaggctcagctagagggataagctctcagctggtaacaatggcggctgccagttttctgtttgcataagagatgggcaccagccctttgagcggccttcattgcctaatagagagttggagagttgcacgtgccatggcccatacacgtcagccatgagtaaacatcacatagaatcctgcgcttagaggcccctcctctgggttcttgcaaacatattggtcaactaatatgtccctggcacatgccaaatgctacagctgcaggaattcctgactcacctttctttctgcctttcgtgctcttccccagatagctgcatggctctatcacttccttccagtctctgctcaaatgaacccctacccctgcaaaccttgtccccttattctactttattttttccatagcacgtattaccacctgccaaattgatttatttattgtttatccttccccattaatatttaaaccccacaaaggcagggaaaatgatttatttaaaaatctagttctagattaggggtcctggaagtaccagctagagacgataacagcaaaatatgccaaaaagagagagatggacatagaaagaaagagaaaaaagcctaaacaaacgattgaaacctcccactgaaaattataaaatacatgaggaattctaatgctaagaaagacaaataaaatctacaatcagaagatgaattcactgcagataacattaattttatagaatagtttgacaaatattgtaagtaaatgtgtttgagcag

SEQ ID NO: 5833 - DNA, 1670 bp, Macaca Fascicularis
  misc_feature (1)...(1670): n = A,T,C or G
gattgccagaatccattagtgcataaacatagtctaacgctaacattgatcttagttgaattacttcttacttgtattactgttatatccatgctttaattttggctgttgagtcatgatacaacaggacaaagtatatttaactgaaaaactcaaggttaatttagactgtaaattaatatgccctgtagggctacccaagacatagtcacaatttcactacaaatttgttattgttgttaagaatgtatagagaatctcattttttgtgaagaagagagaagataccgaatgtgacttgattttctggggtcatgatactccaattaggaattctttaggtactgtgtagctgatctcttttaacttgctgagggaaaaacaatatatgtctgcctcttttttctcataaggcctgatgaatgatgttgaggcgatgcccaccagcagcctttcctaagataactgtactccagcataggtttctggcaaagtaaattaacatcctaagtttaggtgtctccttggtgatcacatctattgctcgcctttaaaagtattccaaagactaagtacctaatagaatgctgattagaaaagcaaccacttcaattccaaagagcaattgactcagtacagtgaggagtttccatgaacaacaagtcataaattgcctctgaggttgcagttatcattgcaaaccttcaaagcctcaaatgtcctgattcctgggtaatttaggttgcagaccatgggcagagagcattttttagagcaagtgtattctggctaaaaacaactgtgtaggtagctgtggctgaataaggaccatttcctcactgcccacagcccaactgctaagttttggttatggtacccacagttaggtccctatttacatattagttatggtatagccacaactactgcgataaggtccaaaaattcagtggctcaaacaaaatacaaacgtattactctctcagtctagagtctagaggcaaggtggccgtctgtgggaataggtaggtttattccgcaaggtttctccaggtttcttctctcttgtggctcactatttctaaggatgtctggatctgctgtgcaccacatcaatgttcccatggatgaatgagaaaggcagtgcaggacatggatcttcttttcaggaacggatgtggtagttgtatgaatcacctttactcacatcccattcatgagaacttagacatagtgccacatgtagctgccaagaagactgggaagtgtagtttctctctgcagttattcacatgcacttaaaaaaaaaaaaaaaaaaaaaaaaaaattctggccgggcgcggtggctcaagcctgtaatctcagcactttgggaggccgagacgggcggatcacgacgtcagnnnnnnnnnnnnnnnnnnnnnnnnnnnnnnnnnnnnnnnnnnnnnnnnnnnnnnnnnnnnnnnnnnnnnnnnnnnnnnnnnnnnnnnnnnnnnnnnnnnnnnnnnnnnnnnnnnnnnnnnnnnnnnnnnnnnnnnnnnnnnnnnnnnnnnnnnnnnnnnnnnnnnnnnnnnnnnnnnnnnnnnnnnnnnnnnnnnnnnnnnnnnnnnnnnnnnnnnnnnnnnaaaaaaaaaaaaaaaaaaaaaaaaaaaaaaaaaaaaaaaaaaaaa

SEQ ID NO: 5834 - DNA, 728 bp, Macaca Fascicularis
  misc_feature (1)...(728): n = A,T,C or G
tctagctagtgaatatgaggtcatgacagtcttaatacatcagcaanntctcaatatttcttctatccctcattagagtggaatggaggaaaaccttgggactcaggctctgatgatagaaaatacaagatggtannnnnnnnnnnnnnnnnnnnnnnnnntggcatggagttttctcctccatgtacacagttggactttttgtagtgaggaaataaatgtgttctctgctgaacttctaaaggtttgggtatacttnnnnnnnncagannnnnnnnnnnnnnnnnnnnnnnnnnnnnnnnnnnnnnnnnnnnnnnnnnatctgaaatcagtgtatgtcagaaaagtcacatacgacaaacctcagacagcannnnnnnnnnnnnnnncttttattcccaagtcttcctcatcggacaggtaatatcatcagaaatctgacattttaacaaatgtaggaaattcttcacacacacagacacacacacacacacacccccagaatctcattaaatatttgataatttaattttgaatgtgtaaagttttcaacaaatgatcatattttatatcagagcttgttacaannnnnnnnnnnnnnnnnnnnnnnnnnnnnnnnnnnnnnnnnnntctagatattgctatatcagaactgttgtttcatatataatatcaaaacttttaatgaaatgtaacattgattaatagacattccgtataataaaaac

SEQ ID NO: 5835 - DNA, 2936 bp, Macaca Fascicularis
  misc_feature (1)...(2936): n = A,T,C or G
aagatgctttggagagggttagtgataggaagaaaatgactggggaattattttagataggttggccagtgccggactctctgatgagggaatattcaaacccagacctgcaagatgtgaaggggctaaccttgtgaagatggtggtgatggtgatggtgttggtgatcatggtgatagaaacggacacatattagtgcagatattgctctaggtgcatcacataaccaactaatttaatcctcagaatctttctcagaggtggatagtattattaacaagctttgcagtacaaaagtcagaaatacatagagattaaatcatttgctcaagatcagagtttataaatgttaggcccagaattgcaacctaaaccttagctttatttaaaacattatagtgagacaaaagaacattccaagcagaaaaaacaacaagtgtaaaatcaattttgagtcagtcttgttctgacacaggcagtggtttccttgagctggatattgttggtgaaatggttttagtgagagggggaagttggttgggctgtcatcatgaccaacttgttgggtgtaaatcagcctgtgtaaaccccctcaatacagtatatttaaaaaaaaaaaagataatgaggctaatttacaaccacattgaaaaatgatatactggtgtaaattacttttcgaagttattttcagaaaaactggtttgaccatttttgcttaaacaaagtggaccctttggattcaaactttgatattgatgatgtaaagtaaattatgctttctattagcttatttatttgatttggttgcttctaaaacaaatttgttcttttattatacagaatgtgtcactgattttctggctttaatttatatcctaagtaactaaaccatagaggttctctcagccaaatcaacacaaaaaccaaagaggtcctagaacttctgtttgcattgaagatgtgtgcatcactgcactgtcagaacaattacatggcaaccttttgaaatgtcttaagtgtcgttggaaagtatattagaaactccatcattctgtggtcatggacgcatagtgatttaataagaataccaaacatagtagcatattataaaggagagggaaatgaattcattcaagtaactattttgaaaacagcagttaatgatgaaaagaataccttttaatttcctagttgttttccaaagtgcttataacccatctattttactgtgggaattcttcctctgaaaaatcttttgcggtttttagacacaggcaaagtctgagttttcatttatttgtagagaaatattacctcttcaactgagattgggtcattacatgacacaacaatggagaatgatttaaataattattccatatactgtatcctgtatctcatccctctaatatacacgtcatacattcgaccctgtattgagtaaaacaatgtacaagacagtctatcaaaaatatctgagtcacagagactacaaaaatcctgtaatgtcacctatgtaagagacatgtgtaattttcatacaataataatgaccttgttgacaccaacatttatctatcacacaacagttactgtgtgatagataccatgtgatgtattttatttacactctctttaatccttaggagatggcttcaaagtagttgctactatttctgaagaagtagaagatcagagaggctaagtagtttgcccacagagctaataagtagcaaactccggatctaaataggtttgtcagactctgaagaaaatgtttctgtgtgttatgatgacattttcctgtgtgttcaacaggatgttgtgaggtcaaatcagtttagaaacattgggttgaacagttaaacatatttgttaactgaaaggctttttcagagcctttaatatgcaaagtaaagctacaaggaaataatatagtataaatattgaccaggcatatttaattgatgaaccccacatctaccaccatccccaaatctgtcaattaaagaatcttcagtgaactttgagctgtgagagctgaaactgtattaggtggggttaagaaaagtaaaggtagagaatgtagaatatcctttcttttttttttttcttaagttggctgatactcagtaagcagttgcattgttaagggcagtttcagctaagaaaggaaaatctgaatagatgcaaaggcaaaaaaacagggacatgctcaagcggtgaatgtgaatatgaaggataattaagaaacaacatttcagatgtgattttagggcttgagtataaaaaatgtggtggttgttattagatttgaagctggtggaatttctgaaatcagtgaaaaagtagacatcaggaaaaaatagacaaattctaaagaataaaaatagagtacgcttctttcttgtgagcacctaaactatccagtgaaatagaaataaaataatttattcaaagaggagttgataatttgagagtgttgaaaagattttcaaaactctactgaaaatattatttgtaaaaaaattagttgggtaaaatcttataaaattgcttataatttgacctttttccttccatatccgtatttttaaaacattttgttatgtgaaagtttcatatggtttaacctaatgttataaattactcagtgggattcaactgagactgagtaacatgaatttgaagtctaaatatattccctgcaattatttgaggatcaaacagtgaaaagaatcagaaagaggaaatcaggaagtgatcctgagaannnnnnnnnnnnnnnnnnnnnnnnnnnnnnnnnnnnnnnnnnnnnnnnnnnnnnnnnnnnnnnnnnnnnnnnnnnnnnnacgccagcatggtcgacagagcagagcaagactctgtctcaaaaaaaaaaaaaaaaaaaaaaaaaaaaaaaaaaaaaaaaa

SEQ ID NO: 5836 - DNA, 2778 bp, Macaca Fascicularis
agcatgcaacctgacaatgccacaactcaacacacgcaggtactattagaaggaatagtaagtggtacttacagtaccagggcaatttacgtgtattttggggtccacttctccaggacatcatccctacccaacaacaccaacacttcagttcattcctctctcatcttctggaaagacagaagttttcactatgagacacaggaattctggcctaagttgtcccagtccttcacggacagcaagaatccaagtttccccacgcgtcacctgaagccccaacttctggaaacgccctcctttcctcgcctccacgagctgcgagagcagaacatgcagccgcgggcgctactgctgtcgccgccaaagtcaaggaggcgactggaagctcaggctggtcggcggcctcggggcgaccacaggcaaggccctgatcccgatccacgaaccaaggcgcctcatctcccccagggagtgagctcccgcgcccctcggagtacccaggcgagcccgggcgccgggagaacgctctgcactcagcgcccagccccgggacgccgccaagcgcacgactccggctgagcgccggggcagcggtaggtgcggggaagaggggcgtgttccctgagactccgagccccaaggccgggtccaggcgggacaggggaaggcggcaagccgagcacgctgtccgtgacgacggctctcggctccaagccccgccggctggcgtggcgacgcgctgtagcccgcgcgcccttgcagggacagcagccgtgagcgccttgcgcggccgcctccgcgcctgcctcggcgcgcaaactttcccagcgataaccgctcaggcctctccgaagggggcgcggccctctccccggggcccagaaacggcttgccccctcccctccgcagctaaaacccactgaaaatatggcgccctcgaaagtcgttccttggtcccatcagggatcccgaaatactcgtctccaggtccctccagcttccaatgggtgcaaaatttcagctcgtgggaccgaggaaggggagggagcagctgtgtgaggccagcagcactggatgcaaagcctgtccctgctttcggcccggcactgcccccgtcgctcagcggccagcagttcgcccgtggcgagactgccaagtaagacagtcgtgggatcggcaggtctgagtgtccggcactggagaaggaactccgcactggagggctgtcttagcccagagcctcggcgggagacttgtttgcgaagtggcgctggagtcccggcggccagtgctggaatgaagccgctccgcccgcgccaactctcctggcgcgggggcccggccggggtcgaggggacactctatgcaggcggggccgtttttcaaagcccagttaccggaaacccagcgagagccccggaggggacgggctgcccacggccaggaatccgctctctggcgccggctgcgaggctgtttgcaaaccgctgcgcccgggtccagtgcagttaaacatacatgtgcaatagacaggtgcattaatatcattttatttttattttcctgcaagaagccctcctagaccatcaaatctgggagctttacgggtttttcctgcattggcatcactcacgagaagcaaaagggaggaaaaaaaaaacacccacattttccttctggagaggggagggaaaagatacgagaaattcatgcaacgtgcatgcagctggaggaagaggaaaacccgagtgagccgtgcgccttaccgggggatgcatttactgtctcattgcagagcgcctgcccgggagtacagcccgcgtccccccgcgcgcagggcgaccactccgctcccgcagccgcctcagccactgccgccgccgctggctccgggcgcggaacaagagccgagggcgagcgcgagcgcactgcccgcgagcgctgggagggcaggaagcgcgtcatcattcggggacggcgcggctccggtccggccgctgcgccgcgctgcatcgggggtgggccgccacccaggctctggcgcccctgctgggtctctcctcgcgtggggtgatgctgaaagggtccgtgagggaaggcgatgcacaggccgagctgtcacgtggaagggaggctcggggtgaccccggcttcccagaactggggctctgctgtgtaaaggggatgactggaggacccagcgtcttgtgggctggggcccctaggtccgcagagtgccctctcgggaccagtggccaggtcctgggggaagcgaggtgtggctgactggagggccgtggcgggcggtggggtcttgctgcgaagcggagggccgtgaccccaggcgagcctgctcctttcagtacaaggatcctgaaaccttgctagtcaggggtcacttaggaatttagagaacgactatagggatgagtggcggaaggggtgtgctctattgacaaggagaaaataattcgctcctgtttgccatgccctgaataaagtcagttatataccttttacatttacagtcattattagtaaatactgtaaataccgtggaacaatgtgaaggttattcaagggggtgaggagacaaaacactatgtaccatatggccccattttttaaaactgtgatttctagagaaaggcagaaaagactggataaagaaacaccaataaatctctcagtaattggtggaattgtgagtaattttagttttttatttatctgtaagggacacattagtaattcagaaaaaaaaaaaaaaaaaaa

SEQ ID NO: 5837 - DNA, 2482 bp, Macaca Fascicularis
gtgcgcccctggtggcggtggagtagggctggcggcgccgggcggctgagacgttcttacaccccacgcagcaggcagctccctggtggatgtctgaaaatgtaaattcactgcctcaagtggaaatatccagtcgctgggaacctggctcttgccttttcaacgccacctttcctccgtcctcgccatccctcggaattgccctaaaccctctatgggccccgcctcggagcgccccttggaccccggcctggcgccggcacatacctcggtcaggtccttcagagggaccgcttcctgcctgccacccatatgaaaggaaaacatcgcatggaaaggcccagttcctttagtgtgtggtcaagaaatgtagccgcacagttaagtaaccccctaaggtgctttgggggtccacacccagctgcttttctgacttctcacgctgtttgcttcacaggactctgttacccactggggacctcttggccattattaacacaggccaacaggactaaaggtttgcctccgcccttcccaaaacatcagggaggtttgtgcgggacggtaaagcacaatttttgccttacaataggactcctttgaaactactattgatttcccttttcagtagccttcagaaccgcttttaacgatgtggtgtttctgggggttatagtgataattctcctaagtcatttttccatttagtttttctgtcacgggcttggtgcggttaagagactgcggctcccagcatgcggtacgttactgattcagggcaaaatcaagtatgttactacatgcttctcaaactagagaaggcagtccacccactttggcctcccagagtgctgggattacaggtgtgagtcaccacactgggttgcagttagtatttgcgatgttagaaactaaagtgctggtaaaccttggaaagaaaaatcttgtggtctctgagagcttcaaatttaatcttggcctcattccctaatcacatcggaagaagagaatatgtgaaaaatggaagtgatcagaggacgatggggtcccaggagagggaaatctcatgccttctgatctattcacagctttgacctgcagaccttagatatgggaggaatagactaaaaacaaactgtcactgttgttactgttttggagatggagtctcactctatagctcaggatggagtgcagtctcagttcactgcgacctctgcttcccaggttcaagtgatcttcccaccttagcctcctgagtatctgggactacaggctaacatgggcttgttctcatggagatgaaagcattctgaaagaaaaagcagaagcattcaagatcttttgagcctaaccctgaaactagcacactgtcatactctctgcattctgctggccagagtaaataaggccagcccagatacaagacttggggaaacaaattctgtctgtttatgggagcagctataaaatctcattgcaaaggtcatagatagggaagtatgaagaattgttcttattttttcaatcagtatcattatgccttttcttgcagatgaggtttacctaattgttccaaatcaaattcaaaaccttgaagttactgactaggttgtaactcagtagtatctactatacttgactccaaagcccagacacctctatagaccacagtactcatacatctcccctattccttcaagattctggagagtgacacttctgtaaatgcccatctagggctcttcacttatacccattgggtataattccctccagagaaagcagaactgtcttggaagaacttaaaataacttagggaaacagctgagggctgagtttagaaatcaaggctcgtatttttaatttctaattataggggaaatttgaaaacacatatagtgcactccatatgtttgcaaattcttttcgtccatttttagtatttgtaggctatttatgattttcaaagcaagctaaatcaaacggtgcctgaaacaacctcttactctgaaaagcaagcaacataaagatagatctgctgagaagacatttccacctgctgcaatttagacaaacagctgactgtgtattgaagcagtcctttgattttcacagggcaaagctgtttccaagaccccaaactgaggaactgccatggggcacacatggaaatcacacacagctaatgcatccctcactctgaaccagtggtccatatccatggctgcacattaaaatcacctggggagcttttaaaattcccaaaacccaagttacaacagacctattaagttggattccctggagtgggacccaggcaacggtgttgtttaaagctctctatgtggttatattgtatggtcaaggctgaaaagccactgctttaaaccagcatcttttgatgaactagttgcaaataatttctcaaataaatgtaaaatgttcactgctgaaaaaaaaaaaaaaaaaaaaaaaaaaa

SEQ ID NO: 5838 - DNA, 555 bp, Macaca Fascicularis
cagacacaggagtcactctgaaaatctgtcctgtagtaaaagaaatttacatctacagaggaaatatacatcagtaaagcatctgtatcacgaagagggcagctctgcgataatttttgttacctgggagattttatctgcatatcaagacaacttttattcaccgtttatttcctcccctcacctttccacaactttgtggccaaccatcccccagaaagccgcaaaccaccatttcttgagtagcgtaggatgctgtataatcttcaatcatctgaccatggtgggacgactctgcatgtgtagttaagtacgggttttttttcttgttaatgtttatgtcaagttaatttgtaacccagccaaagaacctaggaggatggagggaagccgtttttccctctcctacacctcagtaacctactgccagctgaagaaatagaacattactaaagccacctgtacatctttctccttttgaattaccttcactccgaagaagtaatggattttcttaatttactgttaacttttaccatgcagatttttatatat

SEQ ID NO: 5839 - DNA, 625 bp, Macaca Fascicularis
  misc_feature (1)...(625): n = A,T,C or G
gcagctttcagcaatatgtttgaaggcctcttttgttaatgatcctgtaatgtatgaattatgttcttgagatattaaaaaagaatatgaaggcttgataattattcattgggtaaagtcaggaaattgaagtgaaagaactaatggttttgttttttggaatacaggcacctaagctattgctaattgaattgctgctagaattagaaattatgctttagaatagaattggtatttctgtgattctttttgcttcttggtgttttctcttgtatctgtatatctagtattgaggctcgctctttcatgtggctttatcctctctctaatagctgttgtannnnnnnnnnnnnnntggctgcttcaggatcagcttgcagagtcttgcttttaggttagatacaaagtaaatcatagttggtgtaaatacagcaaaaaacagctggctttagaatggagaacactacaattcaaatttgaagtatattcagaagaaaactttgctttacatttgtttgtaaatctaaacaaatatgcaaaattggtcaaaatttaagtatatagcatttttgaagatataaatggttccttgtatgtgctgatttctttgtattctgttctctgc

SEQ ID NO: 5840 - DNA, 2923 bp, Macaca Fascicularis
ctcttgcaacattaatgtttataaaaagttttaaattgatttgaatagaaagaaaacattgttttaaagttggacttatatttttcttctatgtagttactataaaagtgtgctggatttgaccaatccttacccccactataaagagaacccttgatgactttagtttaaaaattgtggaaattatttaaaccatattagataatgatgtggaagtcatattgtctttcatgtatactgccatttaaaaataggtttttaaaatttagctaagtcttaagtaatttgccattgctaatttatctccttgagtcggttgttggggagggatgttatattcaataatttttagctattttgaaatgcagagtgtttattcatttcacagttctgcaatggatgtagtattttgggattaccctgtccagaaaattttcagctacacacctttaaaggaaaaggtttctatttcagatgaaactggtaatttgggatggttcttcctttgtcacttaaaggaagagataggaaaagtctcttacccactttaaacatgagggtaaaggtttaggtcaaacttactggctttgtcattcaaacatatctgaatcctcacttttttctctttattttttagggtcagaactgagatattaccaagaaaaggcacaataccataatattatggtcttatggtattttgacttaaaggggaaaaggtacttaattttggtgggatgttgattgtaccttgttacaaagactcattttctcatatgttttctcctaataagatggaatatggagtatactgtaataatataatttaagtgttcattataagctatttggattaagaactattacagagttgtaagcttgttatcaaattaatgcaagacatttaaactatttttttgcaaaactatttatttttaaaacaacttaaagtatatctagggtgagttaaaagtccctgtgcatctatattagatggcaggttttgtcacagtgtcactgtgtattaataataaatgttgaaatggcttctccgtgtctccagaagcatttacatgtcctccttgtgagatcatggtgcacagaggtctttggactgccctgaacccgtcttatgtggacataatctattccctgcgttttcttatcatgtcatgtgtttaagatctacccgcttagtgtcaagattattcagattttcatctaaatgtttttaaaattgtattttgtgttttagtggaggacagtcttgatactgttctaattcagaaagccaaattttgatgcgcttttatatgttcataatacatactttagtatgccgtattctaatctagtttgaaattgtcagattctgatagtataatgataaagtcaaactatttgccaaaaagttaaatttacaagcagaaagatgttttgcggtattttctacttttgtgtagaaaaataaccatttggggtaggcagcacaacaatgtgaaagattggctttatatgatagtaacacagtccggttaaaagtggaaacagggaaaagagagagagaaaactcatcatttagtttggtctagacacaattcggttaaattttaggattctattggcagttaacatatatgacatggacaccgcctatgagtgctttttaaatatgtgcttctaaaaatctgagctcaaggcaagaaaaaacaggaaagctgtatccatttgccataatagatgaatcagagttgttttctattaaatatttcatcacaaaatatgatggaggccagaagctatttttaggcttactataacactattatgcatttttataaataataaggctatagaaagtacttgaaaaatatctaattctttctctttctgtctgaggaaaactgtttctacttggtgcaataatctgaaaatttagaaggtcaaaatatgtcacaggaaatgatcatagaactaaaaatagtttttaaggaaaccagctacacggggcaaccatcttgctgttgaagaaaataaaattccaaaaggctaaatcattggcataaaggaaacaaaacccaaagtatacgttgtaatttttgagccagtattattgagacaggatacaagttactaaaatctaacataggttaatgcaatgtctctgctagtgctacaggtctaaaataatccttgtaacaatgctttcagaaatgccaattttaactactgtacatttcacattgtatatgggagatattgctttacgaatgaatcagaataatacattttcatttaaatcctaattgcctttcatccaatatgaagtcttaatttcaaaatgaactcactaccagcaataggcagttctcttgaataataaggaacaatagccagttccgtgaataactttaaaattctaaaagtgttagtacactagcaatcacaaatttggtttctttgaatacttttttaatcctgtaaagaaggttttttataaacattctttttattaatcagtcataacatgtcaaagtgtgtagttgctgtttctgaaaagtgatccaaactctacatccagagattatgaaaaattcttatagaattttgtaataagtatatacatgttgggttaaagaaatttcatagttgttggagtgccatgaaattaatacttgcaattcagattgcggtagtttacactttttctgtatgtttcaaatcaggtgtgtaccatttgtactgagaacaccacagaatgaattatccaaagtccattgattttaatacgtgttttggtttgtaaacaaattatagtaatttcttgcacatttttggaaattaattgtataagaatttatgtatctgcttctagatacagtgtgtaaataaaaaatttcattcacaaaaaaaaaaaaaaaaa

SEQ ID NO: 5841 - DNA, 744 bp, Macaca Fascicularis
taagtgcccacgtttgatggagggtggaagtaatttgaatgtatttgatttataattttattttattttttgtttttgttttaggttaaaagatggttgtagcatttaaaatggaaaattttctccttggtttgctagtatcttaagtgtattctctgtaagcgtagttcaaatgggtcatcatgaaaggttaaaaaagcaaggtggtcctgtttgctggtggttaaggccagggcctttcctaccactgtgccactgacttgctatgtgaccctgggcaagtcactgaactataatgtgcctcagttttccttctgctaaaatggggataataatactgacctacctcaaagggcagttttgaggcataactaatgctttttataaagcattttgggatccttcggcacaggaattctcaagacctgagtggtttttataatagcaatgtccaccatgaacttgatatgtccatgtgccccagatgctgtcattagtctatatggttctccaagagattgaatgactccattggagaagtggtggataactagccagaaaaaatttgagaatacataaacaactcattgccatggaaacatacagaggatactttttctttgattgggtgggatttttccctttttatgtgggatagtagttacttgtgacaagaataattttggaataatttctattaatatcaactctgaagctaattgtactaatctgagattgtgttgt

SEQ ID NO: 5842 - DNA, 743 bp, Macaca Fascicularis
  misc_feature (1)...(743): n = A,T,C or G
ttaaaaaacttatttgcatattgnnnnnttagtnnnnttttaaagtttttgtaattatctttttctattagatcctattcaaatcaatctgcaattatagtattaatatgttacatttttaaagttgatctgaatgaaattgataaatactgtttactaatatgcataccaggttaccatatctctatgttttcaaaaatggatatactttctacagtggtgtgaaactaggcaaagattagtgctaacattattttattcatgaagtcctataatgatgaagatggctgctgagacagaaacagttcaagcttaaactagcattcttatctatttatattaggaactgtgtttcagcttagtttttgttatttattttgtaaggaaaagtctgttcatgtgtcagattcttagtatggtcataattttactaatgttccagaatttcttaataattttaaaggacctcaagaggtctgtgtcttacaataaaccatcaagtaataaggcttgaaatgatattctaagtagaaaaattatccattaataccagaacttggtggggcatatgtgggtaataaaggctaatagttttaaaatgaaggttataattaaggctgaaaatatcagaagtcctttgccaataatgtaagnncatgtaatcaacatcagtgatgtcaaacatgaagttgcaatgtacagggaatgtgttgacctagaactttgttagatatacttcatca

SEQ ID NO: 5843 - DNA, 680 bp, Macaca Fascicularis
aacagaaacagaagtccacatgcttcaggatgggatagctcggctggtgggtgaggggggccatttgtttctctattacacagtggaaaactcccgtgtgtatcatctggaagaacccaaatgcttggaaatatacccccagcaagctgatgccatggaactgttgcttcgttcttacccagagtttgtgagagtgggggacctgccctgtgacagtgtggaggaccagctttccttggcaaccatgttgtatgataaggggctgctgctcaccaagatgcctctagccctaaattagtttcttgctgattgctggaaacaaggcagtagtgattctcccctgccactgctactttttttttttttctttttttgaaactcatgttcttaccttgataaccatcagtgtgctcacatttacctttatgactgcttcaatgtcgcaaacctcagaaggtcttctaggaagaaccatctcatctaggtacaaaaggaaaaggagaagttggaggtggaaaaaaacccttgatccgtgatcatttcagagcaccaacttcatcaccctcaggcttcagtgtactgggtggcactgatcatgtcattctgcttgagaccgacattagattttttttggaatttggatctttcatctgagttctttttcattgttggagggaggg

SEQ ID NO: 5844 - DNA, 468 bp, Macaca Fascicularis
aagccattacaatgtgagatctgtggatttacttgtggacaaaaggcatgtattatttgtcacatgaagatacatgatgctgactccttataccagttttattgcaatatgtgtggcaaaaaatttgagaagaaggacagcgtggtggcacacaaggcaaaatgccaccgtgaggtgatgattgctgatgctctggctgccaatgcaggcgccttcatcaccatcccagatatcttgggcactaacccagagtccttgtcgtagccttcagatggtcagggtcttcctctttttcgtgagcccttgggaaactcaacctgtggagagtgcgtaatgctagaaggtgaagggatgtcaaagtcatattgcagtgggacagatcgggtgagcatgatgggtgatgggaagatctttgtgggaagcggcagcatgtggaggcactgaagggttggttatgaattcagatat

SEQ ID NO: 5845 - DNA, 751 bp, Macaca Fascicularis
  misc_feature (1)...(751): n = A,T,C or G
agagtcacaaaggaggactgaggcatcttctgcaagatactgccagccaggacagaggngtctcagcagagctcagtgggcttcattcagcaagtgccagcattaccatcctttcccaaaggcaaggccgctcagcgcttcactgggcctccatccctctctgagatttctcagtggaaacttggacccatttaatatcactccgctgagctacctctaatctccttgcattggacaggagctttggacaaggaagggaatattaagattgtgtgtacaaatggcacttaactgtgaaggaccatctaggagcaagatctaagaccattctgctcaacctaatagtgcagaatgctgactaaggggaaaactaggccacctgaagtatatctttaatgatggtattcttggtgatgggaccaacaagctccagaattactacaggtactatcttggaagccacttgattctgaaactgaggcaggttcaggtttagggtcactgattctaagacatttacagaagttcatgcatgtgtttcagccaagttcccccaagattgaggctattgagacatggcactatcaacaggtgaaattgattctcagagactcacaagtctcatgaaggggctgtgcagaaaatggcccttacctgctgtaccctagtgcacaggacttgcaatgttgcttgagagacatatcccaagtccttcttagaggcatggagtataacaacttcagtggaattg

SEQ ID NO: 5846 - DNA, 2298 bp, Macaca Fascicularis
aaagcggccaatgccagacccgtctcatgatgtgaaagttctcacttcgaagacatcaactgttgagatgacccaggcagtattgaatactcggctttcatcagaaaatgttaccaaagttgagcagaattcaccagcagtttgtgaaacaatttctgttcctaagtccatatccactgaggaatataaatcaaaaattcaaaatgaaaatatgctacttctcgctttgctttcacaggcacataagactcagaagacagtattaaaagatgctaatcaaactattcaggattctaaactagacagttgtgaaatgaatccaaatacccaaatgactggtaaccaactgaatttgaagaccatggaaactccaagtacttctaatgtaagtggcaaggttttggacaactctttttgcagtggacaagaatcctcaacaaaaggaatgcctgctaaaagtgacagctgttccatggaagtgctagcaacctgtctttccctgtggaaaaagcaaccttcagaaactacaaaagaaaagcagtgtgataaactcagaacaaacacaacagtagttggaatttcaaaacctgctaacatccacattaagagtccttgttcggttgtgggaaattcaaattctcagaataaaataagtaatccctcacagcagacagctttatcgatggtagtgcacaattatgagtcttcaggtataaatataacaaagggaacagaacttcagattgctgtagtgtcaccgttagttctgtcagaggtcaaaacattgtctgtcaaaggaataacacctgcagcattacctgaaacagtgtatcccattattaaagaaggtagtgtctgtagtctacaaaatcaattggcagaaaacgcaaaggcagctgcagctttgaaagtcgacgttagcggaccagtagcaagtacagcaacatcaaccaagatttttccactaactcagaaggaaaagcagaatgagtcaacacatggtaattcagaagttacacctaatgtcaatcaagggaagcataacaaattagagtcagctatgcattctcctacgaacgatcagcagacctcacaggaatcaaggaatagtactgttgtgagtagtgatatattacagattgacaatatttgttctctggttgaaggtgatacctcttacaattcccaaatagcaaagatattcagctctcttcctttgaaaatggttgagccacagaaaccttctgtacccaatcagcaagggaatggcagcagagaaccagaaaaacaattagataatacagctgaaaataaagactttggttttcaaaaagataaacctgtacagtgcacagatgtttcacataaaatatgtgatcagtcaaagttagagccacccttagagtcatcttgtaacgatcttgaaacaaacagaggaattctagagaaaagtagtgtggagcatgccactgaaaaaagcacagctaatgatacatgctcgttggctgctattcaggaggatatttaccctcaggaaatagatgcatccagcaattatactccccaagatcctgcaagaaatgaaattcacaatgataaggcacctgtcttatacctacacgaccagctgtcagaacttttaaaagagtttccttatggcattgaggctgtgaatacacgtgaaagttctgtgggccagcaaactgcataccagacctcagaagatcaaactgctgataaaaccagttctgactccaaagacccagcagatcaaatacaaattacagtattaagctcagagcaaatgaaagaaatatttcctgaacaggatgatcaaccctatgtagtagacgacttgacggaacctcagaaagatgagcccatcacagaagtagttaccccggcacctgcaggaggagaaagtcgtgattctgtggtactggactcagagaaagacgatatccactgttgtgcgttgggatggctctccatggtttacgaaggagtaccccagtgtcagtgtaattccatcaagaactcaacttcagaggaagagaaacaaaaagagcagtgttctttggagaccaacagttgtaaacaaggagagagaacctctgatagagatgtcactgttgttcaatttaagagccttgtaaataatccaaagactcctccaacttctccagatgggaaaagtcattttcctgaactacaagacaacaatagaaaagagacatccaaaacaaaacataaaagcttgccaaggacggagcaagaattaactgctggtgagttttc

SEQ ID NO: 5847 - DNA, 745 bp, Macaca Fascicularis
  misc_feature (1)...(745): n = A,T,C or G
aaccaaaacacaaatgccaacatactcaaagaactaccaaattattccctgggccnnngnnnnnnnnnnnnnnnaatcattttggctgctgagtgaagggtgttggaaaaagtgccattgtgtaagttaaggaaagggtcagagaactgaaaagactgcagctgtatgaaagggcttctgtgctgggattctccttttnnnnnnnnnnaaggcacaaatcaagaaccgcaaccttggatatatgacaaatgaacacaattccggtttttggttttattttaaaatgaaattccactgtttcccaagaatttgcacttgatgctttacatatttttcatgtcagcttccttccttgccacctttnnnnnnnnnnnnnnnnccccttaacagctggacacatcaccgttccatttttctattggttgtgactgaagtagcttgaggtcaattatttccccagcaattgacaaagaatcttgatgaagaggaaagtgacattgtcccttgaacaacactgctccctcctccccctgccctcccggctgagaggagagagcagggcagactttccttttgcaaggagcccagcggggcggtggcggtggggtctgtggaagtgcgtgggtaacatatggtaagtggagaaaatatttatattcatggtgaaagagcaggagaagatccaaagaaggtcattccacagagatttcaagcaagagacactgacttgatattgtgtcttgac

SEQ ID NO: 5848 - DNA, 523 bp, Macaca Fascicularis
cgcgtgcggccaagtccaggttctttagtctggtagttgtggatgtctccaccagcgtcgtcccctgcttggtccattgtgtgtgctcagttgccctgaaagatggacagttctttaggctctttcagtcctggcttttatacccacttccccatcttggctaactctcttgtgttctccaagacaactcagatgtcacactggaaaacctttccaattctattcctctcccctgctgagtcaagtggcccttctggcctcttgcacctgtcattgcacttatgaccctgcattatgattgcctgtttgtttacctgtctacttctggagacctgtctgtccaatatggttaagttactagccacatgtggcttgaaattgtattaggccaaattgaaacatgctgtaagtggaaaatagacactagatatccaagatttagtacaacgaaaatgaatgtaacgcaactcagtaatttttatactgcttatatgtgaaaaattttggtaatattttagatagg

SEQ ID NO: 5849 - DNA, 715 bp, Macaca Fascicularis
  misc_feature (1)...(715): n = A,T,C or G
gtacagaggacagccccagctttcctcggccttccctcctggagagccacatcagccttatgcatggcatcagaaaccctgatntgagccaaacgtccaaagtcaaacctccaggtggacattcccctcaggtgaaccatctgaaaagaccagtcagtggagtaggggacgctccaggcaccagcaatggcgcaaccgtctcttccaccaaaaggcacaagtccctttttcagtgcgcgaaatgtagttttgccacagactcggggctcgagtttcagagccacatacctcagcaccaggcggacagctccacagcccaatgtctcctctgtggtttgtgctacacctctgccagctccctcagccgccacctcttcattgtccacaaggtgagagaccaggaggaggaagaggaagaggaggtggtggcagcagagatggcagtggaggtggcagagccagaggaaggctccggggaggaggtacccatggagactagagagaatggactggaagaatgtgccggtgagcctttgttggctgacccagaggtgaggagattgctgggccaggcccctgaggacgatggtggccacaatgatcatagtcaaccacaggcctctcaggaccaggacagccacgcactatcccctcaggtgtgactggagacccttgcagntgtgcatggtcaggggtggtgccaaagcgtcttcca

SEQ ID NO: 5850 - DNA, 679 bp, Macaca Fascicularis
  misc_feature (1)...(679): n = A,T,C or G
gtaaccacttgnnnnnaggnnnnnnnnnngctctcatttttaaatagctgctccttctaatgtgaaatatagtcaaacttttttaaaactgaaattttcttctggacttaataaagagactaacattgactagcacaaaatttcaaatggatctactagttttgtaataaattagctctggctgatatggagacggcggtgagttgaattctgtccccctcccctccattcaaatgttggagtcctaactgccaggacctcagaaacgtgaccttatttggaaataggagcattgcaggtgtaattacttaagatgaggccatactggagcagagtgggcccctcatccaatgtgactggtgttcttctaaaaagaggaaatttggagacagagacacatagggagaacgccatgtggaggtgaagataaagaacacagcggtgcttctacaagccaaggaatgccaaagaccaccagcaaaccaccaagaagctcggggagacgcacagaatgaatactttctcacagacctcagaannnnnnnnnnnnnnnnnnncctggatctcagacttccagcctccagaactgccagggaatacatttctgttgtttaagccattcagtttgtggtactttgttatggcagcccccatgaaactaatacaataactaaatttg

SEQ ID NO: 5851 - DNA, 729 bp, Macaca Fascicularis
  misc_feature (1)...(729): n = A,T,C or G
caggagactggccttgtcaggannngggctgnnngccatcncgctgggaacccagcgggcctcttcnnncannnnnnnnntgggacagccctagggccctaactggggtgcggcaggagcagggacagagactctggaagcccccacctttctcactggaatcaccttcctagaagggagttgctcactcaggactttgttgcatttccacactgtcagagctgttggcctcgcctgggcccaggctctgggaannnnnnnnnnnnnnnnnnnnnnnnnnnnctctcttccctgggaactcatcctgtgtggggaggcagctccaacagcttgaccagacctacacctgggccaaaagggcagccaggggctgctcatcacccagtcctggccattttcttgcttgaggctcaagaggcccagggagcaatgggagagggctccatggaggaggtgtcccaagctgcaaatacccccagagaccttttctctcctgtacccccatccctgagtgacttgtgattctgggatggaccctcacagcaggtgcaagagacagagcccccaagcccctgccccaaggggcccacaaaggggagaagggccagccctgcattttcaactcccacagcactggctcaggaagaaaccccaagcagcattcagcacaccccaagggaccaccccatcatatgacatgccaccctctccatgcccaacctgagactg

SEQ ID NO: 5852 - DNA, 696 bp, Macaca Fascicularis
  misc_feature (1)...(696): n = A,T,C or G
cttctcttctcacctgcttgttgagttctgtattgctggggcttnnnnnnnnnnnnnnnnnnnnnnnnnnnnnnnnnnnnnnnnnnnnnnnnnnnnnnnnnnnnnnnnnnnaaagagaatcggaggcaccttgttttcacaactaggataaaagtatctgcaaggtcctttccattcctatttggagggagtcctggctccatggcccccttcccagggaactgtccaagcacataggctcacaccagaaacacactgaaagtgggggccatagaagagcggtatggagtccacggagaagatannnnnnnnnnnnnnnnnnnnnnnnnnnnnnnnnnnnnnnnnnnnnnnaggcggtggtccagctagttcactcctttcaccgggcgcggtcaaggctcccctctctggcagggtgcagcgaacggccagctgggttcnnnnnnnnnnnnnnnnnnnnctttgggggtggagggggtgggtactgannnatttttcatctgttcacacannnnnnnnnnnnntcaaaagcctaaccnnnnnnnnnnnnnnnnnnnnnnnnnnnnnnnnnnnnnggaacaatccagtgtgtccccaagatgtggccacagaccnnnnnnnnnnnnnnnnnnnnnnnnnnnnnnnnnnnnnnnnnnagctctgcatagtacaatttnnnnnaatcaaaggaaatga

SEQ ID NO: 5853 - DNA, 700 bp, Macaca Fascicularis
  misc_feature (1)...(700): n = A,T,C or G
aaacctttacttataactagaataaatcactatttaattgcctctaatactttaaaactactggatggttaggccttgtttaactatctatagagagctatttgcaaacttaagttgtgtaaatgtaatttctacttgtgaatctgagctgtagcagcccagagnnnnnnnnnnnnnnnnncagaccaccaactgataagtgatcatatnnnttgtaatgcaggacctttaacctgttgattatgggtttgttgatataaatgtaataatgttcacctcgattttcctggagtgacaaccagcagttggtagtagcccacctgcatgagtgctgccagtcttaacaatatctttgctctgatcttcttcttccccatttttgtttcctcaaacaggtttttaggagagtggagatttaaagtcaggatgtggactttttattttaattatatacttaattcttagaacaagtagaatgggaaaggagtgactgataaatctaagattcaaaatagtcctgtcgaaacttaaaggccagattattgnnnnnnnnnnnnnnntaggtacctagccatccagtcgttaaacattttcatggatatttgaaaagaagaccatgtacttgtaataactgttcttttctgacttttgctttnnnnnnnnnnnnnttgtttattcaaagaataaaaaggaaagcaca

SEQ ID NO: 5854 - DNA, 705 bp, Macaca Fascicularis
  misc_feature (1)...(705): n = A,T,C or G
gccatggtcaccatcagcaccatgggcatcgtntccatgagcatnnnntactgcccttatgccctgctgggccagtaccatgacatcaagcagtatgtccaccacagccccgggaactccaagcgagggtttggcatagattgcgccatcctgtcctgccaagtgtacatctcacagatcctggtggcctccgctctcgggggcgtggtcgacgcagtggggactgtccgcgtcatccccatggtggcctctgtgggctctttcctgggcttcctgacggccacattcctggtgatctatcctgacgtgtcagaggaggccaaggaggagcagaaaggcctgtcttcccagctggccagcgaaggcggggccggtgggagcagcgaaaagcccaccgcgctaaagctcacgcggaaggagggcctgcagggactggtggagacggagtaccgtggtatgagccacactcccgtttacacacattccaccggcgggcgggcgggcgggcgggcgggtggtggggccaggccacaggcgggagcagagacaccgcggaaccctgcagnnngctgtggcagacccggcagtgcgggccagaacccctccgcccccatagccacgattcagcagtcgtagcgtaggtttgagctactaggcaaaaataccacactaaccactttttcgataataaaaaaatcattgaaa

SEQ ID NO: 5855 - DNA, 696 bp, Macaca Fascicularis
acttcgttttaaatttaaaactaagactaaagaaaactatctttcataactacaaccccccaccctctagcaactatgattttcctctcattctcagccaatcttcatgcaaggagttatctttagtcattgccctcaattcaactaatccatcttaagtgattaatatcaatcactgtgtcacttaatcccagggagaatttttaggatattcttttgcttctttaatgtaatcctattttgctcctaccacatactgaccaccctttctagcttatcatgctttaccttgccattagtggagtttctctaacttcaaaccctaggccctcttcctctaccccgggtagatatcatttatacccatggccttaaggtttatttctgtagtttagactaccgagtaatgtgctactgcaaaaagaccatttggatttcttaaaggtaatttaagaattcagctgtttaaatgctgctccccaactggatttatagtcattatgctcatcagtgtgcaagctcgacacctagcagttatggacacctccagtattaccaagtctagttggctctgtcatcgaactataaacaattttatttcactaattttactagtgcaagatggtctctcgcctagacaacaataagcaacctagttcaactacctttttttgcaaatctgattttccaccatgg

SEQ ID NO: 5856 - DNA, 442 bp, Macaca Fascicularis
  misc_feature (1)...(442): n = A,T,C or G
ctnnnnnnnnnnnnnnnnnnnnnnnnnnnnnnnnnnnnnnnnnnnnnnnngtattgtnnnnactactattaagaaataagagctgcacgagtctgactggcccttgggtggccnnnnnnnnnggctcatnnnnnnnnnnnnnnnnnnnnnnnnnnnnnnnnnnnnnnnnnnnnnaaaagttaacatggggacgtgggtttgatcttttgttgtacctgatgacagtgcagagattctccacagctggataaaaatgtcagaaagctacttactgtacatgggcagtatcagatttcaaatcctaatatttcagctatgcttttaatactcaaaatataaggggatggggtgttgaagctttcccttttttgctttaacaatttatagaatttaacagatgtactgtcttttatgtggcctcacatttaaagttatgagaaca

SEQ ID NO: 5857 - DNA, 8306 bp, Macaca Fascicularis
  misc_feature (1)...(8306): n = A,T,C or G
gaattaccctttctaaaagcatcccacctgagtgtcacaaagatgtgcagctgaaaccaagcctgccttctgtacataaaggaatctgggcaggcagacccctggctcttgggagagaaggtggagagcctgcgccagtaggaactcctggtagcattatgcggctgctgcagtgtgtcttgctgtgtgtttcattatctcttgttttgagtggtcagcataagcctgagacaccaggttattccagtgtgctccattgtgggctgtggagcttccagtttgctgtaaacctcagtcaggaggcaacttctcctcctgtactaataacttggggtaagtttgatgacttgccttgcttagccaagcaatggtgtctcctctaccttcctgccttgatactttccccctctgagcctgtcgcttctttctgctaaaagaaatagtctaagttataactacgtctgatctgaatctgatttccctcttgttcctctaattgacagttgctccttggggtttaatggcaaggctgactgtcctttctggcactggagactgactgctgtctttttacctcttccccacccctccagacaaccaagggctgctgcacaagctacagaatgactctgactgtggcacctggataagaaacggtccaggcagctccgtggtgttggaggcaacctatagcagctgctatgtcactgagtgggtgagtatgacccagtggccagggacactgagtgaagcccctcatgctaccatccgggctgactcccaagggcctgtctctccaggactcccactacatcatgccagttggagttgaaggagtgggtgtggctgaacacaagatggttccagagaggaagctgctcaagtgtcctatggatcttctaggtaaaggctggaagctctcaggatctgggaggggtgaaagtgctcttagtcctctctgaccggttctgtgcagtgacacctgacactaacgaaggatcatgtcccaactctcacctccatgggcaatccttagaataactaccaattgagattcctcaatgccgaggcactgtgggtgtaagcacttcaggtgttaccttccctaatcctaacctagtgctgcaaacactactgctggccaggtcgannnnnnnnnnnnnnnnnnnnnnnnnnnnnnnnnnnnnnnnnnnnnnnnnnnnnnnnnnnnnnnnnnnnnnnnnnnnnnnnnnnnnnnnnnnnnnnnnnnnnnnnnnnnnnnnnnnnnnnnnnnnnnnnnnnnnnnnnnnnnnnnnnnnnnnnnnnnnnnnnnnnnnnnnnnnnnnnnnnnnnnnnnnnnnnnnnnnnnnnnnnnnnnnnnnnnnnnnnnnnnnnnnnnnnnnnnnnnnnnnnnnnnnnnnagagtagaactccgtttccaaaaaaaaaaaaaaaaaaaacccaacctatctcttccaggaagtttccgaagggcctatcactggtgagtgagtgagctgggattcaaagaactcccagaaccaggagtttttcaccatggggagaatgataggaaagaaaactgaagctagtaagggaacttggaacaacacctccacggagatagatgtgcactgagactaggacccaggtctcccatcccaccagctggaggggtatctgatcatttccctaaggaaacagtaggaagtatgatgcctactcaacttcagaaagtctcgcctgactgagagcccatcctcaagtcagaacagactcaaactttcaattccctcttctcacctgccttccttcccaatacatagccaggatcagcagcactaataaaatgaggactcacaggtcctaccccagttctgaaccagacctgaactcaaaaacaatcttcagataactcatatccaaactaagacttgagaaatgcctctacagaacagaaggattgctacttgaaggagtaagaagcccctactgcttctacgaatcttgttggcattcttttatttttaaaaaaaaactgtcagggcactcttacaaggtgacttaatgttgacaggcctcccaagacttaatctacagcatgtaaccggctcaagactgtatctacaaatatggaatagatacacctatttcaatcatgtacacatctacaggaatccaaagtcaatgacttgtatcaaaatggtattcaagactaacttttccattacctaacctgacttactctttttcaaaacccagcccgagatgctccagatactgactggtgtgactccatcccagcgcgggacaggctgccatgtgcaccttcacccatctctcgaggagactgtgaggggctaggctgctgttacagctctgaggaggtgaattcctgctactacggaaacaccggtgagtaattgagcacacctctgaaaccagctgaggaagtgtgccaattacagtgaaatctggagaggggtttgctcagaaagcaaacgtaagtgatagcaggctgccatgtagccacgcatccaagaacactggatcccaaagtaacagacctttctacagcttccactgtccgttctccccgaatccagatataaagccaataacacttagacttgaaggctatgtgccagataattgctagtgccagatactgctaattgacagaaacttaacttttctccaaggaatagtgactttggctgatactctgggattgtttagggagcctcacttcaaggctgttgctttctgcgtgtttcaaatcctgctctgaggttttctaacataaattcaacctcagagtattatgggttcctgcagaaataatcacagcatttgccacaatggcaaaagccgggattacttctgcaccaacctaatacattgcacactctattctaagatcttaatcttaactgacaagcaaaatgaggtaggagctactatccccctcttaaataaaactgaaggaggcgcaataccttgcctgaggtcgcacaataagttggggaggcaagactcaaccccaggaggtaatttagagcctgggttaaactgggtggctgatcttgcactgaggtcatcagctgggaacacccagcttctcagtgggattaaaagtggttagactttcatctggttctccccttaatgggagagatgacctgccttcagcacagctgctctgtttcagtgaccttgcgttgtacccgagagggccatttctccatcgctgtgtctcggaacgtggcctcgccaccactgctcttggattctgtgcgcttggcccttaggaatgacagtgcgtgtaaccctgtgatggcaacacaagcttttgttctgttccagtttccatttacttcctgtggcaccacaagacgggtgagccgttgggctttgtttctggctctggaagtcgggtgggaacgtcgtagtgactagtgggggagggctgaaatacgctggccatgaaggatacttgtgactactgcttagtttgggagagtctctagggcaggtgaacgcctcatcactgaaaaagttaatctcttctgggtgttcagctaagagcatcacagctgtgatctagctaagaggctgtcatttaccaagccatagagaagaaaccagcagggatgctgactggaattggtagtgcttcagctgcctcttctaggtactcaaattccccttccaattcctttgtcctgaaataaggcaaagtgataacttgccaggatgtcactgctatgtgttctcgcctctgctgaaggaataggaaatgtaaacatcaccggggtagcattgctgaggacttagaccagatggagtcaaacagcgtaagcctaacagaaatggtcaagatttctccatctgttcctgtagatcactggagaccgagcagtatacgaaaatgaactggtggcaactagggatgtgaaaaatgggagccgtggctctgtcactcgtgacagcatcttcaggtaagggcttgcgtaacctgaccctgcttgaccagaatgacttcccctcttccgtaaagtggcattctcggtaagccctgaatccacaaatgagcactcctcagtactgggagaacctgtctgctaccttggttcaccaatctcactgcccattacttaagtccatctgtgttgctgtctccaaccgacctaagtctcaagctcacctggagttctgctattttcacttaacgatttttttctcattttggccttctccattctacattttagcctacatttctccattttacatcttggccttctccattgtccatgctatggcccaaagaattcctctaaaaccttaggtctatcatatcacacaccttaaagccatggaaaaaacaaagctttaagatgaacatcgggaccctgcataaaacagctcctacttcatctccagcctgttcactctgaacattctcagtccctcactccctgttccctgattgcagcctggtctttatggactctcaaagggcctcaagcacttccttgcctccagactttgctctatattgggtgaggctctccatctacctcaagtttattttctttcaccttcatatcaagatacctctaaactcttccctgatctgctctacagtaggtatctgtttgtcatgatgcatctttatttctgtgtgcttatctccaattcaaacattggtcctacttgcagctaaaatacagctcccagcaggcggaaccacatccatcatacttataaacttgtctagcacttaatgtttttccttgagttaaaaagaaaggatgtgtataactgacacctgcctctcccacaaccaactagctaaaatcttgtttctctgcaggctccatgtcagctgcagctactcagtaagtagcaactctctcccaatcaaggtccaggtttttactctcccaccaccctttcctgagacccagcctggacccctcactctggaacttcagattgccaaaggtatgacccccttggctggagtatctggcatatagtctaaatccagtcttctgggggcatgaagaccctaacttagtaacaagacacttaagcggcttggggctatctaaggggatgagagtccctcaagtcactgagaggttactactttaaatccttatttctgcctcttgcagataaaaactatggctcctactatggtgttggtgactaccccgtggtgaagttgcttcgggatcccatctatgtggaggtctccatccttcacagaacagacccctccctggggctgctcctacatcagtgttgggcaacacccagcacagacccactgagtcagccacagtggcccatcctggtaaaggggtaagtggttctttcatgcaccggtgctgagactctcaaacccatcctgactgccgggtctcttggtctagctgcccctacattggagacaactatcagacccagctgatccctgtccagaaagccttggatcttccatttccctctcactaccagcgcttcagcatcttcaccttcagctttgtggaccctacagcggagaaacaggccctcaggggaccggtagatgttcccttccatgaccctcaccaggctctgaacctccccgaacttacaactgtttccatgtcctatgactctgcagccaaggaagccctttaatgctggctgttggtactcggagcaacccttgttaccaatcacatgagtggcatctgtcagttggactccagttccttagtgctattgtgatatcaacttttggaccatatcaattttccaataactttcctgaacctcttcctggggagacaaagcaggtttagagacacgtagcatggtgatactacaaatgatctgaattctgttggctcccaggtgcatctgcactgcagtgtgtcagtctgccagcctgctgagacaccatcctgtgcggtaacctgtcctgatctcagtcgtgagtatctaagctgattgtatgttagaggacagacttggatgaatcttgagtctcatgtctaacctttcctagtctctagctaaacaactcaaactgaagattcgtcttactaaggcttctctaattacttgcagtgccacagaacaaatctgactagcttcccagaatcccatgtctaagataagctataaatgtttgggtaaccctcatccttagctttttccatatgaacttgaattcatgcacaaaccaaggcagtttatggccatcttatgtctcattttaacaagatacacctggatagtaaacatgtctatacctgcttgacaggtctggcaatgcagcctaaagatctataagtagaatgagtggacctagaatgtggtctctagttggttgtggccaatgcttctaagtcaatgtgtctgtatgtctacctgattcaacctgtacttgtctagcctctgagctggcattcatgacctctgaagctttaagtcccttctagcaaaactcatagtaactaaatggtgcttattatgccaagtacaacattaaatactttaacatctccaaaaatgcatattatccctacttctaaagaatgaaccaccttagattaaggtcctacaactggcaaaagaaggagaattaaaacagttctacactgtttcttttttgagaccagttcttgctctgtcatgcaggctggaatgcaatgtcatgagtatagttcatggtagcctcaacctcctgagctcaagtgatccgcctagttcggcctcccaagtaactaagacttataggcatattccactatacccagcttatcttttttgagagggagtttttcttttttnnnnnnnnnnnnnnnnnnnnnnnnnnnnnnnnnnnnnnnnnnnnnnnnnnnnnnnnnnnnnnnnnnnnnnnnnnnnnnnnnnnnnnnnnnnnnnnnnnnnnnnnnnnnnnnnnnnnnnnnnnnnnnnnnnnnnnnnnnnnnnnnnnnnnnnnnnnnnnnnnnnnnnnnnnnnnnnnnnnnnnnnnnnctgacttcaggcgatccacccatctcggcctcccaatgttgggattacagtcgtgaggcaccacacccggcctttttttttttttttttcttaatagagatggaccttgctatgttgcttgggctgttctcaaactccagaaatatttttcctcctcacagtccacctgcatgtctttgtttcccattcttccacttgccatctttcttaatacgacatggaatacagaaaacataaaactgtttttatatttcaggtgaatcaaattgttttttcatttgaaaaccagaactaaactcattaaatttctctgcacctcagcctccaagttctgttctagttacctttgaatcacagggaaagatctctgaattataaacatgttactgtcaaaggactctgtttagaaaagcatggaagttcagggatagtttctaagcaaagtcctggtgaaactaaggtaatggcatcagatacaaaatctgaattgttcaagtatgtattaatacacttaatgaggttttttttaaggcatagaaccaagctttatagagacttggccttgtaccaaaacattttctatccctgctctatgggtgcaaaaactaatgaattactaggtctcatttctctaacaggaagaaattcaggcaccatttttcagaacactactgctagtgtttctagcaaaggccccatgattctactccaagccactaaggaccctccagaaaagctccgtaagtatccaagagggaggagatctaactagtgaaccaaactaccagtcaaaccgaattcttcctttcctaccccttttgttctagtcaaaagaaattgactttcctatagcagaagactgctagtctttgtttggacaccaaatcatttggttttagcatacattaatctacctttccatcctccaggtgctcctgtagactcaaaagttctgtgggtggcaggcctttctgggaccttaatccttggaggcttattagtatcctacttggctatcaaacagctgaattgtccagaccaaacatgtcaataaaaccagactgtattcccagcctgtgctgagcttctcatttgaaaggtaaaaggttactttcagactagttcatctcttcatgtcattttatctcttaagcttggcaatataactcagcatagaataaaaactgatacaaaaatttcagactagcagaggtcttaggtcagacacgggaataaaattcttccataagatcaaggaaactagggcaaactaactatgaatctag

SEQ ID NO: 5858 - DNA, 1640 bp, Macaca Fascicularis
  misc_feature (1)...(1640): n = A,T,C or G
atgcgaccaaatgatgtaccnnnnnnnnnnnnnnnnnntgatcttttgtggtctgaccccgataaagatgtcttaggctggggtgaaaatgacagaggagtgtccttcacatttggtgcagaagtggttnnnnnnnnnnnnnntaagcatgatttggatcttatatgtagagcnnnnnnnnnnnnnnnagatggatatgaattttttgcaaagaggcagttggtcactctgttttctgcgcccaattattgtggagagtttgacaatgcaggtgccatgatgagtgtggatgaaacactaatgtgttcttttcagattttaaagcctgcagagaaaaagaagccaaatgccacgagacctgtaacgcctccaaggggtatgatcacaaagcaagcaaagaaatagatgtcattttgacactgcctagttgggacttgtaacatagagtatataaccttcatttttaagactgtaatgtgtactggtcagcttgctcagatagatctgtgtttgtgggggcccttccttccgtttttgatttagtgaatggcatttgctggttataacagcaaatgagagactcttcactccaaaaagaaaagtgttttgttttttaattctctcttccttttgcaaacaattttaatgatggtgttaaagctgtacaccccaggacagtttatcctgtctaaggagtaagtgtacagttgatctttttaaattcagtacaacccataatcatgtaaatgctcgttttcttagacataaagagccctaggtgctccaagtctgtacatgttcttgtcataaaatgcatactgttgatacaaaccactgtgaacattttttatttgataattttgtttcaaagggattgctttttcctctcattgtcttgttatgtacaaactagtttttatagctatcaacattaggagtaactttcaaccttgccagcatcactggtatgatgtatatttaattaaagcacacttttcnnnnnnnnnnnnnnnnnnnnnnnnnnnnnnnnnnnnnnnnnnnnnnnnnnnnnnnnnnnnnnnnnnnnnnnnnnnnnnnnnnnnnnnnnnttggcacacccctaagtacaaggtggtatggttgtgtacacatgctgccttctcggggattcaaaaacaggtttttgattttgaatagcaattagtgatatagtgctgtttaagctactaatgattaaaggtaataacattttgtacaatttccatatagtctattcattaagtaatctttttacagttgcatcaggcctgaacccgtccattcagaaagcttcaaattatagaaacaatactgttctatacgagtgaccgattatgctttctttggcctacattctttattctgcggtgaagttgaggcttataagttaaaacaaaggaactaacttactgtccaccagtttatacagaactcacagtatctatgactttttttaaactaagatctgttaaaaaagaaatctgtttcagcagatgaccgtgtacaataccatgtggtgaaaatgaattcagacttattaaatgatgaacttgttaaatcctctcagtgtctatttatcagcacaatacacacaggagaactgttgatggcatatgaataga

SEQ ID NO: 5859 - DNA, 968 bp, Macaca Fascicularis
  misc_feature (1)...(968): n = A,T,C or G
cttatgtgacaaaccccgactgtcactgcgccggccggccctcgaggacctgnncctaggttcagaagcgaacctcacgtgcannnnnnnnnnnnnnngaaatccctcgggtgccaccttcacctggacgccctcaaatgggaagaacgctgtccaacagtcacctaagcgtgacccctgtggctgctacagtgtgtccagtgtcctgcccggctgtgccgagccatggaacaatagggtgaccttcacctgcactgctgagcaccctgagttggagacccaactaactgccaccatctcaaaacccggaaacacgttccggcccgaggtccacctgctgccgccgccgtcggaggagctggccctgaacgagctggtgacgctgacgtgcctggcacgcggcttcagccccgaggatgtgctggttcgctggctgaagggaacagaacagctgccccgtgacaagtacctgacttgggaatcccggaaggagcccagccagggcaccaccaccttcgccgtgaccagcatactacgcgtggcagccgaggactggaagaagggggacaccttctcctgcatggtgggccacgaggccctgccgctggccttcacacagaagaccatcgaccgcctggcgggctcaccctgcgacacagattggctatgctgcctccctatgtggtgctggacttgccgcaggagaccctggaggaggagacccctggtgccaacctgtggcccaccaccatcaccttcctcaccctcttcctgctgagcctgttctatagcacagcactgaccgtgaccagcgtccggggtccatctggcaacagggagggcccccagtactgagcgagagccagcaaggcacagggaggaagtgtggaggaacctcttggagaagccagctatnnnnnnnnnnnnnnnnncctttcagaaatcacctacccgcccttactcacatc

SEQ ID NO: 5860 - DNA, 425 bp, Macaca Fascicularis
  misc_feature (1)...(425): n = A,T,C or G
acatatagttgtatattttgcccaatttcttctcagtgataacgtttcacacatatcacaatcaggatgttgacatcaaaacagcccactgattttattcacatttccccagctttactttccccaatgtatactcctccatatgtgcatgtgtgtgtagaaatatggaacgcagctgggcacannnnnnnnnnnnnnnnnnnnnnnnnnnnnnnnnnnnnnnnnnnnnnnnnnnnnnnnnnnnnnnnnnnnnnnnnnnnnnnnnnnnnnnnnnnnnnnnnnnnnnnnnnnnnnnnnnnnnnnnnnnnnnnnnnnnnnnnnnnnnnnnnnnnnnnnnnnnnnnnnnnnnnnnnnnnnnnnnnnnnnnnnnnnnnnnnnnnnnnnnnnnnnnngctgcagtgagccatgatagcaccactgcactc

SEQ ID NO: 5861 - DNA, 728 bp, Macaca Fascicularis
  misc_feature (1)...(728): n = A,T,C or G
tcaaggaagaagtactgaaatgattnncttttgaaataaatgaannnnnnnnnnnnnnnnnnggattttttattaaatatattttacgaagagaattgcagtagatatataaattaaaacttttttcnnnnnnnnnnnnnnnaggtttaaaaagattgtttttgtttttttgtttcttcctttcttctggagaaatgatctaccagtcaaggcaatatgtagccgatccctgggaattaaaggtttgcccatttgttcactgcgtttagtccctgctgccttccaggcattgtactaagtatggggaactacatggaaaacagtccctcagaaactgctgcagtgcttttgcttatccctacctaaaaaaccgtcaatgtgaaataatttccttggttataactatacatgataatggattagtttatataaacctatgtttagacaagttcaaaacaagcatgtctttctataaaaagctttgaaaatgaaggaaatgagatcatgtttcaatttattaaagcggggaagagcgttctgtggttagttcgtgtctannnnnnnnnnnnnnnnnnnnnnnnnnnnnnnagcaaacatgtagcaatcggttctctcattgtgatggtagaagctcatgtaaaatggtagtcattaatgaggaagtatgaagtggtacttattctgtaagtnnnnnnnnnnnnnngtgttaatatattatcatatgccga

SEQ ID NO: 5862 - DNA, 744 bp, Macaca Fascicularis
  misc_feature (1)...(744): n = A,T,C or G
actgnnnnnnnnnnnnnnnngatggttgggtcagctgtgggctgttctaagcacctggcagctagacatgggtttattaactaaaggaaatcataaaggtctattgttctctgagaggactggggctcagaacatgtctacatttccccaaatgccttttcttaggattgacttggcatcaattgagaggaaagcattctatatacttaatcctttggaggaagggaaaggagaataatagttccaacactagaggttggctttttaaccataacttactcctcctctcaatgtattgggttgaaccttacaagattgctgttttnnnnnnnnnnnnnnnnnnnnnnnnnnnnnnnnnnnngtagaatttgtgtggcaggattgctttaaatgcgcaacagcgcttgcagtagagccttacagctcatactgtatcctaaaaatgtgagactgggtctagaaggttgtgagccagaataatgaagtacaaaaagccttttctgtatatgnnnnnnnnnnnnnnnnnnnnnnnnnnnnnnaagaagtgtcctagttggagagcttacctctctatcaccttcttcaagcgcactagttcctgtctatgctcannnnnnnnnnnnnnnnnnnnnnnnnnnnnnnnnggaagagnnnnnnnnnnnnnnnnnnnnntcctgtggatttnnnnnnnnnnnnnnnnnnnnnnnnnnnnnnctggaaggactcatgtacagaacaaatggg

SEQ ID NO: 5863 - DNA, 2247 bp, Macaca Fascicularis
gacttgctaccccaagttaattctagtaatccatccacttccctgtccagcttccctgtaagtgcgccccacacacccatgcagtcctccatgtgccctttcatgtgcgcctcgtctgcttctccatccccctcatccatactccagtcactttcctgtctcctcccctgtcaccccctatccatactcccatctattctcttttttctcttacttactggaccccactgagctgagtgatgtgctcctggagggcctgtggatttaaatgtgtaaggaaaatatgcttatagagacaaagctgaggcttttgtgtggcaatcccagttcttccctagggggtctgtggccagctgcagaagttctggtttaggattctgttttgctttacaacagctgaaaacagcatttattttctaaccaccaaatttattcacacaagagactatacttcccaggcagaaatactgggttttaggtctgcttccattttcccactgtcctttagctccttcccaaatccctcatgggttggtcctctcccgaagaaagagatcctgctttcacaatgacttgcaataaaaagaggccacagccctttgccacagctgcaagttgctgtttcacttccatgttgttgaaatgaatccagtccaggatgatgattaaaatattcagatgatcatgtggcattttaaggctatcatttgtggtccatgccaaaactttaagggaagcaagtcttaacagggatcgctagccacacagcaagtttccaggcattgctaggggttatgttttgccttttggtttgtttctttctctcattttttcttctttctttgtttcctttttctctttcacaaaaaaagtatcctccttttttttaattttagaaaaagtctgtttttaaggaaaaaaatggaagaggtagtaactgcttttcaattcctagattttattggaagagacagcttcttattaggacccctctttaatcctccagcacagcctgtgcgaagtcacctgagcctcatgcagatttgaatgacgagataaatgaagctggtatattttaaacccaagcatgctgacatatgttcgcctccctttcagacgtctcaggaatgtctaaggtcatgatatctcttggatgagatcctgtttgtgttttttaaatacaaaaggaaacattatcacatttcaacccaagccaatgggacaaggtgcaaaacattttcttcattaaatatcccttttataaatacagcctcaagttttaaaggaataagctgtttgaggaaaagtgaagtttgaaaatatatgaagtagttctcgttgacagactgagcttatggaaactagtctgggtaaaagcagtcagaagtgatcaatatattacacgggcctttgagcaagtcgcccaagatcaaagcttcttcatactgcagcgagaaataaaaatagtccttttacgcaactgcacacacatcaagaattcaacccccaactgctgatgctttctactttttaaatatagaaatctgcaaacctaacctggagatggcagttagttcaatagagggctcagaaatctctgtcttgttccacttgtagctattggcgtattggggtgttgctgttggaagacttgggcaatgttgtcattgctcagcttgcaagggagtgcaggctttaagtgtcttcagcacattctcataatattacgtaaagccctaatgtagtgggttggttttttttccttgagcatgtaacatcttctatcttttggataaattaacacctttgttactttcattgagccattcccagtgaattaaagccaattcagagtcacaaatattacaagacaatagtagtaggcacagtgggaaatatatgaatgaatgataattgtctctgtttcagaaaccccacaagtaagacaagtatggatttaaataaccataaacaagattgtgtcaatgctagaatgagtcaaaatgtgttgcagaagcagagaagggagaaataaatgccagcttgtcagggtaggggtgtcaaggaagtcttcaggaggagggaggagtctttaaaggataggtgagtttaattattagataaggtttattttttagcgtggtggcatgggcctgtaataccagcttcttgggaggctgaggcacaagaattgtttgaactgggtgacagagcaagattctgtctcaaaaaaaaaaaaaaaaaaaa

SEQ ID NO: 5864 - DNA, 677 bp, Macaca Fascicularis
  misc_feature (1)...(677): n = A,T,C or G
agttatactggaaaatttcataatcctgggatataggtaccattgcccactatgactaacaatttgaaaaaagataaaaatttctnnnnnnnnnnnnnnnnntcccaannnnnnnnnnnnnnnnnnnnnnnnnnnnnnnnnnnnnnnacaaagtcatttcgttcactttgggagaggcctataattacgtttatttgcaatgtttctcttcgctagattgttacatagctcctgttctactgattttgcttaccacatatggtaaccaaggttagatgcgagttaaaattccttagaaactggatgagccttgagattgcttcttacctgggacaggacatttttctagctcttatcaagaataacaacttccacttttttttaaactgcacttttgactttttttatggtatataaacaataatttataaacataatataaatgctcattgtgtttttttagacttttgatattatttgatactgtacaaactttattaaatcaagatgaaagacctacaggacagattcctttnnnnnnnnnnnnnnnnnnnnnnnnnnnnnnnnntgctgtgttnnnnnnnnnnnnnnnnnnnnnnnnnnnnnnnnnnnnnnnnnnnnnnntaagctctttctttccttttgttactgtatttagtttgtgataaatttttcac

SEQ ID NO: 5865 - DNA, 715 bp, Macaca Fascicularis
  misc_feature (1)...(715): n = A,T,C or G
acccaccacacctgcctacataccatgatttaaagtgncagctgtttcctattgcttgtaactcagttgtttttccaatggtaaccaatttctgttttaaactgaaaggtgcatgaggggtgagttcttgtattagtctgttttgtgtcactataaaggaacacctaaggctgggtaatttataaagaaaggattaattggctcatggttctgcaggatgtacagccatggcaccagcatctgcatggcttttggtgggacctcaggaagcttgcaatcatgatggaacatgaaggaaacgctggcatatcacatggcaagacaggaagcaagcgagagaaaggggaagtgtcacacaatgttttttttttttttttgnnnnnnnnnnnnnnnnnnnnnnnnnnnnnnnnnnnnnnnnnnnnnnnnnnnnnnnnnnnnnnnnnnnnnnnnnnnnnnnnnnnnnnnnnnnnnnnnnnnnnnnnnnnnnnnnnnnnnnnnnnnnnnnnnnnnnnnnnnnnnnnnnnnnnnnnnnnnnnnnnnnnnnnnnnnnnntgttagccaggatggtctcgatctcctgacttcatgatccacctgcctcggcctcccaaactgctgggattacaggtgtgatctgtaatcgcacccaccaattgtaagcttctagagaacctcccaagaagcagattcggaagccatgctcgtatagccctca

SEQ ID NO: 5866 - DNA, 771 bp, Macaca Fascicularis
  misc_feature (1)...(771): n = A,T,C or G
aaactacataaggaaataaggaagaagaaaatctgtgagctctatgccaaagtgttgggatcccaagaagctttacnnnnagtacactatgaagagaagaactggtgtgaggagcagtactctgggggctgctacacggcgtacttccctcctgggatcatgactcaatatggaagggtgattnnnnnnnnnnnnnnnnnnnnnnnnttcgcgggtacagagactgccacaaagtggagcggctacatggaaggggcagttgaggctggagaacgagcagctagggaggtcttaaatggtctcgggaaggtgaacgagaaagacatctgggtacaagaacctgaatcaaaggacgttccagcggtagaaatcactcacaccttctgggagaggaacctgcnnnnnnnnnnnnnnnnnnnnnagatcattggattttccacatcagtaactgccctgggattcgtggtgtacaaatacaagctcctgccacggtcttgaagttttattcctatgctctctactcattgattttcaatatcaccaaaggaaaatattgacaaatttaaaggctgtgtcactgggccatttttaagtgtactggatttaactacctttggnnnnnnnnnnnnnnnnnnnnnagtaaaaacaattcaacgaatcgcctaattaatttcagtaagatcaagctccatcttctttgtctgtgtaaaccaactcatgtgaattgatagaataaagccttgtgatcactttctgagatcaaaaagtaaa

SEQ ID NO: 5867 - DNA, 1977 bp, Macaca Fascicularis
  misc_feature (1)...(1977): n = A,T,C or G
caggataagtaatgctcaacttacataaccaagtaagacgtataccatcttaacagctggcaccaaaagtcatcttaggaaaggaactttgtcaaaatatcttcataagcctttgtggaagatgtgactctgacagcagaggtgtcaacaggagaccaagctataaagggagaaggttagatggtctagatatgaaaattataggaatttttgttttgcttccaaaaaggaaggaaataagaggtgaatggagaaggtagggaggggagagaagagccagagaggtagggtgaggtgaggatacttgtgctggacagccaggtaaaattcttccacaggttatagaagggtatttaaaaaatgggacatacattgttaatttaaaattgtttacattaccttgatttaaagtctaccaaagaaactaatttcagtaaagtctaccacaaattaatactagaaatgaatgttttgtatcctatctggattaccatgaggaaaaccagaaatacataactagaagtagaagagaattcaagaatgtaagccaccctagcattctcagaaatctgggcaacttgagggtctatgaccatttttcaggggatctcgagagattggcagtaccagttgacatgtggattgtgtttagttgaaatatcctctttttagttgaaagtccacttacattcactgtaccaagaaatcgtttcaatttcagcatgatttagatacgtttgaaagggacaaactgaagatattacgatgtttgaggattaaggtgatgaaggactgttaggcatatttgaaacataccccttaactgttaagattgacaccagtagtaagaagtttcctccattagataatactggcttgaataaaccagaggcttgctgtgatggatcatttctgaatcttatttgcgtttagtagacattatttcttagagcagtttgtggttcactgtaaaaccgggcagaaattaaaagacttcccatacaccctagtccccatacgtgtaaacctccctcccatcaatatcccatgctccagtagtaatatttttgttaaaattgatgaacttaatattgatacatcgttatcacccacattccatagtttacattagtgttcactattgctgaatttttgtttttacctacaaacttattaccttgatagtgttaccatcaagccagcgctcaccaaactggggtctttacctttttagtgccctgaaactagtatgcaaaactgacagtgaatgcttaggctttatttgatggccatgaaattgagaagcagaagcttggatcacaaataaacttctcagtctgtaagagtcagaacttcacagatatagggcatctttaatgaaggggctgggctttaaaagaaaggggaggaatatttgtcttttctgggaataagcagagaacttcttggaaccaattgccaccttcctttttgtcacttaatggcttcttctggttgttgtcatgattgtaaactgtcatggcagtggcaggagtatcatgtagtatgaataatagattataatgaagttagaggttcttcagaggtcaagtgagccatcatcctggagcctaccagtcttagccagtttggtcatgagggggagcttttgacctcaggcatcctgtttcctaaagatatacagagttggctgggtgtggtgactcccagcactttgggaggtcgaggcaggtgaatcacgaggtcaggagttcgagactagtctagccaacacggtgaaaccctatctactgaaaaatacaaaagttagctagctgggcttgacagcacgtnnnnnnnnnnnnnnnnnnnnnnnnnnnnnnnnnnnnnnnnnnnnnnnnnnnnnnnnnnnnnnnnnnnnnnnnnnnnnnnnnnnnnnnnnnnnnnnnnnnnnnnnnnnnnnnnnnnnnnnnnnnnncaaaaaaaaaaaaaaaaaaa

SEQ ID NO: 5868 - DNA, 643 bp, Macaca Fascicularis
  misc_feature (1)...(643): n = A,T,C or G
caccagcttcntgaagagcatttctgtcttcaccaccttctgtcttgagccctagcctgaggataaaggctgagcctggccatcccagattccaactgcctccctgttccaggctccataggggcatactggcttcccagccaacagggaggctcctgggctaaggaagctcagctatattttgtttttcatttcttttcttttgtttttgagagaaggtattgctctgtcatctaggctggagtgcagtggtgcgattgatcatggctcactgcaacctctgcctcccaggctcgatcctcccatgtaagcctcccaagtagctgggactacatgcacatgacactgtgccccacctaatttttttattttgtagataataagctggtcagggctggtcttgaactcctgagctcaagtgatcttccacgccttggcatcccaaagtgttgagatttacaggtgtgagccaccacaccaggccagagctatattttcaaagactgctggccccaggcacactcctcatcaattatcaggatgcagggacagaaactttccaacagggctcagtagggtcaagccgacccagacgtggacaatgggatgctccaggacgtctagggtaccagtgtgctcagat

SEQ ID NO: 5869 - DNA, 756 bp, Macaca Fascicularis
  misc_feature (1)...(756): n = A,T,C or G
tggggcttgggtgggggtggggtgaattctctgttnnnaggatgtgcttggtgttttgaatctaggctttagtgactgatgctggttaatttctagggttaatggtttattgggccttgtgttgtatgagatggaattttaaatatttttaaatgtttctctagttcttagagaaatttttaaacaactcaagataggttcttcccacatatgataatctgtcaggtgaatttggattattttatatcacaaaatgaatgcatgttttgggaagtaatggtatcagactatatggtccaggtcttggtaaaaacccaataaatctttnnnnnnnnnaagacatctctgtgttcaaacatcgtgtgtttcttatttgccagagtaggaaaagagtagatctttttgctctctaaatgtattgatgggttgtgtggggtttttttccgcctactaataaatattacattgtaacattcttccctcaacttcaaaactgctgaaatgaaacaatatgcataaaagaaannnnnnnnnnnnnnnnnnnnnnntgttttctccctctgattttgaatggcacttgaggatgcagttcgtaaatcctattgcctattcccgtcatgaacattgtgaaatgaaacctttggacaatctgccgcattgnnnnnnngactggcctgcgtgaggcaagggtatggttcccaaagcacccagtggtaaatcctaacttattgttctcttaaaattccaatgtaacaa

SEQ ID NO: 5870 - DNA, 757 bp, Macaca Fascicularis
  misc_feature (1)...(757): n = A,T,C or G
acagatgtaaatacnntatagaanncatagaannnnnnnnnnnnnnnnnnnnagactagctattgtgactcaactacannnnncctggatatggatgatgccaataaaaaattattattttccctttggaaaacttgtgaacatgtgaatacacatgtgaacagtcttatatttgaaaaatcaatgttctacaacctggaaagttttcattttctgtnnnnnnnnnnnnnnnnnnncagtggcattgtagttgtccgttatctttgggttgcagtgctagatactgttttaaattattttcattttaaacaagatgccttctaagctattgagcttaatattaaaaataagaattttacaacatgtttacttagttggagcaaaaataagtctattttaacaaatagctttgtttttgcatgctaatgtcagaaaggcccatgatgcacattatgctctgttttaaaggttttaccatccttgtaaaaactataatcttaaatggttttatttnnnnnnnnnnnnnnnnnactacataaacttaaaacattttttcctaaatggtacaaatttataaactatcatttttcacttatggtatctgtaaatactacactacaaannnnnnnnnnnnnnnnnnnnnnnnnnnatttatttatgatattgaaaatttctacagtaaaaactcaaaaccacgcaaaaaacgtttgtaagatacatggtatctattggagcaaaggcttttttgtaactaatt

SEQ ID NO: 5871 - DNA, 682 bp, Macaca Fascicularis
  misc_feature (1)...(682): n = A,T,C or G
gttatgtttttggtgtctcctctccannnnntggtttggggaaacatgttttcctagcccnnnnnnnnnnnnnnnnnnnnnnnnnnnnnccctgagctgtagctacacttaaaaagaaaaactccaaacatgcacacttcctcagatgcttcaggaacttgtcaggtaggggaagatggcatgtcagctgtaggggaagatggcatccggccttgatatctcggggagggcacaggagggctgaggagccgtgcagtgggaggtggtcctgtgagttccacagggactgtcctaggcacgcattgatctgtctgcttgtttcatgtctgcttttctttccacgtggannnnnnnnnnnnnnnnccacagtgatgctttatggtagaggtctctgtaatgcaataaattgtccagggataataaccaagcttttgtgatcaggcannnnnnnnnnnnnnnnnttgctttttctccttgatttccttccatcgtgtttcttttagcatctgactcgcttcttccatgatctcctaagttccaaggnnnnnnnnnnnnnnnnnnnnnnnnnnnnnnnnnnnnnnnnnnnnnnnnnnnnatgttccctttgtgccaagcctctggggacaaccaatggcccgccaggctggaagaccaaagttctcaggctctgaattggtggagg

SEQ ID NO: 5872 - DNA, 248 bp, Macaca Fascicularis
gtaccagtttaagggcatgtgctacttcaccaacgggacggagcgcgtgcgtcgtgtgaccagatacatctataaccgagaggagtacgtgcgcttcgacagcgacgtgggggagtaccgggcggtgacgccgctggggcggcctgacgccgagtactggaacagccagaaggacatcctggagaggacccgggcggagttggacacggtgtgcagacacaactaccagttggagctccgcacgatcg

SEQ ID NO: 5873 - DNA, 743 bp, Macaca Fascicularis
  misc_feature (1)...(743): n = A,T,C or G
tatggtcactgtatctaagttgcatgcttcctgattccctcaaaccccagcatgcagatttagaaaactgtgctgagagctatttccctatttcctgggtagtttaattaaaattttagctccaaagacaaaaacgcactggtccttcattttaaaatgtttattatggttagtctccagatcccaggagacagagattaagcgtggcccctgaagatgtgggcattgctaatctacaatgaggaaagtgtgattgccaggcaaggaagatgcaaaagacacaaggatgcaccctgaggcagggaggaatgataaaataaaatggtagtagcaattcccaaggtgtagcaagctaaatattgtgcattttttgtgaagagtaaagtgcctttgtatgatgaatgggtccaggggagtctgctcccttcctgtctgtggaaacagcaggctgagtcaccatgacagcctgctaattaaannnnnnnnnnnnnnntgaggattagaagacggggagaggcagggaggctccagggaggaaaagcccttagcacaaagctccactaaagcattttttgtttgtttgtttgtttgggttggagattattgaagtttgctacaaaaatcaaaagcaaaacttgttctcctttgcatgctggttttcagaaataataacaaagagccatatgctgattggctacaaatgtcatgttgtacatacagcctctcccctgggttcgtttgcc

SEQ ID NO: 5874 - DNA, 626 bp, Macaca Fascicularis
  misc_feature (1)...(626): n = A,T,C or G
gtggcactgcttgaggaggggcacttgctaccaccaggggatgaggaagtgggggctgctggcccagggtaggggagggtggggcaatggggagaagcnnntgcggtttattgtaatatatgggattagattcatctatggagggcagagtgggctgcctggggattgggaggggcagggcttggggggcaggcctctggcagagaaggatgtccgttccaggagcacacggccctgccccatcctgggccttacctcccctgccagggctcgggcgctctggctcctgccttgatgaagcccgtgtcctgccttgatgaagcctgtgccacctgcaagtgcccaccctgcccctgccccaacccccaccgaaaagccgtgagctcaggctgagcccagccacctcccaaggactttctagtgaggaaatggcaacacgtggaggtgaagaccccgttctcagctccgtcatttgcgggactttgggtggctcctgccactgacctcaccggcatgctggcctgtggcaggcctaggacctcagtggggaggaggagctgccgcaaggccctgtcccagcaggagggaggcttcctgactgacacaggccagccccatcttggtcc

SEQ ID NO: 5875 - DNA, 2789 bp, Macaca Fascicularis
  misc_feature (1)...(2789): n = A,T,C or G
ctttttcatgctaggagccttctcatcaactgtggacaggatattgacagtccagcaagtagagaaaaacaatggaggtatgagtttatatggtctgcacacttaaaaaaaaaaacaaaaaaccaaaaacagcttcactggttcaggtatctgaagggattaaataaagtattcacataattaaaaatgaatgtaatttgaaactctgcctatgaactgggagcatcaaaatgcagtcagaaaaagggaactgaaatttaggagacggtggctttagccatgttctgccagtagagaaacttgggactttgtaaagcaagttactttcatttctccagccccaactttttaaggtaaaacaagtgggagatggatctaatggtcccagttactgcctagcatatttgaaattaatggaatattaaagaaagtgactgtgcatttttactgccatacagtataacaaagtagtattccctgctttaaaataatttcagtatttaagaatgtgaaataaaacaactcagaaaagtgactttgaacagatcacatgaggatagcactgatgctacctgcatcagtaaatgaaatttgcaatgactttgtctggaatattatactagcatcaactcccaaatgtgcacagagagtttctggaattttatcctgtgcccttagcttttactctgatgccatctccacgggcctctcatataatatggtttctgactcatttacttttcattattgcggatgtgcaattgtccagtatgtccctggtttcaatttacagtgacagagttgccttatttctataaccaaatatgtaaagcaatttaaataattaaaacaatttaaaaaaagaacattgacttccagatcaaatccatgtgtaggttacagggagcagaaggaaagttctcatcccagccagtgacagactattccgcagcctaggtgctggtagaaccatgcatgggtagctatggtgttctgttgcacagcagggtgaatacagttaacaataatttattgtacatttcaaaatatctagaaaagaggattctgaatgttcttaccatgaagaaattataaatgtatgagatgatggatgtgttaattattctgatttgatgattacacaatgtatacatgtattgaaatatcacactgtaccccataaatatatatagttatgaagtgtcagtaaaacgctcaacaaattagacatagaaggaatgtatctcaacacaattgaggtcatatacgacaaacccacagctaatatcatactgaatggaaaaattttgaaatctttttctctaaaatctgaaacaagacaaggatgccaattctcaccactcttattcaagatagtactagaagtccttgccagagcaatttggtaagaaaaataaaggacattcaaattggaaagaaacaagttaaattgtccccattggcagataacataatattatatatagaaaacactaaagactccactaaaaaaattcaaaactgatacacaaattcagtaaagtttcaggatacaaaatcaacatagaaaaagcagtagcattttataccttaatagtgaactgtctaaaggagaaatcaagaaaacaatcctagttgcaatagttacagaaaaaaatacatagatgtaagtttaactaaggagataaaagatttgtacactaaaactataaaacattgataaaagaaattgaaaagacacaacttaatggaacgatagcccacactcatggattaaaagtattaatattgttaaaatgtgcatactacccaaagcaatctacagattcaatgcaatccctatcaaaatgccaatgacattttttgcagtaatatgaagtcgctatctgacttcaaaatatactacaaagctatagtaatcaaaacagcatggaattggcataaaaatagacacatgggtcaatgcaacagaatagagaacccagaaataaatccacacacttacagtcaactgatttttgacaaagatgccaaaaacacacagtagagaaagaatactgtctttaataaatagtactagaaaaatttgatattcatatgcaggataatgaaactagacccccttttctcacaatatacaaacatcaactcaaaattaattaaagagttaaatgtaggacctggaatgataaaacgattagaagaaaacacaggggaaacacatcgtgatactggtataggcaaagattttttgcataagaccccaaaagcacagtcataaaggtgaacatagacaaatgggtttacatcaaactaaaaatcttttgcacagcaaataatcaactgctgtagatgaaactacaacctacagaataggagaaaatatttgcaaactatgcatctaacaagaagttaatattcagaatatataaagaactcaaacaactcaatagcagaaaaacaatataatttaaaataaggcacaggccgggcacggtggctcatgcctgtaatcccagcagtttgagaggctggtggattacaaggtcaggagatagnnnnnnnnnnnnnnnnnnnnnnnnnnnnnnnnnnnnnnnnnnnnnnnnnnnnnnnnnnnnnnnnnnnnnnnnnnnnnnnnnnnnnnnnnnnnnnnnnnnnnnnnnnnnnnnnnnnnnnnnnnnnnnnnnnnnnnnnnnnnnnnnnnnnnnnnnnnnnnnnnnnnnnnnnnnnnnnnnnnnnnnnnnnnnnnnnnnnnnnnnncaaaaaaaaaaaaaaaaaaaaaaaaaaaa

SEQ ID NO: 5876 - DNA, 1773 bp, Macaca Fascicularis
agatgcatatatactggcaattgaatatactctaaaattattaagccttctgccagtccttttgtttcatttttttcataatcattgaaaaatgagaagatgctatgattttttgatacttaaaattcccaagaattcattagccataattaaatatgatccagttcaaaactctggtcttaggacatgtattgccatgtatcttataaaataagctactattcttatctgtgcaatattcactttatttattgtcatttgtaacatacatggagctgcaagtgttcatggtatccttcaaaataacagaaaccctgccttgaagacattaaactcttaaggcaactggaagttagaagttaaaaaatgagcatgaaagttagtaaccaaaagtactagttcacagtataattctaaaacactgatgatgtttgcacataataatccaagcataatgtggtgcaggctcaaaactgtagtaatataagctaatagtatgaaatttggaaacgggttcctcttgatagttggcagtgtgctcctagcaattgaaagcagcactaatctgttgcttatatgcaaaagatgcaatgtattataaagatattaaagttctgctacattttataattttccttattaaaaccccaaactgccatgtccctgaaacttgagtcaaacacaagcttatttgcactaaagagcatggccaaaaaaataaatgacagggtggaaaagctagttggaacctcttgaaataattggttctgataggagaatttcacatttgtctatttgaaagctatatggtccaggcagacaatctgtcagttcactaatttaataatgcactttaccttttgtatatagaagatgtacatttatgccacttgacaggtgggatgtgtttcaataactatgtagctagaatctataaggtgatctcttgcatgcatatgtttgtgttggaactgttgttgtaacaggtttccattaaatcagtataatggagaagggtagaagatgcttttgaaacaaatcccagtatatttaacaaataattttaaagtagagttcacatttggtgtcttaagaactagaataaataaaatactatttccaacccaaattcgtattacagttgagactgtatttagttgagattccccataatgccctgacagttaatttggggaatttgtccagaccaaatttttttcaatcattgtttcattgttgatatatgtttaagtaatgaataaatatgcagtacataatattatactcaaattaaaagtgtggttagctgatgtggcattatttaaagatcactcagactaaagaaataaggtttcaagttaaggaaatgcaaggaacctatgaacagtcactaacacaaatatgatatctcagaattcacagaagtactaaccttcaccaactaaaaagggtattgggagatttagtgtatccttccatcttaaaagcttcttaagatgtacatttgaaaactagataactgttacttaataatactttactgagaaacactgtgtactaacaattcatcaagagtgtgctatatttactgcgttcattttatatctatagataagaatacattatatagtcatcctaccttaatataatcatgtatttatattgtaattttgcaaatattttccataaaataaacatttatctgagctgcaaaaaaaaaaaaaaaaaaaaaaaaaaaaaaaaaaaaaaaaaaaaaaaaaaaaaaaaaaaaaa

SEQ ID NO: 5877 - DNA, 724 bp, Macaca Fascicularis
ggaatgtaaattcattcaaccattgtggaagcatgtgatgattcctcaaagatccagaactagaaataccatttgtcccagcaattccattactgggtatatacccaaaggaatataaaccattttattgtaaagatccaggcacatgtatgttcattgcagcactcttcacaatagcaaagacacaatagcaaatgcccatcagtgatagactggataaagaaaacttggtacatatacaccatggaatactgtgcagtgcagctgttagagcttttggtgatgcagtgaatcagatttttcattaattcttttaattggttattgtttggatgagggagacaggacaagatggaggaaggtgaacaagaaggcataatccatgttgcttccgggttcttcctcactaactttcccgtgcgcgggaaaatgcagcccgccccgggaagatgcagatcaaccgagcatgcaccaggtgatgtcaatccgaagagatcgaaacttactcggccacgcctacggagatgcccctatcacgcccttatcccgcccactgccctcccccttccagtaccaatgcataaaagtctgccaccagcaggagccagtgtgacttcttcggcccccgcattcgtggaccagagaacatcacccgagagtgctggcgctacttccctggccccccacacctgaggatcagagaacctcgcccgagagtgtgtgc

SEQ ID NO: 5878 - DNA, 741 bp, Macaca Fascicularis
  misc_feature (1)...(741): n = A,T,C or G
cgtattacatttaatattgtatgtccagnnnannnnttgcaaaagagtggtaaaagaggccaataatcattaatataactagataagttccttgcagaaaggcagaaaaatgcttgagaaacatcatatgctaaattttctaggaattgtagatagctgtggatagctgggtttcagccaatttttgacagaatataaataatttgatatatatggaagaaactttggaaaagttcagatgagcttnnnnnnnnnnnnnngactgcacaaagctgtggtgctgattatagttcattcagtgaaaacagatccccccttcccagctttatactccagtagtaattacatgggctcccagaatggggctaaaaacgaggcctctttttatacagtaacttagctgtcacatctgtggcagagaatagagaaaatcattgatgcgagtcnnnnnnnnnnnnnnnacacttttcaggttcaccagtgtttttattttccaatagaatttcgtttgactcctgcctacacttctattgttatctctcacttctgctagcctcagcctgctttctacatatactccactcaaaagatgctggnnnnnnnnnnnnnnnnnnnnatacaattattcactgaccacatctgtgtctacacatgcagtatgaagtaaagatttctctcaattatattcagactctaacaaaatggcaaattagtttgttagaataaccacttaataacttc

SEQ ID NO: 5879 - DNA, 748 bp, Macaca Fascicularis
  misc_feature (1)...(748): n = A,T,C or G
gaatgccatggggtttgatnnnnnnnnnnggacatgagnngnnncagcttcctggaccatgactttgnnnnnnnnnnnnnnnnnatgggagaacaaccacatttttctttatgtgnnnnnnnnnnnnnnnnnnnnnnnnnnnnngacccaatagtgttcccatgctgtttcttgtgaaatgctctcggctatgtagcagcttttgattccctgcataccctaggctgctgcccctatcttgtcccttgtttataacattgagaggttttctagggcacatactgagtgagagcattgttgagaagtcaggggaaaaaaggtgactacttttagagcaaggctgggcatcagcacctgtccagctctacttgtgnnnnnnnnnnnnnnnnnnnnnnnnnnnnnnnnnnnnnnnnnnnnnnnnnnnnnnnnnnnnnnnnnnnnnnnnnnnnnnnnnnnnnnnnnnnnnnnnnnnnnnnnnnnnnnnnnnnnnnnnnnnnnnnnnnnnnnnnnnnnnnnnnnnnnnnnnnnnnnnnnnnnnnnnnnnnnngggaccctgtttttaagatgcannnnnnnnnnnnnnnnnnnnnnnnnnnnnnncactgggtgttggggatgtttgctacctcctgctatttttgtggttttggttctcccactatggtaggacccccagccnnnnnnnnnnnnngtcatgtcagccccattgactaccttctcatgctctgaggtactactgcctctgcag

SEQ ID NO: 5880 - DNA, 728 bp, Macaca Fascicularis
  misc_feature (1)...(728): n = A,T,C or G
caagtagctgnnnttacaggcgnnngccaccacgcccagctaattttttgtatttttagtagacatggggtttcgccatgttggcaggctggtcttgaactcctgacctcaggcgatctgcccacctcggcctcccgaagtgctgggattacaggcgtgnnnnnnnnnnnnnnncttctcccaataggtgtttattcctcactcctccaaatgctctggagagggccccacccttgagaacagctgacacagagaacattttctcaggctggtagaggggtgggatagaggaagggaggtttgagccaggcaggcctttcccagggaagcctcctcccaggtgcttgccccagctcccaccccacagcccactctcaggcaagaacaatccttagagggaagtgcccatctagccattgactcatgacctgggtcaaagaagccatctccagcctctctgtcagcattacaggatccccaaaaagctgttgaataagccctaagggtggtaggaatccaggagggacccaggaaactgagatttgagattcagtgcctctgaaagactaccaaagtctcaattggtttaatatttaaaggctgctatagatttattctgcccacaacttgggggtcctatctggatctcgacttctccagctgtaaagtggacacaatcctcctccagggactgcnnnnnnnnnaagaaatggaaaatacttttggaa

SEQ ID NO: 5881 - DNA, 703 bp, Macaca Fascicularis
  misc_feature (1)...(703): n = A,T,C or G
cacgttagagcattacgaatactaaaactaatagggcactgcatcagagcatggtgaacagaacaaagaaccagccaagaagaaaaggaaaaaataaannnnnnnnnnnnnnnaatgtgaactttggggcttctgcttcgtttttacnnnnnnnnnnnnnnnnnnnnnnnnnnnnnnnnnnnnnnnnnnnnnnnnnnnnnnnnnnnnnnnncactgaattcaacnnnnnnnnnnnnnnnnnnnnnnnttctnnnnnnnnnnnnnnnnnnnnnnnnnnnnnnnnnnnnnnnnnnnnnnnnnnnnnnnnnnnngctgaaagcctgagtttgggagcctgcaccgccccgacgaagctccatgggagcaaatacagagcctccaggcagtgctatggtccaggctggcttcgtttttccaaggagccnnnnnnnnnnnnnnnnnnnnnnnnnnnnnnnnnnnnnnnacctgaaaaatagtgcaaattggttaggatgccacctcaataactgtaactgagagctcagaagtgagcaaaggagcttaatgctaaggtcaaaaaggagagtgaaaggttgagaacaannnnnnnnnnnnnnnatgttacatgttagaagggtctgttttctttttatataaaataagtctgtcttagatacattttaaatagaaaataagctttctgatttgtttggtatttaaagca

SEQ ID NO: 5882 - DNA, 794 bp, Macaca Fascicularis
ccaccctctcttcactggaaaggacaccatgagcacggaaagcatgatccaggacgtggagctggccgaggaggcgctccccaggaagacagcagggccccagggctccaggcggtgctggttcctcagcctcttctccttcctgctcgtggcaggcgccgccacgctcttctgtctgctgcactttggagtgatcggcccccagagggaagagttccccaaggacccctctctaatcagccctctggctcaggcagtcagatcatcttctcgaaccccaagtgacaagcctgtagcccatgttgtagcaaaccctcaagctgaggggcagctccagtggctgaaccgccgggccaatgccctcgtggccaatggcgtggagctgacagataaccagctggtggtgccatcagaaggcctgtacctcatctactcccaggtcctcttcaagggccaaggctgcccctccaaccatgtgctcctcacccacaccatcagccgcatcgccgtctcctaccagaccaaggtcaacctcctctctgccatcaagagcccctgccagagggagactccagagggggctgaggccaagccctggtatgagcccatctacctaggaggggtctttcagctggagaagggtgatcgactcagcgctgagatcaatctgcccgactatctcgactttgctgagtctgggcaggtctactttgggatcattgccctgtgaggaggaccaacatccatccttcccaaacccctcccccgccccaatccctttattatcccctcct

SEQ ID NO: 5883 - DNA, 710 bp, Macaca Fascicularis
atgatcacagttatatgaggcacctagatgatcagattcacagagacagaaagtagaatggtgattgccaggtgctagggcaggagaaaatgaagagtcatttaatggttataaagtttcagatttacaagatagaaagaattctggaggtagatgggtgattgttgtgcaaaattatgaatgtatttaatactatttggctgtacgcttaaaactgttaagcttgtaattttgttatgacattttactatgataaaaactgcgaaaatataatgataaaattgaaagcgagaaggtatgagagcaacattaatcaacttacatagagaaaattttagctactgagcaacattgatgaaagaagaaattatggttaaatatattattaattgtttcacaattaataaaagatttgaacgtcatgacatcatcaaatattaggtagaatagactaaatatgtggcaatgtaagtgaactgcatctcatttttcatatgaggtagtcaatggcattgtttatgttctatatatcaggaaacacagagctgtaagagtcattattgaaaattccaaatgttactgccaaacaaaacaaaacaaaaactattgaaggaaattacatctagtatgtgggactgaaggtgggacgagttgtactgggaaatatgatttttattatattattttctgtactacggactgtctcatga

SEQ ID NO: 5884 - DNA, 764 bp, Macaca Fascicularis
  misc_feature (1)...(764): n = A,T,C or G
tgtgaactgaacataagagcagtgctctttatagaggatgaaaagggagcatgggggagaatctgatttaaaaaatgattcattccttcacaaacactaacaaacatggctaaaaannnnnnnnnnnnnnnnnnnnnnnnnnnnnnnnnntcaacatttttataacttccttaagtgaatagttaaaccagcaatctgaattctgttggtctcccaagagtgttaaattacataagtattacccatattcatttcccacaactgttgggtttttctttctttctttcattttttctctctatgcatcctagaaaaactcccccgactagacttagcgggaggcagtcaagttatgtagtaaaacaagagtgccttttctgttggatgtccactttagtttcctgccttcccagggcataagatgtttagaaacgttttttctctaaacataagaattattgtgtaccacaattttgaaccaccgatttcnnnnnnnnnnnnnnnnnnnnnnnnnnnnattccctttgggtctcctttgtatattcttatgttcccttctgtttccagttgtcctcaaaaagagttgaggggggcataactcttataaaatggataaaaatgaaactgtacagatgtttgccccccttgtatctgtgagcatgatctctatcaggcttgaaaatctgctttatcattttgtatatttgannattttgtattcagcattacttgactcctcaccgccaagtnnngtcgggggagtt

SEQ ID NO: 5885 - DNA, 693 bp, Macaca Fascicularis
ggaaggcagaaaccaatttcagaaaaagaggctgagggcttggtagtgcagggaggaactaagataacgaagcatcgcacggatgagtcgtagccttgccggcctgacggcgggtagattgcagtgccaccctccctaagaccgccatccgaccaggagccccggccccacctttcctccttccctcgtgcctgcttggcacttcctgcggctctcccctgttgagtgcaggcattctgcccggggcagtcgctgtgagagaggccatgacctggaccagggcgaagaacagaacttgctaccagattgcatgcagcgggtggggactctacacttcttaacccgaacaactaattgccaaaacagatacagaagaaattggagaagggttgttctaggcagcagagcactaaagccaaaaaacaaaaaaaaaaagccccagagtcttcagtgatgtaaagccttgcagagtatgcgaggtgacctagacagtgagaggcaggaggaaggcgactccgtggagctcaaagtgtgaaggcgtttgtcagcgcacatcccccacacagccaccatggggctgtggttagggacagagccccgagtctgagctgcttcatctgaaatggggatgaaggtgcctcatagaaagtattgagtaaatacgaggcgctcttcataggaggcactcttctg

SEQ ID NO: 5886 - DNA, 688 bp, Macaca Fascicularis
  misc_feature (1)...(688): n = A,T,C or G
gcatgggaacaggagacacccntggcctggaggtaccatctagccctctgcggaaagccaaacgagctcgnntctgctcctccagcagnnnnnnnnnnnnnnnnnnnnnnttctttgatcccacctctcagcatagagnnnnnnnnnnnnnnnnnnnnnnnnnnnnnnnnnnnnnnnnnnnnnnnnnnnnnnnnnnnnnnnnnnnnnnnnnnnnnnnnnnnnnnnnnnnnnnnaaagcagtgnnnnnnnnnnnnnnnnnnnnnnnncagtctagccagccagctgaaacggactccatgagtctctctgagaaatcaaggaaagtnnnnnnnnnnnnnnnnnngtgggaatctctatgctcatcctgaagatattctagccccttcctggagagagttggaacgcgagtgacttttggaaacattaaggctgagttccttttggtcagctgacgctaagtttttcctgttccgggttaatcctaaggagcccctgccatagcaaaggcagggagtgtcaacggtctgcatctggctgagggagacccgtttcctttcagggatgtggacagggtaagggcagcaannnnnnnnnnnnnnnaggagtgcggggttaacagaccagaaggaggacnnnnnnnnnnnnnnnnnnnnnnnnnnnnttcagtgtggggtggtgttctgaggac

SEQ ID NO: 5887 - DNA, 786 bp, Macaca Fascicularis
  misc_feature (1)...(786): n = A,T,C or G
ttggatatgctttacttttacaaagcacannnnnnnnnttagttgacgaaatggtggcactatttctttttttgtnntaagcaactgcacatttcaaaaggattattgagatgttatgaaaatctctaccttgcacaaaaatctccagcagcttttaaaattcatcatttccacaactgaattgatttccatttctacagacctggctcaagcacaaaccagtttctttgnnnnnnnnnnnnnnnnnnnttggtttctgggtggccaattcagaagagtggacattctcaacaaatcctaggccgtgcattcctgtcatcctcttcnnnnnnnnnnnnnnnncatccttcaattgcaacannnnnnnnnnnnnnnnnnnnnnnnnntttcatgcacaccaaatatttttaaagacatttataaannnnnnnnttatgactcacatttctctatgaattccttcatacagcaagtataactcttttctttaagggcttatgtattttgtcactgatcatgcaaatggacaacattttagcacactttattcatattttaaggacttttattctctgttctgcaactcttctggaaatagagtaaattttgctgttttttgtactcagttgcaactcatgcttgnnnnnnnnnnnnnnnnnnnnnnnnnnnnnnnnntgtaaatgataaaggaattattgtatgaaatattacaaagagtagaatatgcattgttattcattgtaatattttttgcatcataatcgcctcataaagactggttcaacc

SEQ ID NO: 5888 - DNA, 1099 bp, Macaca Fascicularis
  misc_feature (1)...(1099): n = A,T,C or G
ctgcttgagtactcagacttcaacctnnnaatgcactgaaggcattccttgtgaaagataccagaatgggttacaaatttaacctggcaaacattgaagaactcttaatgttttctttttaataagaatgacaccccactttggggactaaaattgtgctattgccgaaaagcagtctaaagtttatttttaaaaaagagaaatctgccccattatttttggttggttttatttttattttatattttttggcttttggtcattgtcaaatgtggaatgctatgggtttctagtacataatttaattctagtttttataatctgttagcccagttaaaatgtatgctacagataaaggaatgttatagataaatttgaaagagttaggtctgtttagctgtagattttttaaaagattgatgcactaaattgtttactgttgtgatgttaaggggggtagagtttgcaaggggactgtttaaaaaaagtagcttatacagcatgtgcttgcaacttaaatataagttgggtatgtgtagtttttgctataccactgactgtattgaaaaccaaagtattaaaaggggaaacgcccctgtttatatctgtaggggtattttacattcaaaaatgtatgttttttttttttcaaaattaaagtatttgggactgaattgcactaagatataacctgcaagcatataatacaaaaaaaattgcaaaactgtttagaacgctaataaaatttatgcagttannnnnnnnnnnnnnnnnnnnnnnnntaagatgatgcagatttttttacagttgtattgtggtgcagaactggattttctgtaacttaaaaaaaaatccacagttttaaaggcaataatcagtaaatgttattttcannngnnnnnnnnnntgtctttaaaannnaaatgaaaagtaaatcttaccacaataaatataaaaaaatcttgtcagttacttttcttttacatattttgctgtgcaaaattgttttatatcttgagttactaactaaccacgcgtgatgttcctatgtgcttttctttcattttcaattctggttatatcaagaaaaagaataatc

SEQ ID NO: 5889 - DNA, 736 bp, Macaca Fascicularis
gaaagatgccactcagtattagcgtggccttgaccttcccatctgccatgatggcctcctattacctgctgctgcagacctatgtactccgcctggaagccatcatgaacggcatcttgctcttcttctgtggctcagagcttttacttgaggtgctcaccttggctgctttctccagtatggacagaatttgaagtacagaatttcagccagcagcccatcaggctgacaccacacatactgcttctggtactttagccacaccagtgagaattggtggggcaagttatcctgagaaaggctgtgtggcttttcttcagcacatacatttgggcaagcaactcagcataaggccagtgggtgccatcttctaaaccaggacatcaacccgagagactgttctacactccagcatagggacgggcaaggttattcccatcctgccccttctcagaaccagtcccctgctgacctcaagttctcctctttgatcaccgtggccagagcatctcgtgtggaccatctaggctccttgggcttcaagcaggacctgagccacatgctccctgtacgagttgtgccatacctgtcccacatgagcacagagagcctcatgttggtgggtttccagagtgatgcgaaagcctctcaccccagtcctcggagactgagtttccagaacgtttttagtagctcatagtgttatttttctactgtcatcatgtaactaacttta

SEQ ID NO: 5890 - DNA, 723 bp, Macaca Fascicularis
  misc_feature (1)...(723): n = A,T,C or G
aggagtagannnnnnnnnnnnnnnnnnnnnnnnnnntccaacatgttattagacagttaactgaagaaaaataaataatagaaatgtnnnattgcatgagagtcttcttttgatggcatgacatctccatgattactcccatatttctttcttaatctattgtnnnnnnnnnnnnnnnnnnnnnnnnnnnnnnnnnnactctggttcagggctttaaaaggcttnnnnnnnnnnnnnnnnnnnnnnnnnnnnnnnnnnnnnnnnnnnnnnnnnnnnnnnnnnnnnnnnnnnnnnnnnnnnnnnnnnnnnnnnnnnnnnnnnnnnnnnnnnnnnnnnnnnnnnnnnnnnnnnnnnnnnnnnnnnnnnnnnnnnnnnnnnnnnnnnnnnnnacggacttatatactaagccagccgcctccaccaatgacatttctttcaaaacaacttgtgttattattattggcatcctttaaaaaaatcccaattcacctttnnnnnnnnnnnnnnnnnnnnnnnnnnnnnnnnnnnnnnnnnnnnnnnnnnnnaattcctaagnnnnnnnnnnnnnncttgtcttactgttttgcagtttgatcgtttgtgtcttcttggttaactaaccaaaaatcattacaattatgcacttagagcctagaaatcctctgcttttcaaggttaacggcactgcccccaactgctagtgatctgaggagcaactgtagt

SEQ ID NO: 5891 - DNA, 748 bp, Macaca Fascicularis
  misc_feature (1)...(748): n = A,T,C or G
cgaggaggtcaggnngtcccggagngaatgttggcatctacgagcacctcaggaagggcgccggcgtcatccctgtgcaccagagcctcctgctgtaccgataccacccgcgggcggccacgcactccgtccttgagaagaccatctgtacccaccgcgcagccttcaccatctggaaggcccttccccgctgggcagccttcaccatctggaacgccggcaagcaggggcgccggctgtaccgcagcttgaccgccgccagccatcccaaggtggtggccttctgtgacgtggacgagaacaagatcaggaaaggcttctattgccacgaggactctcaggaaagacccaagccccgaatccccatcctgcacttccgagccgcccggccacccttcgtcatctgcgtgaagctggacctcacagggggcgccttcgaggacaacctgaggtcgttgcacttgcaggagggccaggacttccttcacttcagctgacggacccacggcagcggctcccagtgcatcccaggccagcaggagcttcgtgagctgcaggcatagcaacggtgcaccccagttccacacccagcaggcgcaaccagagtctcgtgtgtgccgaccacgggagccgaaccctttccaccgtgtggactcgtggtcaaggctgggcctggccacccaggaccctcaccacgtgaccccagccaatcgaggggacagttcgaggaggaggagaccccaattac

SEQ ID NO: 5892 - DNA, 597 bp, Macaca Fascicularis
gctttaaaaattgagatatattgcatgaaaatccagagttttacacttatcttttaaaataggaagatctggtaacactgagttctccctctttcccagatggtactaagtagcagctgctattgagagcaaccccacttcaccacagatcccatatggcttcttcacacacatagattacctgtccagatcttataggcatttgtggttttgaaccctgatttagatgttctctatactagttagcacaattatctaatccgttcacacacactgaaaagcgtagatttattcccttaatcacaaatctcaaattgatcaagagttaattagctttttttaggcttgggggttttatctttgagatagttatctggagggaagctgttttttcaactgctttttactgtgttgtatacgattcttcatagttatgtattatttttagcatataattaagaatttttcacgtcgctatcaacactatagtaaccataatcatagttataatatatattataaaggtctagctgggcccgtaattgttcactgctctttatcaattactacacttttctgtggtttatatattgctga

SEQ ID NO: 5893 - DNA, 4418 bp, Macaca Fascicularis
agagagaggagagagaggagagggagaaggagagaggggcagaggagaagggagagagggagagtatgcgagacggaaaggagcgccttagagtctctgaagcacgcaagaaataacagattaggaatttttcgggcaactgtcacccggataacggtcagagaatcaccatcatcgcaactctgacgtttcctacaagaagttagagacttaagcagtactggcatcggatggaaatggtatgcttgatgctgtggaaaatatccctgagctgaagaagtgcaactgaatgttgtgtgtgtgctacatacccagaagaacccagacccagtggggaagagagacgaaatgtggagagaatgactaacgacaaatccgtgaatttgttctctggagttgctaatttgccagtccgaagcaacacattttacagggaggaaacgttttgctgcttctgatttctccccaaactggtgctaccagatgcatggctttctatgtgttggaacaaatcattcctaactgcagcatactgggaaaggagaaaggttgaggcaactaactggctgtctccaaataagtgatgagatataatgcatcctccagtccatgcacgcttcctcttccaatttgtgcatcattcctcagtggaaacctttaaaccctaaaatccaggaaaagaaaataaatacattatcatggacctgagggatttttacctgttggctgctctgattgcctgtttaaggctggattccgcaatagctcaagaacttatttacactattagagaggaattgcctgaaaatgtgcccataggaaacataccaaaggatctgaacatttctcacgtcaatgctgccacagggaccagtgccggccttgtctacagactggtttctaaagctggggatgcccctttggtgaaagtatccagcagcactggagaaattttcacaacctccaacagaatagacagagaaaaactctgtgctggtgcctcatatgctgaggagaatgggtgtttctttgaacttgaggtggtgatcctccccaatgacttcttcaggctgatcaaaataaaaataattgtcaaggataccaatgataatgcccccatgtttccatctcctgtcatcaatatttccattccagaaaacactttgatcaacagccgctttccaattccatcagcaacggatcctgacacaggcttcaatggtgtacagcattatgaattgttaaatgggcagagtgtttttggactggatatcgtggaaactccggagggagagaagtggccacaattgattgttcagcaaaacttggatagagaacagaaagatacctatgtgatgaaaatcaaagtagaggatggaggcactccacagaaatccagtacggccatactgcaggtcacagtaagtgatgtaaatgacaaccggccagtgtttaaagagggtcaagtggaggtgcatattccagagaatgctcctgtaggtacctctgtaattcagctccatgccactgatgcagatataggcagtaatgctgaaatccggtacatttttggtgcccaggtcgcccctgcaaccaaaagactctttgctttaaataatactactgggctgattacagttcagaggtccttagatagagaggagacagccattcacaaagtgacagtgctggctagtgatggcagctccactcctgctcgagcaacggttaccatcaatgtcaccgatgtaaatgataaccctcctaatatagacctcaggtacattataagtcccatcaatggcaccgtgtatttatctgagaaagatcctgtcaatacaaagattgccctaattacagtttcagataaggacacagatgtgaatggcaaagtgatctgttttattgaaagagaggtcccatttcatttgaaggcagtatatgacaaccaatatttgttagagacctcttctttgttggactatgagggcaccaaagaattcagctttaaaattgttgcctctgattctgggaagcccagtttaaatcagactgccctggtaagggttaagcttgaggatgaaaatgacaacccaccagttttcaaccagcctgtaattgagctgtcagtttctgaaaacaaccgacgtgggttatacttaacaactattagtgccacagatgaagacagtgggaaaaatgcagacattgtttatcagcttggaccgaatgcctccttctttgatttggaccgaaaaacaggagttttgacagcctccagagtctttgacagagaagaacaagaacgattcatttttacagtaactgcgagggacaatgggacccctcccctccaaagccaagctgctgtgatagttactgttctggatgagaatgacaatagccccaagtttactcataatcattttcaattttttgtgtctgagaatctgccaaagtatagtactgtgggggtaatcacagtgacagatgcagatgctggagagaataaagctgtgactctttccattctaaatgacaatgataattttgtgttggatccctattctggagtcataaagtcaaatgtctcatttgatagggaacagcagagttcctacacttttgatgtcaaagctactgatggaggacagccacctcgttcctctactgcaaaagtaactatcaacgtcatggatgtcaatgacaacagcccagttgtcatttctccaccgtctaatacttcctttaagttggtgcccctctcagccattcctggctccgtggtagcagaagtttttgcagtggatgttgacactggaatgaatgccgaactaaagtatactatagtgagtggaaacaacaaaggcttatttcggattgatccagtaacaggtaacattactctggaagaaaaaccagcacctactgatgtgggattgcatcgtttggtggtcaacataagtgacctggggtaccctaagtctttgcacacgcttgtgcttgtattcctttatgttaacgatactgctggaaatgcctcctatatctatgacttgatccgcaggactatggaggccccgttggacaggaacataggggatagtagccaaccctatcaaaatgaggactatctaaccatcatgattgccatcatcgccggtgccatggtggtcattgttgtgatcttcgtcaccgttctggtgcgctgtcgccatgcatcaaggttcaaagcagcccagaggagcaagcaaggtgccgaatggatgtccccaaaccaggagaacaaacaaaacaagaaaaagaaaagaaagaaaaggaagtctcccaaaagctctcttttgaactttgttactatcgaagagtccaaacccgatgatgcagttcatgaacctatcaatgggacaataagcctgccggctgaactggaggagcaaagtataggaagatttgactggggcccggcacctccaacaacgttcaagcctaacagtcctgacctggccaagcactacaaatctgcttctccacagcctgcttttcatctcaaaccagacactccagtttccgtgaaaaagcatcatgtgattcaggaactccctttggacaacacctttgtcgggggttgtgacaccctttctaaacgctcttccactagttcagatcacttcagtgcctcagagtgcagttcccaaggaggcttcaagacaaagggccccttacacacgagacaggtaaacgagcacttttactggtctataagtactgcatacaagtgcccagtcaaccagtattaacgtgccagtgtgtctgttgttttggtctaactttagcttagttagaaagaggtaaaaaaaaacttgaccccttttctattcctctggggctcggtcaagaatttttagaacagctttgagatttctgagttctgagaatattttaacctcccagtttccttcaaatggcaaaagatgaaaagagaaaattattccaaaatgtcccaagataatgtttgctgaagaagaaaacctgtcctgatatgccacattctgctcctggggtttccaaattgactgcttcaagattttcaccttaccctttgatctaaaaagtcaccttcaaatctcaagttttaaatgacttttgaaggtgtgactgcaattatgttggagctgtggttgctaaaggggttaatttttttttagtctctaaacaggatagtagaatattaaatgtacatcagccatgaagcacatgatcattgatagattgcaactaagccatataggaagtcttctctttgatttcaaattattttattgtaatatattagattcggtacttaatagaaagatttttagtgtccacagtggccaaatgctctttcaaaaaaaaaaaaaaaaaaaaaaaaaaaaaaa

SEQ ID NO: 5894 - DNA, 1095 bp, Macaca Fascicularis
atggcccagcagtggagcctccaaaggctcgcaggccgccatccgcaggacagctatgaggacagcacccagtccagcatcttcacctacaccaacagcaactccaccagaggcccctttgaaggccccaactaccacatcgctcccagatgggtgtaccacctcaccagtgtctggatgatctttgtggtcattgcatccgtcttcacaaatgggcttgtgctggctgccaccatgaagttcaagaagttgcgccacccgctgaactggatcctggtgaacctggcagttgctgatctagcagagacagtcatcgccagcactatcagtgttgtgaaccaggtctatggctacttcgtgctgggccaccctatgtgtgtcctggaaggcttcaccgtctccctgtgtgggatcacaggtctctggtccctggccatcatttcctgggagaggtggatggtggtctgcaagccctttggcaacgtgagatttgatgccaagctcgccatcgtgggcattgtcttctcctgggtatggtctgccgtgtggacggcgccgcccatctttggttggagcaggtactggccccatggcctaaagacttcatgcggcccagatgtgttcagtggcagctcgtaccccggggtgcagtcttacatgattgtcctcatggtcacctgctgcatcattccactggctatcatcgtgctctgctacctccaagtgtggctggccatccgagcggtggcaaagcagcagaaagagtctgaatccactcagaaggcagagaaggaagtgacgcgcatggtggtggtgatgttcttggcgttctgcttctgctggggaccctacgccttcttcgcatgctttgctgctgccaaccctggctacgccttccaccctctgatggctgccctgccagcctactttgccaaaagtgccactatctacaaccccattatctatgtctttatgaaccggcagtttcgaaactgcatcttgcagctttttgggaagaaggttgacgacggctctgaactctccagcgcctccaaaacggaggtctcatctgtgtcctcggtgtcgcctgcatga

SEQ ID NO: 5895 - DNA, 766 bp, Macaca Fascicularis
  misc_feature (1)...(766): n = A,T,C or G
gactctaaccaagccttcctggagaaacccacatgnnnnngagccccattccattcatacaggcacatgtacgcacactgcatgtccaaggcgnnnnnnnnnnnnnnnnnnnntaaactttccagggcccgcctgattgggttgccctcagtcctctagatcaagatgctgactattnnnnnnnnnnnnnnnnnntctggggacctgctaggctttgtcatttcccagtttgttggtggtgcctttagtggttccctaatttgggaacactgatggggccttggacagggctttctctcaggtaggagaaatgggcccgtgatctcctcacagtcgcccccagtccttggccctgcttccctgtgtctcatgcactgnnnnnnnnnnnnnnnttggagggcagacctaggagcccctcactctgaccactgaatccatctccacacccctctcgccaagggaagccccctcaggaaggaccccccaaagctgaagggctgaatgtagcctcttcaatagagaaggcttccacttgagagcagcctctgcctgacnncccggaatgcagggagccactctgaccctcagccccctcgcttcttcagctaaaactccaaaggtttggtttcagatggggtttgttttgttctgtttggttttggttttctttggggtgggtgggtcattgtgttcttagattatgtttctcttgctaccaaacagtcatgtattaactctctttggatgatgaagtttaaagagtcaa

SEQ ID NO: 5896 - DNA, 759 bp, Macaca Fascicularis
  misc_feature (1)...(759): n = A,T,C or G
gaacatggcctgtttgacatgttcatgagtcnnnngannnacagcatatatnnnnnnnnnnnnnnnnccctccacacctgattctcaagagtgttatcacctgtcagcaaaatgaacagtacattttgggccattttaaatgtgaaattttgcctctttaatgttaattcaaaactatatcaatgttttcttgtccccacctctaacccaaggaaaaaagaaaaaacactatgcaaagaagtttaaacttagttttccttaagggtcagcccaacaatgactttcagtcagaaatggattaaactggaaaatgtttttgttgctgttgtaaacagatcatcctggaaggtttttgtttgtttgtttttaagttagtttattctatttctaaatcttagtcttccacatttctagaagccacttgacacaggttcctgtatctgaagtctagcnnnnnnnnnnnnnnnnnnnnnnnnnnnnnnnnnnnnnnnagtggataacttaatcctttaatacacttcagtggttcccatcttgttctcagaagggaaggtgnnnnnnnnnnnnnnnnnnnnnnactgtgtgcatagagggtccttcacgttgatgcttggcattccatcagctttctctaagnnnnnnnnnnnnnnnnnnnnnnnnntgatgttagacaacaggtcccagtcagttccctctatttccacccattttgctcacaagccatatggtctgattagtggtactgtctgactcacatgt

SEQ ID NO: 5897 - DNA, 603 bp, Macaca Fascicularis
  misc_feature (1)...(603): n = A,T,C or G
aaaaacagagtagggtaaaatgagaaccactgttttcctttctggcctaatnnggtgaatnntgcaagcacagactgaccagtttagaattttcagcagatcacagagcagttctcatagatgtttgcattattgtgatgtcaagctactgactcctcagatctttaatagtctctttgatacaaccacctgagggtagaaagaaagggatacaaaagagaaaagttagtttagaagnnnnnnnnnnnnnnnnaagcagcacatacacaagcctggtcattgaaataaaaatctcatttgatgaactcaacagcaaatcgatgcccctgaagacagaatgannnnnnnnnnagatgataccaaagacacttcctcttgccccgttcttannnnnnnnnnnngcttcctacttctgtgatgcactgcagcagcccctccttggagtctggagccctaggccttccatgctcccaggctcactactagactcctggccaccccaatgtctttatttttgccccccccccaccccctgctctgggggttatagcttctgccttcaccaactctgttacttcagtgtcccttttgcactttcagccc

SEQ ID NO: 5898 - DNA, 644 bp, Macaca Fascicularis
  misc_feature (1)...(644): n = A,T,C or G
caacaacaacaaaaagtnnntngcactggtttgagcacaggactnnngcggtgtctttgcatttaatattgtatagggatgccagtgggaagtgatgtgtatgcttggcctcatggactaaaaccccgtgttaattatgacagaaggaaagtgtgtgagaaggaccttaactacctagcagctctagctgccatcttgaaccgtgaagataagggccacacttaggggtagctgggtggtgagcagcaagaagccttgttggatgagggcatgaaggagcagaatcactgtggaatcactgtgccaccccaaaatacctacctctggacttttatgtgcaggaaaaaaattgagagtttatatttatctcaacctagttaatacaactaatgcattcttatgtgattaaaatgtttggaggccaggcgcgnnnnnnnnnnnnnnnnnnnnnnnnnnnnnnnnnnnnnnnnnncagtggatcacaaggtcagnnnnnnnnnnnnnnnnnnnnnnnnnnnnnnnnnnnnnnnnnnnnnnnnnnnnnnnnnnnnnnnnnnnnnnnnnnnnnnnnnnnnnnnnnnnnnnnnnnnnnnnnnnnnnnnnnnnnnnnnnnnnnnattgtagtgaggtggaacttgtagtga

SEQ ID NO: 5899 - DNA, 757 bp, Macaca Fascicularis
  misc_feature (1)...(757): n = A,T,C or G
cagtagcagactagcnntnnnnannatatcaaatgtttnnnntaaaattttgactcctatagttnnnnnnnnnnnnnnnncttttaaaataattagattttatttgaattttaaaagtaatctgttataaattagatgttactttgttgactctgtgattcaatatacactcagccatattcctgtggggaaatatcaatcttattgactttcatggcatgagccagagattcatagtttcctttaggactataagtatgaagacaaaacacaccaaaatgaaatgctagtgaagaaattagaaacctattgtataaaatgtatttttaaaatcttaagatatatgtgatttacactgcctgttaatctagtctctttgtgattaaaaaaaacataatatttgttaagactctgaaacaccaaatatttgtgatgtttgtatagcaccattgttatatgtgatttcaaagggtaagcatctctgttgtaatcatgtgagcccacagaagaataaattcctgctattacgtacaaccaactctcagaattcagacttcctgcagctgctgtatcaccaataaatgagaattgtgaaaaacaatttttaaagaattgagtttatgatcactgtgcattttgttaatgaatgatttcagagttttatttttaccagaaatgctctcagccagtaaacacaannnnnnnnnnnnnnnnnnnnnnnnnnnnnnnngtttctatattcttgatctaactacca

SEQ ID NO: 5900 - DNA, 742 bp, Macaca Fascicularis
  misc_feature (1)...(742): n = A,T,C or G
acaacagacancnannnaggagcctgacgaggnnncttnnnnnnnnnnnnnnnnnnnnncagggtcagtattgccctgtgaggggaggaagaaacgactgcataggtagttggtttggagtcagacttgaagcagtgggagcgatggtgggaatttggnnnnnnnnnnnnnnnnnnnnnnnnnnnnnnnnnnnnnnncactgcttgccaagagccatctcctcccacaggtaccctggcttccgcagccacaggagattggagggtggagtggaagaacacaaggagccattgctagaggccccatagatgacaggcccaggtgctttagnnnnnnnnnnnnnnnnngtcagtgaggaactcgccctgagaagagagaaaaggtaggagaggagatgctgatggcatctggaaacaagtcttagagatggnnnnnnnnnnnnnnnnnnaaggggagacacccccaactgcagtgtgtcctggagcagnnnnnnnnnnnnnnnnnnnnnagtttcctcaaggtgggggacagaggtcaaggatgaggccaagctacatggaagggtgnnnnnnnnnnnnnnnnnnnnnnnggctgtggattcgtcacactggcggctgccggcacactttnnnnnnnnnngggcttgcaagggatggggacttgtgagtggaaagacgagagggctgatgtttttggacttcagcatgggtgtgatgtctgaggaagtgggtgtggctcccca

SEQ ID NO: 5901 - DNA, 1461 bp, Macaca Fascicularis
  misc_feature (1)...(1461): n = A,T,C or G
ggaaaagcgctccctctaccggcggggtgaagaagcctcatcgctacaggcccgggaccgtggcgcttcgagagattcgccgttnnnnnnnnnnnnnnnnnnnnnnnnnnnggnnnnnnnnnnnnnnnnnnnnnnnnnnnnnnnnnnnnnnggatttcaaaaccgacctgaggtttcagagcgcggccattggtgcgctgcaggaggctagtgaagcgtacctggtgggtctgttcgaagatactaatctgtgtgccatccacgctaagagagtcaccatcatgcccaaagacatccagttggctcgccggatacggggagagagagcttaagtgaaggcagtttttatggcgttttgtagtaaattctgtaaaatactttggtttaatttgtgactttttttgtaagaaattgtttataatatgttgcatttgtacttaagtcattccatctttcactcaggatgaatgcgaaaagtgactgttcacagacctcagtgatgtgagcactgttgctcaggagtgacaagttgctaatatgcagaagggatgggtgatatttcttgcttctcatgatgcatgtttctgtatgttaatgacttgttgggtagctattaaggtactagaattgataaatgtgtacagggtccttttgcaataaaactggttatgacttgatccaagtgttcaacaattggggctgttaagtctgaccatacatcactgtgatagaatgtgggctttttcaagggtgaagatacaagtcttaaccacagtgtaacttagtttcctttaaaaaaaaaaaaaaaaaagtaaacctggcagctatagaatacactatgtgcatttataatagctattttatatattgtagtgtcaacatttttaaattaaatgttttacattcacaagtggtggggagtcttgtcattaaggtgtgtgtaatttagagtccagttggttttcttctgactgcacttgttctcatagtagtaaaatgctatgcgcatttataccttgcataagtcctcattctaccacatgttatctaaccctatagctgataatgcaaacactaactgggggattttatttataagggctctagaaaaaaatacaagttattcacaccagcatcatctattaactaatattctgaactagttagtgcagcttttcattgtgttgtgtggttggtctcataactaggttgagtttttatcctctgataagaggaaacagtaccgaagttctttttcttgtggcatttgtattataaaaacttgctgtgggggaggagcataaagctccagcccactgaacctctaccaattaagatgcgtgttgggttaggttacatctggttactgtcctgggaaaatcatttttatagagatggccttccaaagtggttttaaaatttatcttattgaagtttttaggtcaattatgtatgtgacta

SEQ ID NO: 5902 - DNA, 1723 bp, Macaca Fascicularis
ccccagagatgtccctgctgcacgacgtgggtcccggcaccaccataaaggcaagtacggcctgagccactgcacgtctccgtccacacttgccctggagggcgctggagctctgggatcccctgtgtgtgcccttgagatttccatggataggtgaggctgtgcatggtttgtggccgactgggtcactggagcctacagtcagcccttgagctgtgtttattttcgttctttgagtagaaattcaggtctggttagcagacgtggttttggtgacatttgttatgagggtgataggttgatagaatcaacccagaatcaaccctgtgtcttgactttcctgtctgagcagatgaccagacccagaaccccattagaagtagggaaacacgttgtgtctgttttctgttgccacgacatttggccggcgggaggggcaagtagtgagcacgtgatagtcgaggctctcatggtttctggtgcctgagtctgtgacctgaaggcggtgtcagcataggggtagtcatgtgctgtgttgctggcaaacagggcagcagggaaaggttgacaagcaagagaggaactgatgacctcagcagggtggaggaaccagtcccaaacaccacctttcccattagaatccaagagggggtccccgaggaactgagctctttctcgcgcgtaaacaacacagctcgtggtgctgccacattttaaactatgttattgtggtaagagcacttaatgcccatacactgtacttgcacataaatgttaaaaataggtggtcatcgttcccatgtagacaagcctgactgtggaggatggatagagttggagttatctgttaacgctgacacctgaaaaacaaatcaaggccagagttatttttatagccacacacctgcccctgtcacctctggcctgcttgaggggccattcacagtgaaggggggcttcgttgtgacccattgccttgcagattctgtgcttctctgaattctgttcagtagccacttcaatgttgacacctataaaccctgtcacaccagatttttgtgtagttgtgagttcccagaacatcactgatgaaaaaggcagaaggactgtggtgtggctgagtgtgtggggtggggactgacatgaagttggctacagaattattctctccagaattctgctccagggcgaagctgtccctgctcctggaatgagcagggtctgaggactgtgggctacccaggccttctctccagcctcgagcagaagggagaaaggatgaggaggatggtgtggcctatttcgtagacttcaccgagccaaccctgacccctttaacacctccagatactcctgtgtgcagtttcagcgtccccttctcaggagcagatgtgactttgtgcgtttctgagctctgcagtaggaagaggtctgtcgtgagctgcctcgtcctcatcatagatggactccccctcctcccatcccacaggtctctgactctcacagcatcccagttctctgcctttagccagggtgggcagtaagaggagaggtagtgaggaacccatccattgaaaagcaagcctatctccaaacctgtgtgacagcatgaggcacaaattccacagctggcttggctgggccagcctgaccttatctgtcacagcacaaccacctcctgtggttggtcctttatttaaaaaaaaaaaaaaaaaaggccaca

SEQ ID NO: 5903 - DNA, 712 bp, Macaca Fascicularis
  misc_feature (1)...(712): n = A,T,C or G
gccnnnctggatnctgggggatgtcttcattcgacagttttactcggtcttcgaccgtgggaataaccgtgtgggactggccccagcagtcccctaaggaggggccttgtgtctgtgcctgcctgtctgacaccccttgaatctgttaggttggggcattctttacacctgtaaaaagtgattttccagagannnnagcnntttccagggttgcaacttgaattaagaccaaacagaacatgagaacacacacacacacacacacatttcacacatacacacacacacacacacatttcacacatacacaccactcccaccaccgtcatgatggaggaattaagttgtatatctatattttttattgacttttgattatgaaaatcagaaaattttcacatttgattatgaaaatctccaaacatacgtacaagcagagatcatagtataataaatccctgtgcaactccactcagctctgacaacccatccacacggccaggcctgtttatctgcactgctgcccactcctccagctccacatgctgtacctggattattctgaagcaaattccgagcattacatcattttgtacataaatatttctaacatccttaaatttaaatatacagttggaattcaagcatctcccattgtcccacaaatgtttggctgtttttatagttggattgtttgtattaggatcaagca

SEQ ID NO: 5904 - DNA, 784 bp, Macaca Fascicularis
  misc_feature (1)...(784): n = A,T,C or G
tatagagtagannnngtagcttctgccatgagttatatgagtctagatcctgnnnaacccaaaattattagggnnnnnnnnnnnnnnnnnnnnnnnnnnnnnnnnnnnnnnnnnnnnnnnnnnnnnnnnnnnnnnnnnnnnnnnnnnnnnnnnnnnnnnnnnnnnnnnnnnnnnnnnncataactctagctgtatcatcctctcacctatcattcttccgagggtctcagtacaagggccctgggatggagccaacctgggtattcacaaaaggcctgacttgatactaagtgattggttttcctagttgtcccactgccattcaaagtcagcccttgagtgtatttgttctcagtcctaaccctggggccagagnnnnnnnnnnnnnnnnnnnnnnnnnnnnnnnnnnctcggtgttgctttctccaaatgattgcgttagactagccaaaaatgccatggcaaagagctcagaagtccagtttgnnnnnnnnnnnnnnntcatgttaatttctcagcccccaaagaagcatcttactcctgaaccttagacaggaagtattatttcagtcacagaaagcttttctgggtacctctggttagcactttctactctctgatatttcctatgtacatagcttgtattgttgtaaatcctttcttaatggttaaatacggattgttagcaactctggatttgcagttttctgaataggtgagttttnnnnnnnnnnnnnnnnnnnnnnnnnnnnnnnnnnnnnnnnnntttaatactaaaaataaa

SEQ ID NO: 5905 - DNA, 752 bp, Macaca Fascicularis
  misc_feature (1)...(752): n = A,T,C or G
gcccgtggaccnnnnnnnnnggggggtgncagnnnnnnnnnnnnnntnnnnnnnnnnnnnnnntcnnnnnnnnnnnnnnngccagtcctcaacattcagttnnnnnnnnnnnnnnnnnnnnnnnnnnnnnnnnnnnnnnnnnnnnnnnntctcaacaaattcttccagcnnnnnnnnnnnnnnnnnnnnnatttctttcaacgttnnnnnnnnnnnnnnnnnnnnnnnnnnnaggtgcagaacatcttcaaagcaaagcacccaatggacacagannnnnnnnnnnnnnnnnnnnnnnnnnnnnnnnnnnnnnnnnnnnnnnnnnnnnnnnnnaatcctgcaaatttcgtgggagctggaatcatccacacgaaaaccannnnnnnnnnnnnnnnnnnnnnnnnnnnnnnnnnnnnnnnnnnnnnnnnnnnnnnnnnnnnnnnncggacgagtaaggaagccgtttctcagagattatgtgaattgnnnnnnnnnnnnnnnnnnnnnnnnngatggaagaccaggcccgtgtgtcttgcgttgtcttcgtctgtgctgtttgtcttcgtnnnnnnnnnnnnnnnnnnnnnnnnnnnnnnnnnagacctctcccctttgggctggacaggaacacacgtgtgtggctcaggaagaaaagctcannnnnnnnnnnnnnnnnnacggcagaaggtggatcttgggatcagtttttataaaaatcaagacagttctgtggttcannnnnnnntaaa

SEQ ID NO: 5906 - DNA, 700 bp, Macaca Fascicularis
  misc_feature (1)...(700): n = A,T,C or G
gcatgtcagtcctnnnangcnnnnnnnnagtttcagactgcgnnnntctttgttgtgtcctcgaatggcagaagaagggtgagaaagccctttggggtctctttcatctgggcactaatctcatgattagtgagggctccaccctcacgacctaattacctcccaaaggccccacctcctaataccatcaccttgggagttaggatttcaacatatgaatgggggtgggggcacaaatattccttctataacaaatggcctgttnnnnnngttttaacatgattccctttaaatgtgagcaaacaagaagcatcttttcatatgttaaagccatagggttattcttctgtaagctctaggaaaacatgcaccccttggggcacgaggatctttgttcacaaagtgtatgccagacctccttagctctgcccctccctgcaccgtctcatttatcagagtgaatcttcatgcctgtgttctttctgcatttattctggtcccttccctcccatcataccccacagccatcttcctgtgtccctcccgcttcactgcttcattgaaatttctagagtatccaggtccatcgggggtggggcagtgttgtgaggattcaattcatgtgtccataggatggagcagcttcttaaccagctgcctttaatgaaaatcttctaacttccaatacagggtggctgtt

SEQ ID NO: 5907 - DNA, 399 bp, Macaca Fascicularis
aaaaggaagcgcgagccacgtacatcctcgtggcgcctggctaggggggcagaacagcggcgccccaagggtcctcgaggtcctatcggatcctgcagctccgtcccctgcgggtttccacgtataccagcagttgggggaagaactccgtcagcccagggcaggggcgggcactcagttggaccaggacctgcccgacgccccccggtccgctcgggcgaacgggtcgtcacttcctgtgatcagtttgggaaaaggccctgggggccctgccaccggagagtgtgggaacccagggttggaattcccgccccgacgctgcttccggaccgaaagccccctgaacgccttaccccatgtgcccttggcgtaggtttctccaccagtgaaacaatgatg

SEQ ID NO: 5908 - DNA, 732 bp, Macaca Fascicularis
  misc_feature (1)...(732): n = A,T,C or G
atctgtacatttccccatacactggattctcagnnnnnnnnnnnnnnnnnnnnnngggcttctgggactctggggggagggagaggaccttttaaatttctttttcatcatcctgccgtgtctggccttctcccatcaaatcaaagcccacgtgttaatgcatggcccaaaatagcagtgagcaagccnnnnnnnnnnnnnnnnnnnnnnnnnnnnnncaagaatggtgaggatggaaaggcatggggcatgggccaggagaggagggggaacacagcaaagggagcttcagctcaggcggcagacacaccgaggtgtcctacaatagcacggcagccnnnnnnnnnnnnnnnnnnnnnnnnnnnnnnnnnnnnnnnnnnnnnnnnnnnnnnnnnnnnactttctttttttctattgagtgcaggtgagaaactgtgaccctttagggataatnnnnnnnnnnnntttgtgtcggttattcctgnnnnnnnnnnnnnnnnnnnnnncttactaccttgtagcctctttaagcctcagcttgtgcatctggggtttaattatggtcccatgtcacagagccacaggggggatgaaatgagatggtacaggtgaaggacctagcagagtgccttgttggtattccaagcttaaggttgctgtgattatttcttgttcattgtttttaaattgccaaagcaaatcatgcttattgtaaaacatgtagcaatccga

SEQ ID NO: 5909 - DNA, 684 bp, Macaca Fascicularis
  misc_feature (1)...(684): n = A,T,C or G
atcaagagcnnnnnnnnnnnnnnnnnnnnnnnnnnnncgaaannntcaacaaccgtaactgccggagtctgagagacaaacccaaggtnnnnnnnnnnnnnnnctgccgaggcagtggtgctgggattgtttggttnnnnnnnnnnnnnnnnnnnnnnnnnnnnnnnnnnnnnnnnnnnnnnnnnnnnnnnnnnnnnnnnnnnnnnnnnnnnnnnnnnnnnnnnnnnnnnnnnnnnnnnnnnnnnttcaaatcttccacaccacgatattttaggtggagaaaagatttaaaatgctgagactttcataattagaaagctataaatcttgatttgggaagaaacgttcaaagttaacaggactttggaaggactttgataatgtttcttggaggcatgaaataagtggctctgtcttcatttcccaaattatctactacttcaaagagtattcttggagtcatcatctagaagaaatttttcgaaaggttcaacgttcatttgagacannnnnnnnnnnnnnnnnnnnnnnnnnnnntgaaagactatccatgacacgatatttctatctctttcctgggaattaaaactcataaaaagcaactcaggaannnnnnnnnnnnnnnnnnnnntatgaatctgctgtatgaaaaggtcaatttttgattaagaatatttttgtatc

SEQ ID NO: 5910 - DNA, 654 bp, Macaca Fascicularis
  misc_feature (1)...(654): n = A,T,C or G
ggagggtgaagagaaggggtgggtgggatgggggcacccctcagtannnnnnnnnnnnnnnnnnnnnnnnnnnnnnnnnnnnnnnnnnnnnnnnnnnnnnnnnnntctccttcacccgcctcttgttcactcgctcgcgnnnnnnnnnnnnnnnnnnnnnnnnnnnntgttcagggctgaggcgggcagagggaaaaccaggtggctgcagggcctccttnnnnnnnnnnnnnnggaggctgaagcagtnnnnnnnnnnnnnnnnnnnnnnnnnnnnnnagcagtccatgaggctgcgggaggcctggcccccaatggcctcnnnnnnnnnnnnnnnnnnnnnnnnnnnnnnnnnnnnnnnnacctttcccacagactctacttccccacaccgaggcagcagctctgtaaagaagccacaggaggccttgacagtaggtgcctcagggaacttgagggccagcacagcacactggaacacagcnnnnnnnnnnnatcgttcacacaggaacaaatctggnnnnnnnnnnnnnnnnnnnnnnnnnnnnnnnnnnnnnnnnnnnnnncagccagctccaaggaccatccccccactcacctgccaccctagcccccaacttcacacctcacaggtaaaggctgccaaaccagcta

SEQ ID NO: 5911 - DNA, 710 bp, Macaca Fascicularis
  misc_feature (1)...(710): n = A,T,C or G
caacatggtgaaannnnntcnnnnctaannnnnnnnnnnnnnnnnnnnnnnnnnnnnnnnnnnnnnnnnnnnnnnnnnnnnnnnnnnnnnnnnnnnnnnnnnnnnnnnnnnnnnnnnnnnnnnnnnnnnnnnnnnnnnnnnnnnnnnnnnnnnnnnnnnnnnnnnnnnnnnnnnntttaaaaaaaaaaataaatgtgttgtttactactcaccacagatctgcaggagttcactgatctctagggtctgccttaatgccagcttacgtggtttggtcactattacaaaccgtnnnnnnnnnnnnnnnntgcagaggctagggctaggacccagaccagtgtttccacatgggaattccctcnnnnnnnnnnnnnnnnaatgtatgttttttgaatccataaaccctagaaaaatcagttgaggaaatgagaagtattgtaattattctgtgaatactaacacttaccattatagagacattactagtttgaaagaatccaacttcatcaaatactaacatactgaattgaaggctgtaagaactgagacaggagtatagcagagagaaacagtcaccatctaattagccctacttttggttgctgtgatgtnnnnnnnnnnnnnnnnnnnnnnnnnnnnnnnnnnnnnnnnnnnnnnnnnnaaataaaatgatttgataaacaacctagcataccttatacaaatcttat

SEQ ID NO: 5912 - DNA, 1138 bp, Macaca Fascicularis
  misc_feature (1)...(1138): n = A,T,C or G
gaaacagatacccatagcattggagagaaaaacagctcacagtctgaggaagatgatattgagagaaggaaagaagttgaaagcatcttgaagaaaannnnnnnnnnnnnnnnnnnnnnnnnnnnnnnnnnngaaaatattccccccaaggagttcctctttaaacacccgaagcgcacggccaccctcagcatgaggaacacgagcgtcatgnnnnnnnnnnnnnnnnnnnnnnnnnnnnnnnnnaaagttttccttccgtctctgctgctctctcatttgctggccatcggattggggatctatattggaaggcgtctgacaacctccaccagcaccttttgannnnnnnnnnnnnnnnnnnnnngttcattagtgggattacttctgagcttgcaacgcagctcactgaagagctgttagatcctggggtggccgcgtcacttgtgtttatttgttctgtaaatgctgcgttcctaatttagtaaaacaaaacaacagacactaaaatcatgttgatctataattatacctatgaggtcaattaataagcatgtcagactgattaatatctattgtaaaaatttggtagtgaatttggatattagatataaatacctgaatataattttaatatcctattcatgatgtatgttgtattttaaaaattatctgcaaccttaattcagttgaagtactttatatttcaaaagaatgagtaacattgataataaaatcgctacttaaaggggtttgtccaaaataaatattgtggccttatatatcacactattgtagaaagtattatttaatttaaatggatgcaggttgtctactaaagattatacataactatgctaattgttcgtaatcaacagaaaccaagagagagctacaaactcagctgtaccgttcatacactaaactcttcttgcttttgcagtataaggaattaagtctccgatcattaggtaatcaccttggatgatcagtnnnnnnnnnnnnnnncctgctcagtgtcttttcctctttatcactctgcnnnnnnnnnnnnnnnnnnctcctttgtgcccaacttgtgtgtgcttttaaaatcagctttattctaagcaaatctgtgtctacttaaaagacggaa

SEQ ID NO: 5913 - DNA, 632 bp, Macaca Fascicularis
  misc_feature (1)...(632): n = A,T,C or G
gacaagtattcttagtccgttacccaaagaagaaatcaaggcacaaaaggtaaaaaggtttgtcttacagcatatattccacgacaaattgatctggaaatccaggccctccagccctgaacccaggcctcttttcattcatttctgggtcacaggnnnnnnnnnnnnnnntgttgactcgcacatccatatttcccttttcttttcgtttttacttttaaaaaccactgtagctttctgagtatgagaacattagtgcaacagagacatggagaagagtgttaacgacataaaaatatatgaataaatgtgaacttattgtgttataaatgtgaaataaaatcaggtctgaccatagagacagcatttaggacaaactgtattgtgtagcttgcctgatgtttttgtatggatgaaatcagatcagaattaagacaaacagcaaagtagaaatgggaaagaaatagtaaaaacatgtaacatacagcctagagggtatgtgttgtgaggaatggtaagagggaaaggcacctatatgcagaagtggagagaaattttgccatgttgatggttgggagagagcttgtgggctacagacatacttcagagatattgcagattcagtccagacc

SEQ ID NO: 5914 - DNA, 752 bp, Macaca Fascicularis
  misc_feature (1)...(752): n = A,T,C or G
acagcccgcagggggaaggtggcaaaggggagacagtcaccccacggccctcggctcattgccccaatccctcacaccacccagtgcagctttctggggaaaggnnnnnnntggggattgtcagagaagcgtttccagcctcaagtccaggcctgccctcccaaactttcctccttcctcgccactgcctgccatcccttctgaaccaaatttgtcctgggcctggaagagacaggtatcccatttggtcttggaacgcacagatctcgtggacaagtgatgggaaaaaattatctcacagtgtgatgataaaagtaactcagggggccaggtgcagtggcttatgcccgtagttccaataactcaggaggctgaggcgtgaggatcgcttgagcccaggagtttgaggctgcagtgagctatgattnnnnnnnnnnnnnnnagggtaaaacagcaagaccctttctctaaaaagtaaaaaagaaagaaannnnnnnnnnnnnnnnannntggctcatgcttgtaataccagtactttgggaggctgaggtaggaggatcgcttgagcctagaagttccagaccagtctgggcaacgtagggaggccccaaaaaatctaaaagttagccatgtgcgnnnnnnnnnnnnnntggtgccagctactcatgaggctgagttggggaaggattgcttgagcccaggagtttaaggccgtagcgtgccatgattgtgccactgctctccagcctggc

SEQ ID NO: 5915 - DNA, 720 bp, Macaca Fascicularis
  misc_feature (1)...(720): n = A,T,C or G
ccccagtttagnnnnnngccctgcaggctgtgtcctggcannnncnggagggaagcccacggccgggtaccggnnnngcagcgaatgtcttgctcatcccatgggtacagcccacagcttcttggctgaacatagaacttctttttctcacccagtataccagcctcttcctagtgattctgttttgctgttttggcaagaattacattttgttttgtttttaagagaaatttctgaatatgaatgtggagagcaaacacaaaaagatttaggttacgccnnnnnnnnnnnnnnnnnnnnnnnnnnnnnnnnnnnnnnnnnnnnnnnnnnnnnnnnnnnnnnnnnnnnnnnnnnnnnnnnnnnnnnnnnnnnnnnnnnnnnnnnnnnnnnnnnnnnnnnnnnnnnnnnnnnnnnnnnnnnnnnnnnnnnnnnnnnnnnnnnnnnnnnnnnnnnnnnnnnnnnnnnnnnnnnnnnnnnnnnnnnnnnnnnnnnnnnnnnnnnnnnnnnnnnnnnnnnnnnnnnnnnnnnnnnnnnnnnnnnnnnnnnnnnnnnnnnnncaaaaagatttaggttgcaaatgtttcaagcatgtgcagttttgtgtgtgtgtatacatatatatggtcagcatatatattgttgtgcagctagggcgaagccagcagaggtgtgtgtatgtctttatgaaatgtttgaaaagagataagctgactgcttgat

SEQ ID NO: 5916 - DNA, 1472 bp, Macaca Fascicularis
  misc_feature (1)...(1472): n = A,T,C or G
attgtttctaaagttgatactgtnggttatnnnnnnnnnnnnnnnnnnnnnnnggaccttttttcctcaaaataaacaagtcctnnnnaaaccaggaatttggagaaaaaaaaccctggttttttatttttgtattttattattgtttacttcaaactttgttttacagcgtcctccacaaaacctctagaatgtactagatacatttttcttggagtcataatcatgatacataccaacacaacactactcaaattatatttcattgagttgcatgttgcattgaggagtcaaataacttgacatacagtggcgattgtttttcaaaatggcttttacatcctaatgaaagttcagtgctttgtggtccaactggcaccctttttgaggtttttgttgtgtgctaaattgttttgtccttaaatagaagagactcaaaaacaagatttcaggaaaattgcaacagctgacaatgaactccccctgctttcttctgttttgttcttttaattactatttatagcctcagttaccttctgaattctgaagtgtatatctccatgttactgaaaacgagaaaactcttatttcctgatactccacagtcttgccttcccaggtgattgagaacataaagaatgttacatttattttaccctaaatgatcttttacccctattagctgatctttgtgttttccctcaactttattaattacagttattgtatttttagcatccagtcttacttaaaatgaatatattaaacagctaccagtgttgtgatacctcatccttgaaaggcttaattgatttgtgttnnaaacttcagtttttccagcacagcagaaaatggcgtttataattttcacaaaccttggattcccctataaagttgctattgtttcatagcatgcagcactggccttttttcatcctactcattacaggcgaaactcatgtcttatttataaggattttatagatcattttctatatcaggtgacaaaagcagaaaagaatgaagaggctgaactatgaactacccttggagcccatatacatgatataggcaatttcttttgtatgttaattcagtcaaaaatactacccacttgatgttttctgatctgatgtgagctcatgttacatagacttttagtaagtaacccatgactagaaaataaactggatgcttaggagagagtgtcagatgtataagatgctaataaaacatgtttaatattatgttgttagctgtaagtttttgggaaatactggaaaaattagtccataatcaagtgtctacttttcacttcactgtagggcctctttccccgcacagagcagtctatttagctgtgaataccacaatctgcagatgctcaagtcccttacataaaatggcatagtatttgtatgtaaccnnntgcatattcnnnntgtatactttaaatcatctctacattaaaa

SEQ ID NO: 5917 - DNA, 713 bp, Macaca Fascicularis
  misc_feature (1)...(713): n = A,T,C or G
tcagaatgtttctacattagtgagatggataacaataaagattgaggccaaattaatnntctgtattcaggggcctcaaaaagtatcatgtttagtgccgctttcataggcaaatctggcaaaaatgtttatctggttatgatcaccaagtcatagccacattctggcttatgggattcatgggaccagcatgaggtaaggaagagaggcataatgtttgtctctgctttgtttttattttaaagcccaaggtctttgtttttgaagtaacagcttaatttttcttcataatcaggagggttacttagatgctctcttcatgatttgttgaggttggaatgatttggcagtccctgaaatttattttggggaggaggtggcagaagagtggagtgtaccaggttatgagatttctcttaacccaccagcctaacttttgttctttctgcacctcagagacgaagaggagagatgatgatttctctttctcaaggccttcttattcttgctgtcctcttttttccggccaagattggccttgtttgtttgcagtaagatgcaagatgccacttgcataaatgtaacacctgccccaaaccacctgctccctccttctacttacccaccccacccttgatcctgccatctttcattattcatctgaaaattgcaccaatggaaaagcaacttanngagaaaggaaggattatgaa

SEQ ID NO: 5918 - DNA, 457 bp, Macaca Fascicularis
  misc_feature (1)...(457): n = A,T,C or G
caccctcacccccacaccgagagtgaggtgggcgtgccccaggcagcgtcctcagccctggccagctactgtgatgccatcttctcccccatccccttctctggggggccctcccgtcccccacccccaccccttagaccctaatcgggccccttttgttttcttcagttgtctcctcccatcttcagatcattcgaatcattttggggacttaatcatgtacatggacaagtgtaaattatgatttttggttttgttttgtgttattttttaannnnnnnnnnnnnnnnnnnnctatttaatttgaggttggtgttctatccgatggctgaagatagcagcaggttttgtttttttttttcatatgttgattttttcatttggatttttttattattattctttattgtcttttttttcccccccatcccctgtcttgagattttctgnnntgttt

SEQ ID NO: 5919 - DNA, 692 bp, Macaca Fascicularis
  misc_feature (1)...(692): n = A,T,C or G
gagtagctgggattacaggtacaccctaccacaccaggctaatgtttgtatttttagtagagacggnnnnnnnnnnnnnnnnnnnnnnnnnnnnnnnactcctgacttcgtgatccgcctgtcttggcctcctaaagnnnnnnnnnnnnnnncgtgaaccattgcacccggcccccaccgtcnnnnnnnnnnnnnnnnnnnnnnnnnnnnnnnnnnnnnnnnnnnnnnnnnnnnnnntctttctggctctaaatgactaaaannnnnnnnnnnnnnnnnnnnnnnnnnnnnnnnnnnnnnnntctgaccgtatgtcctccccttctctctgtgatctgctgcccctactttgcacctagtcctcagaggcaccgggccctgcacatnnnnnnnnnnnnnnnnnnnnnnnnnnnccctgtggannnnnnnnnnnnnnnnnnnnnnnnnnnnnnnnnnnntttcctcaaatatctcccacaaggtcttttctggccaccgagctagactcgcacctcctacagcactctctgttccnnnnnnnnnnnnnnnnnnnnnnnnnnnnnnnnnnnnnnnnnnnnnnnnnnnnnnnatttattgtgtttattttctgtatcttctccctacaatgtaagctacatgaggacagagactctgttttattccttgtaatataagcaggacctagaatagca

SEQ ID NO: 5920 - DNA, 750 bp, Macaca Fascicularis
  misc_feature (1)...(750): n = A,T,C or G
caataaacattaaatgtccatcctgtgccaggtactgtgcagatgttgagggatttcgagtctggnnnnnnnnnnnnnnnnnnnnnnnnnnnnnnnnnnnnnnnnnnnnnnnnnnnnnnnnnnnnnnnnttaaggtatagtgtnnnnnnnnnnnnnnncagcaatggaatcttttatannnnnnnnnggtttgtgtcttaaactaggtgttctaannnnnnnnnaagactttaccatacacannnnnnnnnnnnnnnnnnnnnnnnnnnnnnnnnnnnttctttgagaaagggcttttaggaactttatgttctaaaaaaattgtcttaataataataaaataaaagcaaaacctgtgactcatatgtccnnnnnnnnnnnnnnnnnnnnnagcccccagctgccaaaggttggcagtgatcctgcgagttcaagggctctttctccctggggatgtgctttgtggcttctctttacagctttgnnnnnnnnnnnnnnnnctgctgcatgtcgtttggaannnnnnnnnnnnnnnnagtgtctctgttttatatagaaacactttctcacttccaggggagaaggaaatgcagggcatatgatccggccctccccnnnnnnnnnnnnnnnnnnnnnnnnnnnnnnnnnnnnnnnnnnnnnnnnnnnnnnnnnnnnnnnnggctactttttcatgtgtgtatgagacagaaactaatccttcctatccttttaggataacacttttcatgg

SEQ ID NO: 5921 - DNA, 2592 bp, Macaca Fascicularis
gtaaattcttctctgtaagtaacttagctagtggcacagagtcaattaagggaagagaaattgttctctaccaaaaatccccattttctggaaatggatctggactgtctgatagtataaatttgcaggaatcagatacggttttactagctgaagacatgtcacgtaaacggtcagatgatagggtaaaaacacatttattttgcaatgaggactgtaatgagacaatggaaatagagaatgtggataataacaaaactgagacagaggatagaagaactcttgtattaaatttcaaatggcctccacttgtgaatgatgacatccatgcacctggtacatctaaaagcagtttgtctgatagccttgtatgtatatctgaaaaaaacttgccaggacacagtaaaaacacacctcttgcaatgtcagaagtagggaaagtacacaagaaggataatgaaataaatgtagggaaaattgagcttataccttccatgttagaaacggggaaaacaaacaaaaaggatgctgaattgaatattctgaaatacgaggcagtccctcctatgttagaaatgggaagagtacataaaatggatgctgaaatgaatgtcaagaaaactgaaccaaaagctaatgtttttaaaatgggagaggtataccaaatggatgctgagagctgtattgaaaaaactgagggatcacctgtcattttaggaatggaaaaagcttataagatgaagggtatattgtaaagactgagatggcacctgttacaattcacatggaaaatatttaccaaacgcatgctgaaggggatattggcaagactggggcaatacccttgtcagaattggaaaatatctaccgaaaagatggtgaagggattagtgaaaaggctaaaggaatacccattacattagcagtggaaaatgcttaccaaaaggatgctgaaggggatattgcaaaggctgaagtgatgcctgtgaggttagaaatggaaaatacttacccaacggatactgaaagagatagtggcaaaactgaggtgatgcccattgcattagaggtagtaaatacttaccaaagaaatgccgaagggtttactgggaacactgagggatctatgttgaaaatggaagctacttgccaaaagactgctgaagaggtcattaagaatactgaaatagtaccgtgtgtgttaaaagtgaaggaagcacacgaggcagcacctgcccccttagaaatagaaaaagcatgcaagagagatgttaaagacactattggagcaactgtgtccttaccctctgtgatagaaatggaaaaaatatccccagaagattgtggtgagaatattgggaaacacgaagtgttacccacagtggtagacattgagaaaatacatggaccaggactgggattgaccattacacaagtggaggccatgcctcctgcatttgaaagtaaaacactacaagagtatgctgaagggagtgttggagaaacaaaggaagaacctactgaaataaaggaaggcttgatagcacatgagaatagacttgctacacatttcaggggttatgaatcccctacattaagtaaggattatgagggctacccagccccagcaatgccagattttcaacctggagataccatagtaagactagacaaaagaatgtctcttactgcaatacatgacaagaggagagagacagattatagtggcaaaaaaggatataatttagcttttgtttctcaagatgaacaagaaaattcttcctttactatattatacgaagagccccttcaagaagaggacaagtatgcttccgcggaagcaagccaaacacggtctgtctggtttcctgatacgtcccctgacagcatgcctgttctggcatgtgaaaggtctgagagtagaactgaccttacttcctgcggttgcccagcatctaaagtcaaatctctcaagcccattgactatgtttttgaagaaccctccatcagcctttttgctctggagcattgtgagggaagagagttacatctagaagaggctgtgaactctgttctgaacaaggacctgcacttctacacccagtctgtgtgggtaaaaagtggactatggatagcttatgaaggatccaatttcttgggaaggcaaatcctactcaggcctaatgagatcccaaactggacagcattcagcagatggaagacaattggttccctccgtcctatgaagcagcctgcagtgtacatcagaataaagaaccgtgcctctcattgtgggggagtattatttaataaaatttatgttacaggataacttttagtgggcatgggcttgtctatacacaaaggtatgtatattttcattgtaaaaaaacaatttaaaattttttattttaattgttggaaatttttctagagccaaagcagctctttaaagaagttgtttcttccaaagaacaaagccaggttaatgacattcaattctaaatgatacattggaattgtgccttttctaccacactggattaaataaacttgtcaaaatatggttttttcaaaaaaaaaaaaaaaaaa

SEQ ID NO: 5922 - DNA, 894 bp, Macaca Fascicularis
  misc_feature (1)...(894): n = A,T,C or G
gatggctgtgctgtatgctggaggggagggcannnnnnngggagaacagcacttctttcatgagaccttngttgttattcggtggttactggatcctgtgcctgtcagttttggagcatgcagccgtctatcattttttgctctgagaagagggcaaggggcccctgcagggcacttctgtgcttgccctcgccctgccagtaggcagctgtgcccctggcctgcccttcccgggaccccttattccaactcagctcctccttgcactggaatgggggcactccagcacccctcagggaccacccaccccacagtatgcactcagccccacagaacccaccagtctttctgggaactcacacctgcccgccatctcggtactttaaattaatccttcaagcatgaaagttgtatctttcggggtggggcaaatttaagaagaccatttcttgttcctgccctggcctagggagcactcaggaaggttccttggtcctcatctctcccacctccgttcctctttgggccccacactagccacagcgcgggccttgtgctggaatttgagcctgggagagggagacggtctgacccaatgcactccaggcttcccacttctaggcctgttctgccgctgtggagccctgggcaaaccccttcccctttgtgggcctgggtctccccatctcttcaatggggctgatacctccacagcccacnnnnnnnnnncttatgagtacaaagtgaatttaacctggaaaataatgtatttgagagtttcttttaaataatcagcgggtgttggtgatttctagcccttctgcccttaaatgcctccttgggcaagagttgtctgtcctccctgcaggaggctgggtgtgaagagtataattc

SEQ ID NO: 5923 - DNA, 687 bp, Macaca Fascicularis
  misc_feature (1)...(687): n = A,T,C or G
aggctgaggcaggtggatcannngaggtcagaagttcannnnnnnnnnnnnnnnnnnnnnnnnnnnnnnnnnnnnnnnnnnnnnnannnnnnnnnnnnnnnnnnnnnnnnnnnnnnnnnnnnnnnnnnnnnnnnnnnnnnnnnnnnnnnnnnnnnnnnnnnnnnnnnnnnnnnnnnnnnnnnnnnnnnnnnnnnnnnnnnnnnnnnnnnnnnnnnnnnnnnnnnnnnnnnnnnnnnnnncaaaaaataataaataaataaatattagcttnnnnnnnnnnnnnnnnnnnnnnnnactccctcatctgtctttgaccatggcaatgtccctggttcttgtggggcaccccagagaatgaacatgacttccagtcacctcattctacatccgcacatacatgtggagacgttgcacgcagacccacccacctcctcccatgtgcttgtgaggtcctcaggttcacagctgaggaaagcagagtcccagactgggcaatctgtgtgctttgggggcatgtggacatgagagacgagtgaggatggtctttaaagcagtggtgggatggtggggaagggcagttttcatgatggttaagagcacagggcttcgagtcnnnnnnnnnnnnnnnnnnnnnnnnnctccaccattttctagttgtacaatcttggggaagtgatttttccttcg

SEQ ID NO: 5924 - DNA, 731 bp, Macaca Fascicularis
  misc_feature (1)...(731): n = A,T,C or G
ttcctcttacacgaaaccatcaaaacaagaacagagaagggctgaacatctgtccaaaccccatgttctcagggnnnnnnnnnnnnnnnnnnnnnnnnnnnnnnnnnnnnnnnnnnnnnnnnnnnnntcctcaccccctggcctgaggtcttcacagattggtggcttgnnnnnnnnnnnnnnnnnnnnnnnnnnnnnnnnnnnnnngtaaggcaggaaannnnnnnnnnnnnnncctcnnnnnnnnnnnnnnnnnntcagcccatagatgtactgcaccttctgtactacaggagcagaacannnnnnnnnnnccaaggctctggacacttgcacgnnnnnnnnnnnnnnnnnnnnnnnnnngcggcctgtggggttgtgaatagcagaacagactggtgctgtcannnnnnnnnnnnnnnnnnnnnnnnnnnnnnnnnnnnnnnnnnnnnnnnnnnnnnnnnnnnnnngnnnnnnnnnnnnnnnnntgggctgcttaatagggaagaggatgggaaaccatgagaacatcccaggagagtgagtctctggnnnnnnnnnnnnnnnnnnnnnnnnnnnnnnnncagtctcaaagtagcctgcaaagccatgcagtactgtgttcacctccacgggaaactccaaggtgcaatagcggttgttgtcaatcataggatctctgttgggatggctgannntgaaacnnngctgnnncgcnnnnnnctggtgga

SEQ ID NO: 5925 - DNA, 726 bp, Macaca Fascicularis
  misc_feature (1)...(726): n = A,T,C or G
cagtaggtgcctcatgcccttccagtgcaatgcaagcnntccagcctcacccccgcgaggatgtcagcagcagcctgaggctaaatccaggttgaaaaaagagtaacttgaaaaaatatatttgcacacacagaattttgtttttcttccaagttggttaagacatatattttctttctttctttcttttttgtttttgagttggtcttgctctgtagcccaggctgaagcgcagtggcatgatctcggctcacttcaagctccgcctcctgagttcacgtcattctcctgcctcagccttataggtagctgggactataggcgcccgccaccatgcccagctaatttttgtatttttagtagagacggtttcaccgtgttagccaggatggtctccatctcctgacctcatgattcgccccccttggcctcccaaagtgctgagattacaggcataagccactgcgcctggctacaagacatatattttctatatgtacatcaagggaggttgtgttttaggttgctataggacaggtatcctgtattccagttggtttttatagagaaacaattagacttctctagatagagccctgattttctcttacgctttcacttttttaaaagcactgatgatatttcctattttctcataagaaaacgtcaatactatgccttacaaagagacttttccttctaatgtagaattttatttgaaagtaa

SEQ ID NO: 5926 - DNA, 734 bp, Macaca Fascicularis
  misc_feature (1)...(734): n = A,T,C or G
gccaaccaccttgacttgttttttgcaaaggccttcagaagcaaacaaaaagctttgtccatggtgggttcnnnggggacgtcctggagcctctgctgtcccacagccacatttgtctctccccacctcgtaatgcatgagtcaccctccatcctcctaggaaggcaagtgctccccctgccactcacagcctagggcaagccctttggttaccttttcatgatgctgtgtttcctgagcacagaacacggaaaccaggaggaggctgcatgatagaggctgagcctctacatgaccnnnnnnnnnnnnnnnnnnnnnnnnnnnnnnnnnnnnnnnnnnnnnnnnnnnnnnnnnnnnnnnnnnnnnnnngcacaacttcaccctatcctcagagaatgcagttgctcccagggaccgcggaatgtgaccatcaggctctatnnnnnnnnnnnnnnnnnnncatcacagcctaggtcctcattcatgagaggaagctcagctccggctgcctgtctacgggaaggccagcgaggcagtggcacattcctcatcatctgggtgactcatcagtgtgagagtggctccgcaatacgtaccctccggtggaactcccgacgatttttagcatctggtgtttgtccttccactcttccttttcaacacgatgtgtgtgcaccatggagcgcactgctcctcatgctcacactgactccagcacgggnnnagcctgacat

SEQ ID NO: 5927 - DNA, 1739 bp, Macaca Fascicularis
aacagtgggaagatcctgcaggtacacaattctaatgcctctatgtgcgtattaggaatgtgatacattaaaaatgtccaacaatagggataaactagtcaattgggcatttgatgagtattaactgatgatggtaaagaaacaatttagagtacgttattaagtgcttaatgggttaattttggagcatgtattttaaagtgtaaaactacttggcttttatttcatttggaacacaattgtgaaggaaatcagtgaaattcttgggttacttatatacttgttttacatatagaatttccatcatcatcaaagaagtcttatgccatgattgagggaagggtatggttttagagaaaaaacactaagcagtcttaataatacacaggattctgccaagcttattacagtttctagaatggacaaccactaataattaagaaacccaactctcatctgttattacacaagaaacccaattaggttaaagtttgatgttttcagactctaaagcctgtttttgtaacttaattggacttttggagtgttaaattatggcttcagagtttgactctacctaaaatttagttagatgacaactagggagaaattaaacctaatccttcaccccaaatatcagagattagacaaacctatgttaattggggccttatggatattcatattggaggcaatagctttattcagagtaagcccaggacagggctgtctgggatgctagttctggaaatgcagaagcggccactgtatccctgcccaccccctccatccagcccttttggtaccactcagtatcattgacaacatttggaatcataagtaacataggacagtaagtattacagaatgattctcgattagaattggacctcagccaatttgagtcaaaatttaagaactattcagaagaaagtttctttcttttgagtgcctaagacagtgtaaatggtttgaatcacacaaattttatgattccaatgtatatataagcattttaagaatattgttttaacataataattaggcatactaagttatcgtgaatgaaaatgtatgtgtgacctgtagtatgtcatatattattatggctaaacattaaatgtttcttttttagttttatgtatttgtgtatatatatacccacatttttacattgatttatgttctaaataataattaaaacaaagtattatagaatgaatgaaatctttttgtgttccagggtcaaattattaataacaaattcagaaaagaaaatctgaggataaatctgatataaaaaccagaatgattattattaatacaaaataattaatattttcacatatgaaggtagttgtcttcatactacaggatttctgacttgaatatattctataatgctttaattcattgccataacaaatgtactaagaattaatgttgcatcttaagtattccattttttgaaactttttcaaatgttctatatctcctagcttattatgctatgtaaaataatttcagtgtgttttttcctagggcaattgaatgattcttgttttgaatgggtgttaaaatgttttgtgatagtatctaatattttatccttgacagaaaaaatggcttctggtattatattgaaaaaactattgtattttttcctcagttttactgtgtgttggcttgtttctataaataaaaataagttttacaaaaaaaaaaaaaaaaaaaaaaaa

SEQ ID NO: 5928 - DNA, 704 bp, Macaca Fascicularis
  misc_feature (1)...(704): n = A,T,C or G
cagttgggannncatcnnnnntccttggttcacacatacataagcaactgtctgagcttaccctcctggttcaactgaagcagtgtttacacacnnnacacacacacacacacacacacacacacacacacacacacacacagtcattttgtctgttctgactttctgtacagaattaaggcaacaggaaggatacatgaaatcaagggacaaaagctatattcctaccatccacctggtggcagtatttcctaaatgttggcagaatatccaggcagtaataggtaccttctgttatttcaatagtattttctatgtaaatccaatcctataaagtggtgtacaatgtcacagtgaatgacaaaaagaattattattctggcaaaagctaggtcaatgcagctgtatggtaattctagaagtctccttcgaggatttccaaaataaatatctttgtttaaaaacaaaaaaactatttttaaaaagcttgtaaaattaatttttctcattaagaatattataagattgcagacatttttagaaatagagaaaagaagtcacatatgtttttactaacatagcctgttagcttattgttaggctcctttctgatccttttttctctaagcacatttttataattgtaatcaagctatacataaaattggcttataccctcctcttggcattaatcacatgaaaaa

SEQ ID NO: 5929 - DNA, 743 bp, Macaca Fascicularis
  misc_feature (1)...(743): n = A,T,C or G
gtcagggaaaggcctggcagcccagaagccaagctangtcctccacccccgcagatcccaggaacctgtagtgctgtctcatcttccaggcccctctagtcttcggtcccttttggaaaggggcatgccacaccccatgccctccatggcctccgcccctctcctcctcccatcagctgttcagtgctcaggcaggctgctaggccttaggcagaggcagctgcagcgagacgcctcagtccaacttcagttctcggaaccccccgctccatgctaacactgggctcnnnnnnnnnnnnnnnnnnnnnnnnnnnnnnnnnnnnncactctgtgacatttctgtcccgtgctgccctggtggggagcagagaccgtgccaagggctgattggtgacaaatctcagccctctccccaaaccaccccagcacacgtgtgctcatcaccgagacagccctctcgcccctccccttccagccagccagccagccagtcacccactcctccaggtgggaatcctgcagcagnnnnnnnnnnnnnnnnnnnnnnnngccctccagcgcctggcaactaggaggcgctcagcaaatgaccatttcccacaatcttttattaagaaaaattccaaacatacagaaaagttgaaagaacaagtacactgttcactgaaataccagccactgcagattcaacaatgaacattttggccttatttgctttgtgtattttggggggaaccattgga

SEQ ID NO: 5930 - DNA, 704 bp, Macaca Fascicularis
  misc_feature (1)...(704): n = A,T,C or G
tgagaatactagatactaatatttgttggagtggacagtagcaagttatataaaaagatggtaaaatatgaactacagagatgtcaattacttgtccagaaaaaaaatatttcaaatagaaataacttttgcatagaaatcacccaattggttctcaaccctgactgtcggctataatcannnnnnnnnnnnnnnaacgtacatatacctggttttcacctccagagagtccatttccattggtctgggataaggccctagcatcagtcttttaagaactcccatatgattctgttttacagccagtgttgaaaaccactaatttaagtgaatatttttatcctgtagatatcacctcagggcctttggaggcatctgacagattgtgagaaagagccatgtgagaacttggagtcatcatatgacttgctcaaagaaaatcatgttaaaaatcacttcgtttcattttataatattgtattatacgtgactttctctttatttatcaggcatctcttttccttaaaggccattgccctcttcacttcatgtcaaatttagttgtagttggtttgtttcccatattgccataacttcctcacctaaactgttaacctttcgacattcagtcctcattagagtctctcccgagtgaatctttccattccctgttctttcagtttcatgacctattctcctccttt

SEQ ID NO: 5931 - DNA, 689 bp, Macaca Fascicularis
  misc_feature (1)...(689): n = A,T,C or G
gttgcctaggattgtctggaactcctgggctcaagccatcctgtagccttaacctcctannnnnnnnnnntcataggcaggagccactgcacccggcctgctctgccgcttttaaggacgcttgtgatcgcgttgcgcctacccagagaacccaggtcatctttctattttaaggttagctgattagccaccttagttccatctgcaactttaattcccactggctgtgtaacctaacatggtcacgggctctggggactgtcacatggacatctttgggaggctgttcctctgcccaccggagcctccgttcatcccctgccctgcagagcacctggctgtaccccaggaaaatgtgagctcgttttcctgctcggcctgtgctacccctaaggccctgctcctccctgggcccgaaagttccttctcagcccgacagggggcccttcagactcaggcttgactcagccccgttgatgcctcggcagggctgaggctgggtttccggcgggctctcttggctccgtcccctttccccaggtactggcttacaaagctgtggccagaaactggcccatatagatgatgcccaaggtctttgtacatttgtaggagttcgtgtgtttgatattgttaatataataattttttatagtactgcttttgtatgtatgtaaaacaagggtcca

SEQ ID NO: 5932 - DNA, 686 bp, Macaca Fascicularis
tgtgcatgcacatccttctgaatacctgtatttccaagaggtggtctcctgttttcataacccgacactctgagatgggatcttcaaactttttagccctggctgtggaaagatagtgagtacgaagtctttgtgcatttggaagtgacatcgctgtgtgaattatgaacacagagagcttccatcttcctgatcacagtagaccacgatcgcaaagcctcctctcccagagaccccttctgcacctgccctccccacccaccacccagctgttgaagctcagcgtgtgcaagtcagaccctgcacaggccgggggtgtctcacctggcctaaacataaaggcttgtgccggagacagtgattgaaaacatttgaaaagccagctctccctggcagagaaagacacttcccccgaagtggaatctagacgtctttccccagtccatcaagaagtcatttttgtaacagtctctaagcaagtgttctcaattagaagagtttagtggctgttggtgttgttaaataataataatccttctagcatccaaaactttctaattttttttcagggagatttggacattaatgaatggaaacttccatggtggcggtcactcctgaaggcagcggcttccattctcccactgctctaactctgtgtgttccgtctaccgtgtcacagtgcc

SEQ ID NO: 5933 - DNA, 698 bp, Macaca Fascicularis
  misc_feature (1)...(698): n = A,T,C or G
gccnnnnnnnnnnnnnnnnnnnnnnnnnnnnnnnnnnnnnnnnnnnnnnnnnnnnnnnnnnnnnnnnnnnnnnnnnnnnnnnnnnnnnnnnnctgctgccctgcagacggcccacgaccacgtggccatcggtgcggactnnnnnnnnnnnnnnnnnnnnnnnnnnnnnnnnnnnnnnnnnnnnnnnnnnnnnnnnnnnnnnnnnnnnnnnnnnnnnnnnnnnnnnnnnnnnnnnnnnnnnnnnnnnnnnnnnnnnnnnnnnnnnnnnnnnnnnnnnnnntgtggggccataaccnnnnnnnnnnnnnnnnnnnnnnnnnnnnnnnnnnnnnnnnnnnnnnnnnnnnnnnnnnnnnnnnnnnnnnnnnnnnnnnnnnnnnnnnnnnnnnnnnnnnnnnnnnnnnnnnnnnnnncgcagacagacctgttnnnnnnnnnnnnnnnnagaaagannnnnnnnnnnnnnnnnnnnnnnnnnnnnnnnnnnnnnnnnnnnnnnnnnnnnnnnnnnnnnnnnnnnnnnnnnnnnnnnnnnnnnnnnnnnnnnnnnnnnnnnnnnnnnnngatgtnnnnnnnnnntgggccgtggccagtgctggcctcccccgcccacgtcctccgttgatacagcttctctggagaccctannnnnnnnnnnnnnntgccctcaacctgcctgcctggattgcacctttctg

SEQ ID NO: 5934 - DNA, 742 bp, Macaca Fascicularis
  misc_feature (1)...(742): n = A,T,C or G
tcatcaacccattttcattgccaatatctgtaagtatgtgcactgcatgaggacagccctaatagtctccnnnctgctgccactgcctgattctctactctgtccccacttgccagtgatgtttggatttatcannnnnnnnnnnnnnnnnnnnnnnnnnnnnnnnnnnnnnnnnnnnnnnnnnnnnnnnnnnnnnnnnnnnnnnnnnagcttataaatagctggcagggcatgaggagatgattttctnnnnnnnnnnnnnnnnnnnnnnnnnnnnnnnnnnnnnnnnnnnagtaccctttgannnnnnnnnnnnnnnnnnnnnnnnnnnnntttccnnnnnnnnnnnnnnnnnnnnctcccttcnnnnnnnnnnnngtgttaactagtttagcaaatgctgtaaannnnnnnnnnnnnnnnnnnnnnnnnnnnnnnnnnnctaagatcttacagggcacannnnnnnnnnnnnnnnnnnnnnnnnnnnnnnnnggaggggaagaaggccactgatgagactgctgacctcctcagaatgttgacctcttttagagagactgcctcccagtgtaagtggctcattgttccttctgactctctctaaaatggctctggaggacagctcnnnnnnnnnnnnnnnnnnnnnnnnnnnnnnnnnnnnnnnnnnnnnnnnnnnnnnnnnnnnnnnnnnnnnnnnnnnnnnnnnnnnnnnnnnnngtatgtatttttttagctgtat

SEQ ID NO: 5935 - DNA, 714 bp, Macaca Fascicularis
  misc_feature (1)...(714): n = A,T,C or G
aactgtagctgataacatgacctggggcttagctgctctagccctgggttcttgaagacctcactgcctggcccctggtcatccgcctaatgactgcatgctttctggtcacatgtggaccttgacatgaccaagcagttatatatgtggttgcgcaaaagctttctgtttaatgcgtagtgttattacatcttggttttcagtggcactatgtctagaaggcaaaatccttttaaacagtgctttggctaagatagatacttgtgaatcaaagatggcaaagaaatgaactaagtatattccatttggaattatattttgatactaagtgaattcttcctaatatttaaaatggtttcaccnnnnnnnnnnnnnnnnnnnnnnnnnnnnnnnnnnnnnnnnnnnnnnnnnnnnnnnnnnnnnnnntgtttgagtgcttgtcatcaggtgttttccttaataagtagggatatgatcagttacaggaattatacatgaaaaaagtttttgaaatgtatttttgtgatgtgctatgtcgagaggaaaccaaatatttatgattttaaaacattcgtatgaaaccattgtacaatgtaatatgctcaactttctcaattttttgctgatttttctannnnnnnnnnnnnnnnnnnngtatttttttttttaagtaaaatggacccagtaagaaaattaaaaataccagaatataca

SEQ ID NO: 5936 - DNA, 712 bp, Macaca Fascicularis
gacaggtaggtccaggtgccacttgggtagctggctgtggaatgcccaaactggtgctgcctgtggcatagccactgctgtacgtttctggttgtttttaagaaactcgatgaagaggggtgtcattcttggctcggggtggttgccaatttttcaccagaaagggagccacaccctgcaaccacttctgtccccgttagcccccctctgacctccaagccaaagcgtggcctggcttttgtcttcccatttagttttcctcttttgcccttccttttgtgcttaatttattaaaatagttgctgtataatttattttcataaactataaaaaaatactaaatggttaaaatagacttgcaggccaatcttaaatggggtggggggtctgagggtgggatggggaaagggaaagaggttttgatataaacaaaacaaatgcactttgggtgtgttttggtatttttctggggatagagggggtggggttagggatgtccctgtagattagttccagaatggggtgtctgtatatactgtattaataggcatgtttgactctcgtaaagggacattagtagctgctgcaggtcctgtttggaaaccccatgtacaattcccagttttttgtaagtgtcagtgcgagagacatttgactcttgtgtttgtatctcctttttatgattgctgtacctacccatgtctttttgggg

SEQ ID NO: 5937 - DNA, 694 bp, Macaca Fascicularis
  misc_feature (1)...(694): n = A,T,C or G
ggccggccagcaagaaggcacagtccaggcaagtctgggagcttccaagcccttgaggtccagctgtggggcccgaatgacagccttacaagggctctaccagagaggaaaattccacactccaccagaaaacggggggtgctggcaggcatactcctgtctcccccttttggctctcaatgctgaggcttgcagaggcatcccagtggcaccagcctcccactgcacagcttccttccctccttctctctcatctcccctccctgcnnnnnnnnnnnnnnnnnnnnnnnnnnnncattagattcattcatctcattttccaggacatgctggccagaggtcggggcccccaggcctcaaggccctccaggcctgtggggagcactggcgggttactgactctcaggccatgggaactcagatattctcatccccgaagtcccaaaagagggtgctgattggtgctttccctcaggctcttcattggtttccaagggagcaaatcctcagtggggatacaagatatataaagtatatattattttttcataacttatgtggcttttaacttattgcttcccttcctgtttctgcatgatcagtctgtatgtactatctggatagatagcacacgctccagccacctcacctgattggctatcttggggccatgtccccttctcgctgccacagg

SEQ ID NO: 5938 - DNA, 3204 bp, Macaca Fascicularis
ctgaagaagaggttgtgattagcataaattccctgggccaattatactttgagcatttacagattcttcacaaacaaagagctgctaaagaaaatgaggaggaggcatcagtggacacctctcaggaaaatcaagaggatctgggcctgtgggaagagaaatttggaaaatttgtggatatcaaagctaatggtccttcttccattggtttggatttctccttgcatggatttgagcatctctatgggatcccacaacatgcagaatcacaccaacttaaaaatactggtgatgaagatgcttaccgtctttataacctggatgtctatggataccaaatatatgataaaatgggcatttatggttcagtaccttatctcctggcccacaaactgggcagaactataggcattttctggctgaatgcctcagaaacactagtggagatcaatacagagcctgcagtagagtatacactgtcccagatgggcccagttgctgctaaacaaaaggtcagatctcgaactcatgtgcactggatgtcagaaagtggaatcattgatgtttttctgctgacaggacctacaccttctgatgtcttcaaacagtactcacaccttacaggcacacaagccatgccccctcttttctctttgggataccaccagtgccgctggaactatgaagatgagcaggacgtaaaagcagtggatgcagggtttgatgagcatgacattccttatgatgccatgtggctggacatagagcacactgagggcaagaggtacttcacctgggacaaaaaaagattcccaaaccccgagaggatgcaagagctgcttaggagcaaaaagcgtaagcttgtggtcatcagtgatccccacatcaagattgatcctgactactcagtatatgtgaaggccaaagatcagggcttctttgtgaagaatcaggaaggggaagactttgaaggagtgtgctggccaggtctctcctcttacctggatttcaccaatcccaaggtcagagagtggtattcaagtctttttgctttccctgtttatcagggatctacggatatcctcttcctttggaatgacatgaatgagccctctgtctttagaaggccagagcaaaccatgcagaagaatgccattcatcatggcaattgggagcacagagaactccacaacatctacggtttttatcatcaaatggccactgcagaaggactgatacagcgatctggagggaaggagagaccctttgttcttacacgttctttctttgctggatcacaaaagtatggtgctgtgtggacaggcgacaacacagcagaatggagctacctgaaaatttctatcccaatgttactcactctcagcattactgggatctctttttgtggagctgacataggcgggttcattgggaatccagagacagagctgctagtgcgttggtaccaggccggagcctaccagcccttcttccgtggccatgccaccatgaatgccaagcgacgggagccctggctttttgggaaggaacacacccggctcatccgagaagccatcagagagcgctatggcctcttgccatattggtattctctgttctaccatgcacacgtggcttcccaacctgtcatgaggcctctgtgggtggagttcccagatgaactaaagacttttgatatggaagatgaatacatgctggggagtgcattattggttcatccagtcacagaaccaaaagccaccacagttgatgtgtttcttccgggatcaaatgaggtctggtatgactataagacatttgctcattgggaaggagggtgtactgtaaagatcccagtagccttggacactattccagtgtttcagcgaggtggaagtgtggtaccaataaagacaactgtaggaaaatccacaggctggatgactgaatcctcctatggactccgggttgctctaagcactaagggttcttcagtgggtgagttgtatcttgatgatggccattcattccaatacctccaccagaagcaatttttgcacaggaagttttcattctgttccagcgttttgatcaatagttctgccgaccagagaggtcattatcccagcaagtgtgtggtggagcagatcttggtcttaggcctcaggaaggagccatcttttgtgactacccactcatctgatggtaaagatcagcctgtggcttttacgtattgtgccaaaacgtccagcctgagcctggagaagctctcgctcaacattgccactgactgggaggtccgcatcatatgacaaagaactgcccctggtgatgtgagcagggacctgccagtccctttcaaccttcccctcgccttttttgagatttgtgcagcaatctacttgcctttcctgagtcaaaataatctttcattcgtcaccattatactaatgaacaatagatttcatgttttaaattttcagattttacatgttaagatgtactagcaatattccttgtgtcaaacatccccttttctcccggatacatagccctgagacatagcgttcaagagtcttctgttgcttccattgcttgagcaaggctgcatggttctgttttaatgtgggccaagcctacctgggcagcccctttgccagggcttgcctcgggccatgtagcattggcgttgtggctgcagcaactgagttgctcaaggccagtctccaagtggacagcagcctctgatagtccccacagttatcttccacccacatggactgggcaaagcagccctcttctgtgtgcactgcatacgctgcagcagtgggagttattctcccctagagatccacttggcagcacgaaggattcttttctctttcgtgcttctcaggctcaatagtttctagttaatcttaaaatccatgtcttttaaattgttttttaattaagtgctgtctgctaaccaaagaatatttgtaacatgagtaagctatgattaataacaatgaaatgaatacccatgtacccaccactggatttccgaagtagaactcatgactgggactaggatgaggcaagggaggccctggccttgggcacaaaatgtaagggatgccaaaaaatacagtaatcaaaataagtaatatttcaatccactatttttaaaaatcagaattaatgcaaaaaaaaaaaaaaaaa

SEQ ID NO: 5939 - DNA, 675 bp, Macaca Fascicularis
atgcagatggtttacactgttctctgactgatgactgggagtcggggaagatgaatgcagaatctgtaatcacctcctcttccagccacatcatatctcagcctcctggaggaaacacccacagtttgtctcctcagtcccagttgacagcttctgaacgtttccaggagaatagttcggatcattcagaaaccagtttgttgcaagaggtcttctttcagaccatcctgcttgctgtgtgcttaatcatttctgcatgtgcaagatggtttatgggagaaatattagccagtgtcttcacgtgttcattgatgataactatagcttatgtgaaatcattgtttctcagccttgccagctatttcaaaaccactgcctgtgctcgaattctagaggctgcaaagctcaagatcgaggtgccagctgattctgtgtctggtgagggctaacttcctggtttgcacatggcagtcttcttgtttcagcttcacaagttggaaagaaagatccagggtctcctcttctttttataagggagcaaaccccattcatagaagacacattatcatgaccagatcattttccaaagtccccacctccaaataccataacattggggactagagcttcagcatatgaatcttatggggacaaaaacatttggtacataatacc

SEQ ID NO: 5940 - DNA, 730 bp, Macaca Fascicularis
  misc_feature (1)...(730): n = A,T,C or G
gaggtgggcagttcagtatctgcnnnnnnnnnnnnnnnnnnnnnnnatttgaatatcagtggtgttatcttttaagttgtcagcaagttaccaagtattcattaaagaaattgtgatatcaaattactgtttattcataacannnnnnnnnnnnnnnnnaataattttctttaaactctaccattcattatgtggtaactgtattggacttactttatttggattttattttaatgtgactagatgtcaccacttgaaaaaatcaatttgttcttagaacctgnnnnnnnnnnnnnnnnnnnnnnnnnnnnnnnnnnnnnnnnnnnntttttttgnnnnnnnnnnnnnnnnnnnnnnnnnnnnnnnnnnnnnnnnnnnnnnnnnnnnnnnnnnnnnnnnnnnnnnnnnnnnnnnnnnnnnnnnnnnnnnnnnnnnnnnnnnnnnnnnnnnnnnnnnnnnnnnnnnnnnnnnnnnnnnnnnnnnnnnnnnnnnnnnnnnnnnnnnnnnnnnnnnnnnnnnnnnnnnnnnnnnnnnnnnnnncaatctcctgacatcgtgatccgcccacctcggtctcccaaagtgctgnnnnnnnnnncgtgagccaccgtgcccggcccaagtattttttattcaggacggcataacttaactgataatatgtaataaagttaaatttttttatgatgtgttttatctacaaaatatgcacacgccactgcactccagc

SEQ ID NO: 5941 - DNA, 291 bp, Macaca Fascicularis
tgccacctggagccacgcagacaaatcgggagccggcgctggctcggtgatctgtgattagctttgtggctcagatgcgcttcctggacagtgggctccctgctcacaaaatgagaaacgtctttctcgcggcgccgttcctcctgattccgggtcacctcagaggccctaaaccatccctgcttcctttgctcttcgaatgagcagacagcaggacgcacctgcatccctgaacccgggcgctttatgccgagagcgccacgcgggttattcttcctctttatgtcatct

SEQ ID NO: 5942 - DNA, 616 bp, Macaca Fascicularis
aagtggtgtcagctgtggggaacttgggccctcattcgttacctgcatccggccctgcagtcaggtgctcccctgtaagtcagggtcacatcaggtagtacctgttactacatgcacttttggcctggaaggctctggggttggactggaaatgttactaggttggcctctcacaaaaaaggaccccatcctgcttaaacacattgatctccgttgccctgcatttgagtctgtatagcccacggtctgaaacttgaggtagctttccagatttggaatgtaaaaggctcagcaggcgctctgttcatccctgggtggggagggcccagccagaagtgcatgtccactgtgcccgccagtgtgtgtttacacaaatttcatctccgctttgaaaatgctgctattagtttgcactgttggtgaactggattttttcctcctattgaaataatactttcatacttataaagcggtcgtcaatatttatttcaaggtgctagatttaattttgttattaaattgaaatgcttatcttgtgttcaagcacagcactgattttaacaatcctgcatttaatgtgaaataagctgaacgcaaggataactataaactgttt

SEQ ID NO: 5943 - DNA, 1650 bp, Macaca Fascicularis
tttacaatgggagtgctaaaattcaagcacatctttttcagaagctttgttaaatcaagtggagtatcacagatagttttcaccttccttctgattccgtgttgcttaactctgaatttcagagcaccccctattattccaaatgtgcctttcctctgggcctggaatgccccaagtgaattttgtcttggaaaatttaatgagccactagatatgagcctcttcactttaatgggaagcccccgaataaacgtcaccgggcaaggtgttacaatattttatgttgatagacttggctactatccatatatagacctaaccacaggagtaactgtgcatggaggaatcccccagaaggtttccttgcaagaccatctggacaaatctaagcaagacattcttttttatatgccagtagacaatttgggaatggctgttattgactgggaagaatggagacccacttgggcaagaaactggaaacctaaagatgtttacaagaataggtctattgaactggttcagcaacaaaatgtacagcttagtctcccacaggccactgacaaagctaaacaagaatttgaaaaggcagggaaggatttcatgctagagactataaaattgggaagatcacttcgcccaaatcacttgtggggttattatctttttccggattgttacaaccatcactataggaaacccggttacaatggaagttgcttcgatgtagaaataaaaagaaatgatgatctcagctggttatggaatgaaagcactgccctttacccatccatttatctgaacactcagcagtctgttgtagttgctacactctatgtgcgcaatcgagttcgggaagccatcagggtttccaaaatacctgatgcaaaaaatccacttccggtttttgtctatgcccgcctagtttttactgatcaagttttgaaattcctttctcgagaagaacttgtgtctacgcttggtgaaactgttgctctgggggcttctggaattgtaatatggggaagcctcagtataacgcgaagtatgaaatcttgcttgctcctagacacttacatggagactatactgaatccttacataatcaacgtcacactagcagccaaaatgtgtagccaagtgctttgccaggagcaaggagtgtgtataaggaaggactggaattcaagtgactatcttcacctcaacccagacaattttgatattcgactggagaaaggtggaaagttcacagtacatggaaaaccaacagttgaagacctggaggaattttctgaaaaattttattgcagctgttataccaacttgagttgtaaggagaaagctgatgtaaaagacactgatgctgttgatgtatgtattgctgatggtgtctgtatagatgcctctctaaagcctcccgtggagacagaaggatctcctccaattttctacaatacctcatcctccacagtctctaccacaatgttcattgttaatattttgtttcttatcatttcttctgtagcgagtttgtgattgcacaggttagctgaaatgaacaatatgtccatcttaaagggtgcttttttttttcaactaattaaatctcggaaaaggaaaaaaaaaaaaaaaaaaaaaaaaaaaaaa

SEQ ID NO: 5944 - DNA, 655 bp, Macaca Fascicularis
  misc_feature (1)...(655): n = A,T,C or G
ctggagtgnnnaggaaaggaactgatgnnncnaagnnnnnnnnnnnnnnnngncngagcggagcgtgccccannnccagaaagtannnngataggtacaagagctacagcccttatgacnnnnnnnnnnnnnnnnnnnnnnnnnnnnnnnnnnnnnnnnnnnnnnnnnnnnnnnnnnnnnnnnnnnnnnnncagaacaaacccnnnnnnnnnnnnnnnnnnnnnnnnnnnnnnnnnnnnnnnnnnnnnnnnnnnnnnnnnnnnnnnnnnnnnnnnnnnnnnnnnnnnnnnnnnnnnnnnnnnnnnnnnnttaggtctgaattcaagagaaagtnnnnnnnnnnnnnnnnnnnntacatccagcaagacnnnnnnnnnnnnnnnnnnnnnnnnnnnnnnnnnnnnnnnnnnngagacgactgaagcctgacacannnnnnnnnnnnnnnnnnnnnnnnnnnnnnnnnnnnnnnnnnnnnnnnnnnnnnnnnnnnnnnnnnnnnnnnnnnnnnnnnnnnnnnnnnnnnnnnnnnnnnnnnnnnnnnnnnnagtnnnnnnnnnnnnnnnnnnnnntcctgtctagtctctcctgtaagccaaagaaatgaacattccaaggagctggaagtgaagtccatgatgtgaaacactttgcc

SEQ ID NO: 5945 - DNA, 624 bp, Macaca Fascicularis
cttaaaataatattgtctatatagaagtatccatttcccatcagacttgacaaggtttctgataacaacctaatgctacgttgcaccttttcaggcaaggactgtcttccaaaattttccacagtgtattacaaggtaaaaatgacaccctcaaagggttgctaattcctttcctgttccaagcaaacctccttgaaggcttgccaagctaagcatcaatttgcataaccggaagaggtgggtgtcactaacagggttttgactggaagtccgattctcagcagcaaggcatgccagaaaaatgtcccacattcaattgtctatctcattcgtgttgctaaagttatgcttttgtaatttcagtattttcatcaaaatgtcacatccaatgacatgcgatatgaaaagataaagaaatttgacctgaaatgcacagcatgacggcacacttcattcacctcctccacctggaaaccagacttgttgctttcctgtattcagagaactatgcctgttcatctgctgcaataagaagctccccgcctctgaaacctaacacagtacaacaaaacagaatatgtctgtatgaagaaatacgcgagaaaactaatcggggcatacctg

SEQ ID NO: 5946 - DNA, 1926 bp, Macaca Fascicularis
tcaaattctatatctaataatcctcaaaatgtccagatattcattcttctcctatgtatactcacccaagtaaatagccacggtcttttgaggcaaatacatatttgctacggttttgcaggcttcctcctgcagatactccacctctttagtcaatgatttctgggtctcaaaactgcctcaggtatttgggtaacaaaatcatggctttttactgggaaaacctccctgagctcatctattcttgctttctcttgcacaatttaacaatatttaacaagaatatataacactatccttattagctgcctaccctattttatccataggaaaccatgttccactaactatccccacaattctctttgggttaagtttcactattcctacctttctaatcactgcattagctgtggggtcctagcttctggcagataaacaccataacctggcttctacttctttggggtttcatcctaccctttgctattaacaagcgaagaggctctgaaacaacctctcttgcagtcagccctgacctacagaaaagagccaccactaatctcattgatgatgctggcaactgtctcaccagcacattcctggtggccttggtaaataatgtgactttcagactgtccagtggacacctcttgtgagtattctggtttcacataacagtattctagcatgctcactttcatgaaccttttaaacccttctagccatcatctgccacggcaattcatgcatgatacctctgttctgtgtaggccatcatattcttcagtcttctagaagccactctagggaagagtttgcaccataacctggcctacttctcatgggattaaattcctaaatcccatgagcattcttcaagccaataagctattccttatgaagtgttagattctggctctcctgatcaagcaatctccaagtctagtctcaggggtattcacctagctcctgttgatacactctagttaattctctaaaattctttggaggcaaggagaagattatctctttctaatattcccagatttacatgcctggctcgtttatgctgttaattaactctagtaatgaggagagaagaagatagatactgaaagattttccttttgtcttgcaagggaaggcctctgcagtgtctttctaaatgggaagagtactagctctttataggggagaagtgggcatgtggtaagctccaaggattcaaagaactttatggagccagtatctttaaggaccttcatccagtggtccctattctatctgtcgtgttccctggttttcccatccaaggtcctgaccttgtcataacaaacacctcagttgagcattcaatcatttttgcagcaggcaactctgattttaaatcccgagttggtcttcagttatttgtacttccctcctgcaagagataaacacctctttgtaagcttctgaagaagctcaataacctttgcgttaagtttttaattgtttgttaactgccctaagcttttcaatatacctctgtcaggcatcaatgcaatttactaccaaccaaccagttccatcatctgactctcccattgtccctttcaaagatttgaatcattacatcagcatcagatccccctccaggggaattttgttcaaaaatattttccttgtgaaagtttaagaaattacattgccattgtgtgccgtagataatttctgtcctacatagcacctagatgggggtactcagtgttaatcgggcagggagaaccatttatttttctggctgctttctcaaaacggtcttggtaccaactgtatcaggcaggttctccaggatgcagacagagttaggtgtacaacaggtttgcaatggctgtaatctccagtgaaggattgggaaaaaaaaaaaaaaaaaaaaaaaaa

SEQ ID NO: 5947 - DNA, 1973 bp, Macaca Fascicularis
cagcgtgggtcccagggggctcttgttctacctggcagtgactgcagctgcctggtggctcaggcctcgggggctgtaccagagacgcatcgtcctcagctccctgtgccttggcaggggctgactggatactggccaaggcccaggcaggcaaagatggtgctgagctcaggggctgacgcccaagagccctagactcaggagctggtttctgtgttcccctgccttgagctgacagttcagggtgaggccaagaatcctgaccaagctgggtcatgcaaggccctggtgttccctggggctctacgaggccctcgtgtgcattcctttatgaactcagtggccaggacatctgggaaaagcataaagggccatgtcatctccccagggacccaagagcttttctctccagccttggggagggtgaagaggagactcagagacgggtcctctctctcaaacaggctggtctaacccccagtgtacagatgggggaactgaggccaagtgaggtgtcagggtcagagctggggtcagaacccaatccagggatgagctggctctggagagagagtccttggtcctgccctatggtacccccacttccctgtacagcccgtggggactctagaggtgaccccctccagccagctccgtgccttgggcactagccagccttccatggagcccctccctgctctgacttcgtggagccctggcaggagtggttgtgctgagcccaccatgaagttccttatccacaagggcccccgggaatggtggggcccaggatgccagggcttttgtagggtatcaggaaggcagctggatcttggcagggccacaggggctgagttttttcaggccacccctgacacctgtctgctgtgcttggctgtgtgtgggtggggtgggatggagcgggaagaagacaaggggtagagaaaagagatgaaaaagacacacagcctgcccttggggggctcagactagaccaggagaagagctcaggtaccaagaagtaattccagggcaccatccaccggtgcccagggcccccaggagccctctgggtcagtgggtgggtgggctggagggggagatagccgctctcgtgaagtgtgaagctgagatgtaagttgaacaaggccttgcaggtgggaaagggaaggttctttccttggggtgcgtggagtgtccggcaggcaagatggcaggcctcagacaagaggagtccatgcagagaggctagcatgagaaagagcccagaggcggaaggtgcagtgcatctttgcagggcaccccaaggtgggggacagtgactcacagcggtgcctttggccccaccctgccagcagcagctcctctgctcttggaatatcccccagccccctgcctccccgtctcctgagcacctgccccagctcagtgactctgggggtactggggagaccaagatgttgctaccacctttgtcagggttgggggagcccccggccaggtgccctccaggatccgcctggaccagcatcccttcttgtgtggatggagcctcatccccatctccagctacgtcagtcattctctgcagggaaaagtctcctcccgctactccagctgttcctgcagaagggcccctggctgtgttggcaggacttcggtgtccagggtagatctcccctccactgaggagtgaggtcccagaatcctgatgggtccccggcctcagccctgcacaggcgtgatgcggggcggtggctctctgggaaccctctacagatctatttttatatggaacttgttcgctggacagaggtggcctgcaagcccccattaccctggtctgagctcaccctgggagggagggggccagtcggagggggttccttctggacatgtttttatatttcctgggttctctatgcaggataataaaaacttgtctgtgaaaaaaaaaaaaaaaaaaaaaaaaa

SEQ ID NO: 5948 - DNA, 735 bp, Macaca Fascicularis
gggggtggccgccacagctgaaaaggtgactcgaggcaaaaaatagctgctgggaggagttctggtgcaggtggctaggtcccgcagtgggagtggtgctgcttcagcccacgcccagggagcgtcgagtccgccatgagcggagcgtttcaccaggtgtgttccctttcccgctcaggctctggtgtgcagccaggtggggtcaaatgcctgtcgtagtggggaggggacagtagaagggactcaggagataacctgaagaaagggtttcacactcaggcgtgtgcctgagctgaagaatggaggtgaggggaggcagacgggaccattccagcaggcatgggttgggatcaggaggtgaaggacaggcaggtactgaatgcctgtgtgagtgaagaccagaggtggggccagtggaggagaggggagaagtcagcgcaggagtccattcatcagggagcctcaggggaagggacctgggagctttctggcagctccgtttgtctcctgaactcttccctccccaccccagcctaagggctcctttggtgtggtgactcccattgctgctggtagagagcatggcatagtcccctgaggctgggtctgattaggagtgacgatctggctccctgggttccctgatgacactgcctcggggcccattatttgtaagagcatttgctcccccactgccgtgggtggtctgttcctgatctttaactggtattccat

SEQ ID NO: 5949 - DNA, 701 bp, Macaca Fascicularis
  misc_feature (1)...(701): n = A,T,C or G
cagccggaccatgcctcgcaccgtgcctgcnnnanncatgaagatgggctccctggagcgaaagaaattacggtattcagacctggactttgaggtgatgcacacccggaaannnnnnnnnnnnnnnnnnnnnnnnnnnnnnnnnaagttccacacttttgaccgctaccgcagccagtccacggccaagagggagaagcggtggagtgtgtcctcgggtggggcggccgagcggagcgtgtgcaccgataagcccagccccggggagcgccccagcttgtcccannnnnnnnnnnnnnnnnnnnnnnnnnnnnnnnnnnnnnnnnnnnnnnnnnnnnnnnnnnnnnnnnnnnnnnnnnnnnnnnnnnnnnnnnnnnnnnnnnnnnnnnnnnnnnnnnnnnnnnnnnnnnnnnnnnnnnngacagaggtgtgagtgccacgctggactgcccactgcatataaatatatatatctctctattttcacactccactttggaactacccaggagccagcaccctctcccctctcccgagggctgggcagggaggcgccgtnnnnnnnnnnnnnnntggggagccagacacggcttggcctaggggcccagggcccttccttgnnnnnnnnnnnnnnnnnagccactggaaccccatctnnnnnnnnnnnnnnncgtccctgtcccgggctggggaggggggag

SEQ ID NO: 5950 - DNA, 3573 bp, Macaca Fascicularis
attactataagggaaatctgaggaaccaaactgtgcttgtgatcagtttcgttgtggtaatggaaagtgtataccagaagcctggaagtgtaataacatggatgaatgtggagatagctctgatgaagagatctgtgccaaagaagctaatcctccaactgccactgcttttcaaccctgtgcttacaaccagttccagtgtttatcccgttttaccaaagtttacacttgcctcgccgaatctttaaaatgtgatgggaacattgactgccttgacctaggagatgagatagactgtgatgtgccaacgtgtgggcagtggctaaaatatttttatggtacttttaattctcccaattacccagacttttatcctcctggaagcaattgcacctggttaattgacactggtgatcaccgtaaagtcattttatgctttacggactttaaacttgatggaactggttatggtgattatgtcaaaatatatgatggattagaggagaatccacacaagcttttgcgtgtgttgacagcttttgattctcatgcacctcttacagttgtttcttcttctggacagataagggtacatttttgtgctgataaagtgaatgctgcgaggggatttaatgctacttaccaagtagatgggttctgtttgccatgggaaataccctgtggaggtaactgggggtgttatactgagcagcagcgttgtgatgggtattggcattgcccaaatggaagggatgaaatcaattgtaccatgtgccagaaggaagaatttccgtgttcccgaaacggtgtctgttatcctcgttctgatcgctgcaactaccagaatcattgcccaaatggctcagatgaaaaaaactgctttttttgccaaccaggaaatttccattgtaaaaacaatcgttgcgtgtttgaaagttgggtgtgtgattctcaagatgactgtggtgatggcagcgatgaagagaattgcccagtaatcgtgcctacaagagtcatcactgctgccgtcatagggagcctcatctgtggcctgttactcgtcattgcattgggatgtacttgtaagctttattctctgagaatgtttgaaagaagatcatttgaaacacagttgtcaagagtggaagcagaattgttaagaagagaagctcctccctcttatggacaattgattgctcagggtttaattccaccagttgaagattttcctgtttgttcacctaatcaggcttctgttttggaaaatctgaggctagcggtacgatctcagcttggatttacttcagtcaggcttccaatggcaggcagatcaagcaacatttggaaccgtatttttaattttgcaagatcacgtcattctgggtcattggctttggtctcagcagatggagatgaggttgtccctagtcagagtaccagtagagaacctgagagaaatcacactcacagaagtttgttttccgtggagtctgatgatacagacacagaaaatgagagaagagatacggcaggagcatctggtggggttgcagctcctttgcctcaaaaagtccctcccacaacggcagtagaggcgacagtaggagcgtgtgcaagttcctcaactcagagtgcccgaggtggtcatgcagataatggaagggatgtgacaagtgtggaacccccaagtgtgagtccagcacgtcaccagcttacaagtgcactcagtcgtatgactcaggggctacgttgggtacgttttacattaggacgatcaagttccgtaagtcagaaccagagtcctttgagacaacttgataatggggtaagtggaagagaagatgatgatgatgttgaaatgctaattccagtttctgatggatcttcagactttgatgtgaatgactgctccagacctcttcttgatcttgcctcagatcaaggacaagggcttagacaaccatatagtgcaacaaaccctggagtaaggccaagtaatcgagatggcccctgtgagcgctgtggtattgtccacactgcccagataccagacacttgcttggaagtaacactgaaaaacgaaacgagtgatgatgaggctttgttactttgttaggtacgaatcacataagggagattgtatacaagttggagcaatatccatttattattttgtaactttacagttaaactagttttagtttaaaaagaaaaaatgcagggtgatttcttactattatatgttagcctgcatggttaaattcgacaacttgtaactctatgaacttagagtttactattttagcagctaaaaatgcattacatattcatattgttcaataatgtcctttcgtttgtttctgattattttcatcctgatactgtagttcactgtagaaatgtgactgctgaaactcatttgattgtcatttttatctatcctgtgttaaatggtttgtttgtacaaaataataccttattttaattgaaacgtttatgcttttgtcaacacatcttgtaacttactatactagatgttaaggttgttaatgtacaaaaaaaacacccttatactcacctgcgttttcgtttgtttaacatttgtccattatcggatttcattatcatatgaacttgtcaaagggaaacaaactttgtctaaaaatttttctcttatgtttaacatacaacgatgtgaaatttaggcagagttagataaattactggcaaaaacaaaactcttttataaagattttctaatgttgactttaatactctaacatggtacaaaccaaatgttaaaatcccaagtcatttcttttttcatctgtatttagcaacagaattaagtggatgaagatattctactatgcattaaatcttgaactttataaaacatgtacaaaaattgtacaagataagttccagctggtaatgtctttccctaatacagggttgcgcttgtattggaccctagggatttgcactaaaattatatcaaggtctcagatgagcttagtgcacaagcactatcactttaaatactattatttgctaccacagcgactatatatttccatagcttttggctgggggcggggggcatttttattacaacttgaaattgctttgctggtttcatatttatttgttgtatttaagaaatacattgttgtaagagtgattttttttcaatatattttattcctgggggggatcatgctacactctcaaagaaaagaaaattgagaaatcattcagatcatcccccctttctaagtagtgtgaattgtaaaacccgacatattttttttactgtcagttgctgtttatttattctttagctgtctgttttagtagtttaatgattgagtatgaaaaatgtatttgtgtgtgattattgctatttattaaattttaagtactttgctgaatgtcattttaaagcatgtttgaagtcttgtgtatttgtctgtgttatgctgtcaggaagaactgactaagatgttttaatatgtatcaaaaattaaaatgattttttttattgccttgaaaaaaaaaaaaaaaaaaaaa

SEQ ID NO: 5951 - DNA, 1633 bp, Macaca Fascicularis
  misc_feature (1)...(1633): n = A,T,C or G
gccagagctgggcccaaggnnnnngngagggagnnnnggaaaggatgtgatggaaannnnntccataggacacaggaggcaggtacggggcctcctcnnnncgtccacaggagtacagacgtcccttctgtgcaagcacaactcaggtagaaatgaggatgtcatcttccttcacttttagggtcctccnnnnnnnnnnnnnagctgctggccaagctcagtggggagcctgggctctgagattccctcccacctgtggtcctggctcttcccagtgtcctgcatgtctgcccccagcacccagggctgcctgcctgggcagctcagcatggccccagcacacctccataggaatcctggagtatccttcnnnnnnnnnnnnnnnnaccttttgagactgaaatcacacaggcgggaatgaagattgtgccagccttctcttatgggcacctagccgccttcaccttctccctctaccccttagcaggaatagggnnnnnnnnnnnnnnnnnnnnnnnnnnnnnngcattttatttttttaagagtccttcatagagctcagtcaggaaggggacaggacaccaagccaagcccccagcattgggagcggccaggccacagctgctgctcccgtaggcctcaggctgtaagcaagagacagcactggcccttggccagcgtcctacccttcccaattccaaggactgggtatggatcgctgggccctaggctcctgcttctggggctattggagggtcagtgtctnnnnnnnnnnnnnnnnnncttttgtggtcctggagccnnnnnnnnnnnnnnnnnnnnnnnnnnnnnnncccagcaatatggtaatgagggtaggnnnnnnnnnnnnnnnnnnnnnnnnnnnnnnnnnnnnnnnnnagcagccatgggggcagagggaatacacagcgtttacaaagttagctacctgtacagaatggattacatatgcaaaaataaaaatctcaagaccacaggacagcgtgagccccacccccctcccccaatgaccccagcatnnnnnnnnnnnnnnnnnnnnncccctgggcatgcgggggggagtgatgcatggaaggaaaagccaccggccatggaaattagtacagaacccccccacacacactcagacacatgataggatacagnnnnnnnnnnnnnnnnnnnnggtgggaaggatgggaattgaaacccacacagcctgctgttaaagggaggggagtggggagctcctagcccctgttcaactacatggtaggggggcactctctccccagaaggaaaagggtttgttccctcagagtccctgctggaccaagcccatctcttacccagcctgggcagggggctctgccctgagggcgggccaaggaacaatggggaagtttatgtggacaaaccagttcccaaactacttcccacttctccctcctccaaccagaagggggaaaaagggagaagccacagggcaaagagtgtattagggcctgagctgcagctgcctctcagaagggagagtggcccacagccttcctcccttcaccttcagcccactccnnnnnnnnnnnntggaagcggctggaggcctgctgagatcctcctctccctccggctc

SEQ ID NO: 5952 - DNA, 712 bp, Macaca Fascicularis
  misc_feature (1)...(712): n = A,T,C or G
agccagacactctacaaagcaaactattaacatcatgagtcccaagaatgtttgaagattttcatttcatggnnnnnnnnnnnnnnnnnnnnnnnnnnnnnnnnggttgaactgaggaagctgctcctggctggagatacttggccttagggcttcggccnnnnnnnnnnnnnnnnnnnnnnnnnnnnnnnnnnnnnnnnnnnnnnnnnnncgttaatataattaactggaagaaggaaacatctcattattaccataatgagtacaacaagggattcaatgaatttcaacttctggatnnnnnnnnnnnnnnnnnaaaataaacttggaagttttannnnnnnnnnnnnnnnnnnnnnnnnnnnnnnnnnnnnnnnnnnnnnnnnnnnnnnnnnnnnnnnnnnnnnnnnnnnnnnnnnnnnnnnnnnnnnnnnnnnnnnnnnnnnnnnnnnnnnnnnnnnnnnnnnnnnnnnnnnnnnnnnnnnnnnnnnnnnnnnnnnnnnnnnnnnnnnnnnnnnnnnnnnnnnnnnnnnnnnnnnnnnnnnnnnnnnnnnnnnncgatctcctgacctcaggtgatccaccccgttggcctcccaaagtgctgggattacaggtgtgagccactgcgcctggcctttatttcttaatannnnnnnnnnnnagtattttaaaacagaagctaacagtatacacaaaacaaaagtgtttc

SEQ ID NO: 5953 - DNA, 708 bp, Macaca Fascicularis
  misc_feature (1)...(708): n = A,T,C or G
tgatcaagctgcaaaggataatccaactaaannnnntcaggaagaagannnnnnnnnnnnnnnnnnnnnnnnnnnnntatacgatgaactacacaaggttcattatttattnnnnnnnnnnnnnnnnnnnnnnnnnnnnccaaagatgagattagatnnnnnnnnnnnnnnnnnnnnnnnnnnnnnnnnnnnnnnnnnnnnnnnnnnnnnnnnnnngtacnnnnnnnnnnnnnnnnnnnnngaagaaaaggcccaaatggatccccttnnnnnnnnnnnntatttgcaaaatgatctttatataactgtggatcattcagacccagaagagacaaaagagtttcagctcctggcatcagctctattcaaatctggttcagattttacagctctaggcttttctgatgtggatcacacctatgctcaaagaactcagctctttgacaccttagtaaatttctttcctgacagcatgactccacctaaaggcaacnnnnnnnnnnnnnnnnnnnnntaactgaagagtcactggacacagaaatggaaaacaggagtcgattttccatcttttggattgnnnnnnnnnnnnnnnnnnnnnnnnnnnnnnnnnnnnnnnnnnnnnnnnnnnnnnnnnnnnnnncttaaccatcacaagtttttaccctcttccttcatgcctgacctcaaccctgctctcctcatcttatt

SEQ ID NO: 5954 - DNA, 2361 bp, Macaca Fascicularis
agggcatgccgggagcccaaaagccgctagtttttttttgtgttatgcagaagttgggctggtcctggtggagtggttttctcttactatgaggacacgctagaaatcctgatagcatctcatcttccccctaggttcccgaacgggaagttgcttccagagttttttatctcccctctatggcggcggttgccgcagagctcgacacctgcctggggtccggccactctcctcagagctgctacctcttttgagagctggagaaaacatcggcatgcacagctcctttgcaccttgctggcgcaaacagtgatcacacatctactctcaagctctaaccctgccatacggaaagaaagatctgcgacaacatgctggagctgttaatcataaagcacggctctgtccctgctcccttggtgccttctgccatctaaaaagaaaagtgtcctgagcctgagaaatatccggatcttttctcctcacactcctaagactcttgaatgtttggccaccagaggctggagattaatggactttgtgacgtctgagctggaggaactggaagatcaggaagacttaaaaacatgttcctaatgttttcagccagcaaattcattggtccaaattctctacaattttcactgtggtatgttccctattatatgagtagcaagcatgcttgaggcaagatacagcaggagttaagcccccttaccatgaatcaggctggatccccatgtgctgggagactaaaggctgtctgatccatggcatgagccatccccaccctatcactgatgtgagcatgtcgatctctggccagatgtgtacaaaggagctccctctcttcaggcacaaagatcaaatgcagaaggaactgcacatggaaaggccagccacacacatcacaaaaagaggactgaagtcagcacacaacttgaaagctggactacaggcctttcatcaagaatggctggagtgaccctggggacttgtttcaactgcaagaaacaagaggattgggcaaaggtcaagaggccatttgtcaaacagcacgagacaagcaacaggatgtgcaaactagcctggctatctctgcagataggaagagagctgccaagtagggctggaaagagacgctgggcaggtagatcttgccgtaacaaggagaaggaagtcatggatttgacctaaaagccgagaagggaacattcccaagagacttggaggttccatctctgaagcgagctgaaattagcagggatttctcctgcggcttcgccgtggtgtggggaaaagggaagtagttttgatgcaaggggcggagggagtgttggcggtggcgggggtagggggggcggcagctcactgacaggttaaaaccaccccggagaggcccagctctctgaagttcgacatcagaatatacattcgagtaagggtggtcaattatttaattttttgagactctctttccttgtctttatacatgaggactaacagaattgttaagaagatgacagaaaaccacagaggaaaaagctgtagtatagtatagtggacactccataaatattagttcccttggctagattcgtcccttctttttcccaagtgtacagcaacatggattaacatttattttgtgtttctagatctccagcaaatgtatttagaactgttctattaaattttcctagaaaataaagcatctctggcgttgaggctatctaggaattcctgaccgaggccatctgctctggaggcagaaagtgaagcgaccgcaggctgatgcagccaggaagacagaggccgagaggagggagcgtggcatcagaacagagccggccggggtctggcttcctcctccaggatcaagggaaatgtggggagcatggtgcagaatccggggcagctcatcgccctgctcacttgctggggaacagataaaacgacacctggagaacagcaaaggcagcagggagctctctccggtccctttacctgcctaaagacagagcctccgaaggagcctcaccggggtttctcaccaaccagggaagactgaacataaatcacaggagtggtgtctggaggccacactatgcccagacatagactggtcacaggctgtgccctcttcttccgaggccctgttcatcttccccagaatcatttactctcccccaagtttcctacattccccctccactctcccctgtgaagcaggtatctaaacacctagatctcgctgggcttgggggtgctcacttttccttcctgtgatgcccgtgtgcacataatacatttgcctctcttttctcctgttaaaaaaaaaaaaaaaaaaaaaaaaaaaaa

SEQ ID NO: 5955 - DNA, 743 bp, Macaca Fascicularis
  misc_feature (1)...(743): n = A,T,C or G
aggacagatgatgaaccgcgagagcccacagacttgccagttcgtgccccctttccttcctttctttcctgtcttttatttattgaatcataatttatccagcatctaccatgtgccaggctctgttctcagagctggagagacagccatttacaagacagagatctcggccctcacagagctgacaccctaaccagagagttggacaaaaaccgcgataaatgagttggttaaatggcgatttgtgcatagaaaatgcagggacagtgaaggagtggttgcagttttcagggggatctcactgagagggcaacatttgatccgaaggaggtggggagggagccaagtgggcagacatctggggaaagagcgttccaggcagaggaatagccagtgcaaaggccctgagacagaaatgtgcctggctggccgggtacagtaactcacatctgtagnnnnnnnnnnnnnnnnnnnnnnnnnnnnnnnnnnnnnnnnnnnnnnnnnnnnnnnnnnnnnnnnnnnnnnnnnnnnnnnnnnnnnnnnnnnnnnnnnnnnnnnnnnnnnnnnnnnnnnnnnnnnnnnnnnnnnnnnnnnnnnnnnnnnnnnnnnnnnnnnnnnnnnnnnnnnnnnnnncaggaggttgaggctgcagtgagccacgattgcgccactgcaccccagcctgggcaacagagcaagaccctgtctcaaaaaatatatgtaaataaaaaagtttaaaagga

SEQ ID NO: 5956 - DNA, 719 bp, Macaca Fascicularis
  misc_feature (1)...(719): n = A,T,C or G
ggaaagaagnnnnnnnnnnnnnnnncaaagttgagnnngaattctgccaccnnnactaagcagtcatgtgactttgaaaaactccctactctgagtcttagtttctttatctgtattaggtttcaacaaagggaataaatcatcagcttctcataaagttgtcataaggattaaataagacaatgcatataaacgaactggaagacaataaatttagagtcccccactcccgcttggtgctctctttctctctcccccacatagannnnnnnnnnnnnnnnnnnnnnnnnnnnttacttaagggtggctgtgtcttccccatcttttgtttacccgtgaagaactgtgaccatcccgttctctggcttatcataaagatgggacttgacttctttctgctcttgcttccatctggtgctgttctttgcacagcctccttgagaccatccagaaccttctttttcctacttcatatcacttaaccagtagatatatgggatggttccagagggggaagtttgcagttgagtaacattttaaatagtgttaagggacttgggatctctggccctttgtgtttcagtatttgtcctttttatgcctgatgtttaacctgccacatgtttgtactgcaacgtgaatcttggaaattttaatgttatgcatttctaattttttggttatctgtgaactaaatgttncttattggctcactgtca

SEQ ID NO: 5957 - DNA, 723 bp, Macaca Fascicularis
atctattatatagcaaacaaaatggcatttaactgggtaaagctcctacctaaatatttgagtattgtgacatctctacttgcaaggtttgagtgaaagattagtcacagattagtgaaaaaaaatgtatctttttgttaaaaatggcttatttgaatggattgttgcttttcactagcttgtatggtatgtcagctaacatttctttgtttttttttcttttataataactaaacttctctatctcagctgcaatagtgttccatcttaccacagagtgttttataattaatgctgttgactttataccccaaaatgggtcaagaagtggctatatgattcggggatgtttaaatttgtatgatgacaaagttaattgcaacaagtagaaaacttgggtgctaatacaggataacttatgctctttttcttacctggatatagttctgttggggtataaagtattaggtatttgtatttttgctgtcaaaataatggacttaacttttagggtgttcacagctaagatctctgtttttcaactaacaactaattttaaatgtattgtatcttttattacttgttctcttagattgttttttgctagtaacccttactcagcttctgcctttggggcttggactaatattgcttgtatggaactacagtactgcgactaaacatggagctcaatgcagctactgcttacaactgcttaaactt

SEQ ID NO: 5958 - DNA, 180 bp, Macaca Fascicularis
aaaatgtgggtggcaaaacatacacccaactttgaatacttaatacaaaaaagagtataaaatatataattaattatatgttgaaatagcttctagaaatttgtgttaaagtatatagttaagattagtcttttttggccgggcgcggtggctcaagcatgtaatcccagcactggggga

SEQ ID NO: 5959 - DNA, 608 bp, Macaca Fascicularis
  misc_feature (1)...(608): n = A,T,C or G
cagcgtgcctgccgcacgcctgctggnnnnnnnnnctggacgagcnnnnnnnncccagtcctggctggcggacgtggctgagaaagacccggacgaagnnnnnnnnnnnnnnnnnnnnagggccctgttgcttctgcagagactcaagaacaggctcctcccagccgcatctccctagtccctggaggcctccccagggccacccccgnnnnnnnnnnnnnnnnnnnnnnnnnnnnnnnnnnnnnnnnnnnnnnnnnnnnnnnnnnnnnnnnnnnnnnnnnnnnnnnnnnnngttcggagagtgcagatgcaggaaggcccggcctgccgctatttatagtgcagcaagtctgctaaaaatacactgggcctgggcactgcccgccgggacatggcagcctggacgtggggctgtggccagggccgtgggcgttgctggtgggggnnnnnnnnnnnnnnnnggcagaaccaggctggcaggaggggaggacggtgtgcctgctgctcagagcccgcaaggcactcctgtgagcgccaccaagcaggacagagcagctctcgtcccaggttcctcgggctgagcgccgtgtcaccaggagaatcgtgct

SEQ ID NO: 5960 - DNA, 1228 bp, Macaca Fascicularis
gatactgaaaagcttgcaaactaaaaagcaaaacaacctacattagtcatctagctattgtttggatgttttgagttgatttttttatggtgcctcttttagcttggaatattatgtttactttaattcaagtctaggccttttaaagggtccttaaaaataaagttcggaatgtcaatccctttgacacctattacaggtttataggacctttttggttgtgattactgttttcaatacaattgtgtaaataagttcacttttgtcagaagttaaaatggaggtcataggagttcatggagaaatagctctcctatttctttcattacccccattgaaattcaccccagtttctggccacaagaatatgagaaaggaaccctgttcttttccaagggaaattatccttctctgtccccactgttgattaactgaagtcccagacaccttccttcctccactggccaagacccaccttgaacctgttttcagagccgagtggcatgaatacatgtactgtttctgcttctgttgacggagtggctatgggagtattaaaggaaatgctaattcgagcttcattcttaggggaacctactatatattgcatccctgctggttggaaattatcttcatctctggactgcattgtttagaaaaatgtaatggcttacgattctgagaactttatagtgtggctctggggttaagaattctgtggtttgaaaaaaaataaatattttgtattgattcttacatgtcatttcaatgttgtgactatgtactaaatgcagtaagactgtgggtgttctcttagaagagtgcgttttgttaaacagatggcagatcactctcattagtcctgtttgtcaatattacagccacgcacttcaggataacttaatcaaatgagaagtcatgggaagctatggctagtaacaggaatgcttaagaaaaatttggagggcaagcacaggcaagaggctttgccactcactagcacagccagagcaaggataaagcaatgaagtcttgtgcctagtggtgcttgtttgtcagaagccatagtgagctcagcacagggtgttctgtacatcatctcattaatccaagaaaaacagaatggcggaggaaactcctactgacctgggatacaaagccactgactttggctcttgatcttttggtgggttctgaatcactcctgtattagggcgtatactatcac

SEQ ID NO: 5961 - DNA, 1959 bp, Macaca Fascicularis
tatttaagggttatgacaaaaagaattctgacacttggaacccttgactagatgcataggaaaccaggtaatagactagaataaggatgaagaactgaatatcagtagttcgcattgatagaaatagtacggagccttttctgttctgttttttagtgaggtgggcatgaggatatgctgcacattttattatgtttaaggatgttttcttaggtaaagttcttttctaacatgagaagctgatgacaaaaatgtttttagttcacagtattctatatgatttatccttttaatgtgctcttttctgatttaatcaactgagtttaagtcacctaagacttttacaatatggtttatatagagagtttgattagaggaaaataactgaaggcttgtttttataataggaatataataactatcatttgctgaacccagcaatgccccataagttacacaggtgctttgcatgcattgctggcatctggtcctgatccctagcagatgtttctgttcactgccttcctaaaaatttaatcaggtcactgtagatgtgtgttgctgcattcaggggctctgctaaagagtgggactttagaaattcattagttactaaacattgagacaggagcatgccctatccatgctgcccactctaggatgggcttcacccttccttctcaggatataacatgttactattgttgatgtaccttctaacaaattaggccataaaagtataatttccccaaaattatgactttttaaagtttgcaatttatttctctgcaagttcaattaatgaaattgactgttttgtaagatttcttattatgagccaaagaaagagaaaccatagtaattttcgatcctgtgagattgaggctattgcttttccttgaaatcagcccttttggggttgggttgattattttcttgagctgtcacctattcctgattctcaataagggctgtgtggtgaaagcattttgttacacccatgtaactaacccttcagcttgtaattcccaccatgcttgtcttaaacacttcagctgttcttctgaactgctttaccatcttaccttatccagagaacttgccattgtactttgtcttagattctggcctctcagttgtgcctgagttacttggtcagctgctctgttctgctgtggaattcttttcatctttgtgcaacaggcattccccatcacctgtcttgtcactctggcacactgtgcttggagacaagactaggcagttgttgttgggtatgaatgttggggtagcagtagggcatgtctgtgtgtgcacaggaatctgcagggtgcctgtctgcaagttggccactcttctagaggtgtagaggctgcagtcttcatactttttttcccctcctgaactgtctctctgccagtttcagtgtaataaaatgtgtttggctttcagaggctttcctgtaaaaggaacaagaagattgcattttgcagttatgatgagagagcaaggtgtggtgctttggggagcatcatggaaaggactagaaggtgtttgagaaagcttagtctactttgtatccacagtatcaaaaataggcctccccagacccctgacggaaatatcagaagggagatctgcttagttattgtatcaaagggtaatggaagtcattccccatgtaatttgttataagggtaacaatgacatatataatgtaccagattccacatgtaaattaagagagaaaaaataggattgagggtgtaatgttcacggcattacagttctgtaatgtttaatagaaagtatcagttgccatagtcagctatacctggtggtacatatctgtagtcccagctactaggaagggtgaggtgggaggattgcttgagcccaggagatcaaggcctgggcagcattgcaataccctgtttctgaaaaaaaaaaaaaaaaaaa

SEQ ID NO: 5962 - DNA, 2193 bp, Macaca Fascicularis
acttggccacacggcaggcactgaggctgggaggcagtctccagacagatgagtgtccgctcctctctgagaggtgaatgagcccgaggggtcccgacctacggagtcgtgaggagcagcggcgccaacgacgcaggcccgccccagcccgccagcgagccgcccatgccctctgcccgcctggcccgcctgggccctcgccatgctgatcaccgtgtactgcgtgcggagggacctctccgaggccaccttctccctccaggtcagccccgactttgagctccgaaacttcaaggtcctctgcgaggcggagtccagagtccccgccgaagagatccagatcatccacatggagcgactcctcatcgaggaccactgttccctgggctcctacggcctcaaagatggcgatgtcgtggttttactgcagaaggacaatgtgggaccccgggctccagggcgtgccccgaaccagcctcgtatagacttcagcggcattgcggtgcccgggacgtccagctcccgcccgcagcacccagggcagcagcagcagcgcacacccgccgcccagcggtcacacggcctggcctccggagagacggtgggcgtcccgcaaggtctgggcagccccggcctgatccgcagcatgctgctctctaacccgcacgatctgtcgctgctcaaggaacgcaacccccccttggcggaagccctgctcagcggaagccttgagaccttttctcaggtgctgatggcgcagcaaagggaaaaggccttgagagagcaagagaggcttcatctctacacggccgaccccctggaccgggaagctcaggccaaaatagaagaggaaatccggcagcagaacattgaagaaaacatgaatatagcgatagaagaggcccccgagagtttcggacaagtgacgatgctctatattaactgcaaagtgaatgggcatcctttgaaggcttttgttgattctggcgcccagatgaccattatgagccaggcttgtgccgagcgatgtaacatcatgaggctggtggaccgacggtgggctggggttgctaaaggagtgggcacacagagaattattggccgtgttcatctagctcagattcaaattgaaggtgatttcttacagtgctctttctccatacttgaggatcaacccatggatatgcttctaggcctagatatgctccggagacatcaatgttccatcgatttgaagaaaaatgtgctagtcatcggcaccactggcacgcagacttactttcttcctgagggagagttgcccttatgctctaggatggtaaatgggaaagatgagtcttcggacaaggaaattacacattcggtcatggattcaggacgaaaagagcattaaagcacgttataaatatgtcaccaccttgagggaggctcaggtccccggaaattatacagtaagagctcactggcaatgtaatcattaaaaatcatcagtaacaactaaacctggccttgggactacgttctcagatgggtaactacatcaatcctgattccttggtcttggtccctcttccatttcccttgtccagagatcactgaaagacatcctgggaaggctctggaggctccagctgatttccagataatccatgaaaaagaaaaccagcttcttcctttagagacactatcctatcagattacaggtggcttattcaaattattgctattttgtagaattccctggaaaaatgctatggctgcagaccttacaaggcatccacataaaactatttcacatcggcactaacaattctttatattgaaatatgcccattttcacaggttttgttttctttcggaaaggcattagaaatggtgggtcaattacactgtgatgttaactaatacttacacatgtctgtttggggcagcataaggaccaatttcctcatatttacaccttcccttctcttggatcccctgcagtcaccctgcaatccacagctaacgactatttttgccatatttgagaaagtggatttatctccaaggatgctacattaattttctatttcccctgcattcaaagaaactctcactgtaaaacaaaggcaataaattagattttttttaaaaaaaaaaaaaaaaaaaaaaaaaaaaaaaaaaaaaaaaaaaaaaaaaaaaaaaaaaaaa

SEQ ID NO: 5963 - DNA, 703 bp, Macaca Fascicularis
  misc_feature (1)...(703): n = A,T,C or G
ccaggaaggtatgaaaggagggctgtcaacagcaagggctcttaggggtcaggcaccagcatggagacctcacgacaaaggaagggactcaaagtagcaatgcccctcatagtgtaggctaaagtgagtttggtgaatgcaaacctgtgtgctcacacacacagcatggggtaatggtgtgtagacacaggcccnnnnnnnnngcatggggtggggacactgacagcccctatctggtccccagaaannnnnnnnnnnnnnnnnnnntccttctcttcccccaacactcccaaagatacccacaggaagtccagccagtctgtaggtagaggattcccccagtcttggtcttgggctgcattcatcnnnnnnnnnnnnnnnnnnnnnnntaatcagcaaactatactttgtacnnnnnnnnnnnnnnnacattagaaacttatatttaaaaacaattannnnnnnnnnnnnnnnnnnnnnnnnnnnnnnnnnnnntaggaagtgtttgggttttgttattttttgttttttctttaagaaaaaaatgtacaccactcctcacgtgccattttgtcctcagagggcggctttacttttttggtaaaggnnnnnnnnnntggccttgaccaggagttcatatataactgttattacagaggtattgttataactactcatgtttttaaaaaaatctattaaacat

SEQ ID NO: 5964 - DNA, 1822 bp, Macaca Fascicularis
aacaatctgaggtgcctggtgaagacccggcccagctctgaaagcaggaacaggggagggaacactgtaagaggactggagccttggtaacagatatgactgctgtggccggctggctcatctttcatgttggatgatgcctggagattgaatccaagcctgtcaactttccctggaaaagacccttgtcatggcctcagctgagtcaacaccttgtctaaaaatggtcactaacaccacatccattgctaatcacaatcgaaattctagaatgccatgactaagaagtaacacatactccggataaaatttcaaacagtagagaagagcagtgaagaagaaaacttttaccattcctctgaccctcctagtcttgttctttagaggaaagctatcttgataaattattgtgtaattttctggaaatattctctacataaacatcatagaacattgcactaaagagatacagtccgaaattaacaaacaatgtccaggtgtgcagctgcaaacaacaactgactgctttgaatggctaactaactataattacagtacatccgagtcatctttcatttcccatggagacttgataaaatttctcaaaacactggacctttcttttccagaagtatcaaaataactcaacagcaggagaggagagagaaagaagctacacagaagtcatgtgtactttgtggctctctggagtgtagcagaaagaatgtggatgaagagaatgtggatgaagagaaagaagccagggatccattctataattctgtgccttactcaagatttgttgaagaatgaacaaaatcaagaagaaatgatattggatttactttgggacctctcctgccacagcagtgtttcattcccgtcgactctaagtggaacatctttccatttcctctctaggacatctcttcattctgttgaagataattcctctatggatgtcaagtctatatgggatgatataagactgcatcttcgacgcttcttagtgagcagattacaaagccataatgaaataaacaattcacagcaaaaaattttattgaaaaagcagtgcttacaacaactcttgtttctttatccagaatcagaagttataatcaaataccaaaacatacagagtaaactgttggctaatcttctgcagaactgctttccttcttacagcagagattcaaatttagatgtaatagttcatggatatcaaagtacaatgcttaagttatacttaataataaaagaggattttaacacagtatgtgaaattttagctccatcctcaacggtgaaattcattaaagaaacttacctggatactgttacagaagaaatggcaaaatttcttgaaaatttttgtgagctgcagttcagagaaaatgctgttcgtgtggttaaaacaagcaagagctccagcaagcatagaggagcagtgcatgctttggtcccttgttcttttagttaaggaagattggagatgagggaaatgaatccctcaaggaatgaaaagatccttcaagataacgaagtccctcaaaccaaagagacgatagacttgggagacacaagatcattattggaaagcaggccaatcaaaatccactctattctctcttctactcaagtagctctgaccatttgaatgatgatatcatgagagacgaaaaagtatactgaagccaactctgaaaagttgggtattgtccctattttatagatacagaatctgtggtttggacaagttaagtagaattaaagtctggtgaaggcttactttttggtttataaaaaaaaaaaaaaaaaa

SEQ ID NO: 5965 - DNA, 667 bp, Macaca Fascicularis
  misc_feature (1)...(667): n = A,T,C or G
gcgaactgggccagcggcctgaccccggcgcggaactgcccgcgggccctggatggggcttgnnnnnnnnnnnnnnnnnnnnnnnnnnnnnnnnnnnnnnnnnnnnnnnnnnnnnnnnnnnnnnnnnnnnnnnnnnnnnnnnnnnnnnnnnnnnnnnnnnnnnnnnnnnttgcagtttgaggcccaggggtcggaagctttgctgggctgggacgtgggagggactgtnnnnnnnnttcaagaatgaggnnnnnnnnnnnnnnnnnnnnnnnnnnnnnnnnnnnnnnnagtggaggcggggtattcctgggtagaatacctgtagagttcttagcttttctatctggattttatgtaagcgacannnnnnnnnnnnnnnnnnnnnnnngcaccctcccttccctccaccctcctgagaattacccacagaaccagggagacagacttgaaacccacgctgaaaccctcacctctgcctacacctccattcttagtcttaagcccccnnnnnnnnnnnnnnnnnngagcactgctcttgtgtagacagtggctctctctggtggggggaatatttcctnnnnnnnnnnnnnnnnccgaggtgatgatgagaatggtctttgctttctgagtttgtttnnnnnnnnnnnnnnnnnnnnnactatttccc

SEQ ID NO: 5966 - DNA, 706 bp, Macaca Fascicularis
  misc_feature (1)...(706): n = A,T,C or G
cagttcatgtacttgtagacagacttaaaagatgtttgggccgggcgcggtggctcaagcctgtaatcccagcactttgggaggccgagatgagtggatcacgaggtcagnnnnnnnnnnnnnnnnnnnnnnnnnnnnnnnnnnnnnnnnnnnnnnnnnnnnnnnnnnnnnnnnnnnnnnnnnnnnnnnnnnnnnnnnnnnnnnnnnnnnnnnnnnnnnnnnnnnnnnnnnnnnnnnnnnnnnnnnnnnnnnnnnnnnnnnnnnnnnnnnnnnnnnnnnnnnnnnnnnnnnnnnnnnnnnnnnnnnnnnnnnnnnnnnnnnnccaaaaaaaaaaaaagatgtttggagttctatctgactatagtcctaagcatactctttattgcaatctgtcaagaatatagccaacaacagagaagagttgataaaccataaaatgaccatttataatatttaatatttagnnnnnnnnnnnnnnnncaatcattgttctaaacaatatatatgcatatgtgtatatgtatagacatatgtacctttatttaatcttcataacaaacataaccgttttatagatgagatagttgagaccaagactgtcttttgtctagctgggttttgtggcttgttttgttttgtttggctagcatgtattactgttctaggcagtattaattaattgattaatttatttaaaatttatcat

SEQ ID NO: 5967 - DNA, 2964 bp, Macaca Fascicularis
cccacgccattccctggcattagggcttaggtatttgtgcctgccctgctttctccaagctgaatcttgggcctctaacttcttccttggaaaggatgggtggtgatcctggaagaaaccacccacccccattcccactccagaaaaacaggccttgatatatcttattttcttctgatgttcaaatgaattggagtgcctcatatacaaatttaatttgaaggctttcaattacttttagcattttgtgtttaaattttctttgtgcagtgtgtgtgggattggagaagtgtagggagaaatgggagggaagaaggaataattttctgcagattttcaaacctgtaataatgaacttttagttctaagttttattatttttatcattctttttaaaaacaaaatgttaagcattgtaatttgattctgtcaacaggcttaaatgttaagactatcttgcccttctcccattctgaattcttccctactgatacaggtatttctgcctaaattcgtaattcatttctgcaaaatgatgctaattctgcttttaacaggttgtttgcttctcaagttggctgtttttaatttttaaacttgtctggcttttgcaatagagtcagtgttctcacaggacttctttagattgaacaaattctcttttaagtgaacaatgatgaagtaaacattttgaaaaagtaggttttagaaaattataaggtagccagacatttaaacttttagatattgtttgaatgatgaggtggtatttaaattatatttgaagacaggaaacaaagaaatgagggttttttcctttcttacatccttgcaagtaaattagtggtagctttttttttccctttcaggttattagtttgtttccataattattagggtttagaaatgaatttttatcatggctttaattattactgctttatattgactaaataataaaagacagtgcatctcatcttcagatttaccatacacttctagaaaaaaatgttatacttgtggaccagtttattttataaggttttaagcgtaaatgatttcctgtgctatcttctgatttttggttttacatcagttaaataaaggatttgtcaaggaactagcattgactatttaatttgtgaaaagagaatgcataatatttaatttgaaaggaaagtgtttatcctaattttgttgatacctttaatttttttcatatttttcttgtttgtaacaacttccaattcagaaagttaaacacttatcttttaaacaattgtctttaaaacctgaaacttgactaccagcgttaaatattctaatattttagttatgtggcccaggatttgacaccaagacacttaaatttcagctgtcctttgtatgaatccgtttccttagtaggctcaatccgactaagtagttgaactggactgtttaaaaagtgaggttggtgaaaataatgaaaatatatttttgcatcaatcaacattactaatgggggaataagcttattgtaggccaatctttgttttctgactttttccccttcacttattgatagggtgggatttgtttagcttcgttctttcgttctttcgtggtactactagtgactgtacacaaaaggtaatgcagtgtgatactatgatactatttctgtttctgggtttacatctgacttctgattgggttcttatccgttaaaaaagttagaatgttaattagcttggaactaaggaaacttgttacttaaatctcagtcccacctccccctatcattattttctctttgatatttctaagtttgaaggaaatggagatgctttctgcccatatttaagatttcaggagttaactgaaattttgaaatccccttggatagtattcagttagatagagttaatgttctatttacagcacattgattcccttctgttgttataatagcccttagtaaactcgagataaaaagctgtaagatggtaagtgcttttgtgttttctttgtatagtggtttagattccagagtgataagaatgagtatgtagagactgagaaatttattattttacttttcatttgttttctttgatacttgtattcaaagggcttgttttatgtggtggttaatcagtaaattgccttgaaagaaggagctaaccaacatctctgcagagaacaaaaatatttttcacaactttgtcttagtagtaattataactggttttgttaataacaatcctaaagtattaacaatacccattctaattactattaaggcttagggcatatttacaaaattcctttctacatctatgcatgtttctgtttgaatgttaatttgtgtattagtcatcaataagcaacatcactttgatatttaagtctcatccttttttttaaaaaacattgatataaatgttttttggttttggatgtttttctgtccaaaatggcaaccctactttaaattcttttcacactgaagcttcaactgatgcaagatgcttttgtgttcctttcctacttattactgctaacgaatagtgtggccgggtcagccgacagggtcaccctgagggtgcgactccgccgcgatggtgacccggttcctgggtccgcgctaccgtcagctggtcaagaactggatcccgacggcctacacgtggggcgccatgggcgccgtggggctggtgtgggccaccgattggcggctgatcctggactgggtaccttacgtcaatggtgcctggtggcgccagctcctcccgcctcagcgcctgctgcatctggagcagcccaagcctcaggatggacatgaggaaatccacagctcaacttcagacctcttatgtttctgaaaacagcttggatcttttaatgcatgttgcattaaacctcccggaaacctaaaaaaaaaaaaaaaaaaaaaaaaaaaaaaaaaaaaaaaaaaaaaaa

SEQ ID NO: 5968 - DNA, 690 bp, Macaca Fascicularis
  misc_feature (1)...(690): n = A,T,C or G
cacaggcatcanctgcctgggaacattcctnnnnnnnttnnnnnnnnnnnnnnnnnncggnnnnnnnnnnnnnnnnnnnnnnnnnnnnnnnnnnnnnnnnnnnnnnnnnnnnnnnnnnnnnnnnnnnnnnnnnnnnnnnnnnnnnnnnnnnnnnnntgtggannnnnnnnnnnnnnnnnnnnnnnnnnnnnnnnnnnnnnnnnnnnnnnnnnnnnnnnnnnnnnnnnnnnnnnnnnnnnnnnnnnnnnnnnnnnnnnnnnnnntcctcttcttctttgtggnnnnnnnnnnnnnnnnnctgacctacagcatctgggatcctggctacgaggaatttcccaaatcccagaagatctcctacccaaactgggtgtacgcggtggtggtgattgtggctggagtgccctgcctcaccatccccagctatgccatctacaagctcatcagnnnnnnnnnnnnnnnnnnnnnnnnnnnnnnngnnnnnnnnnnnnnnnnnnnnnnnnnnnnccccagaagcctccagnnnnnnnnnnnnnnnnntgaagcccagcctggcacctgctctgcccccatcatgggatgggcccccgttggggttcgacgtttcatctcagccannnnnnnnnnnnnnntgggacatctgctnnnnnnnacaggtnnnnnnnnnnnnnnnnnnnnnnatctggatgc

SEQ ID NO: 5969 - DNA, 1030 bp, Macaca Fascicularis
  misc_feature (1)...(1030): n = A,T,C or G
tcattaaggttccagttataaatgttttgttaatatttattaaatgaacatagaatgcagctccatttaccaataacttattttaaatatgcctagtaacacatatgtagcataatttctagaaacaaacatctaacaagtatataatcctgtgaaaatatgaggctttataatattaggttgtcatgatgaagcatgctagaagctgtaacagaataaatagagaataatgaggagtttatgacggaaccttaatatataatgttgccagtgattttagttcaatatttgttactgttatctatctgctgtatatggaattcttttaattcaaatgctgaaaacgaatcagtatttagtcttgccaggcacacccannnnnnnnnnnnnnnnaatatgcacaagtttgtttttgttttttgtttgttggttttttttttnnnnnnnnnnnnnnnnnnnnnnnnnnggaaatagtcgctcatcccactccacgtaaggggtttagtaagagaagtctgtctatctgatagggggcaaatctttttcccctttctgttaatagtcatcacatttctatgccaaatgggaacgatccataactttagtcttaatgtacacattgcattttgataaaattatttttgttgtttcctttgaggttgatcgttgtattgttgttttgctgcactttttacttttttgtgtggagctgtattcccgagaccaacgaagcgttgggagacnnnnnnnnnnnnnnnnnntgtnnnnnnnnnnnnnnntttctgtttccgtgttgtggggtccaccgtacaatggtgtgggaatgatgatgatgtgaatatttagaatgtaccatattttttgtaagttatttatgtttttctaaacaaatttatcctataggttgatgaaacgtcatgtgttttgccaaagactgtaaatatttatttatgtgttcacatggtcaaaatttcaccnnnnnnnnnnnnnnnnnnnnnnnaacctcatttttaaagattaacaacaggaa

SEQ ID NO: 5970 - DNA, 621 bp, Macaca Fascicularis
tgtttgggcctacactggcctttatgagccataacactcaccatggaggtctgtgcttcgctcctgaaggcaaagaaaccacgaacccaccgggtagaatgaacaaccctggacgcgctgcctataagagctataacactcatcaccaaggtttgcagtttcactcctgacagtgagaccatgaacccaacagaagaaagaagttccagacacatctgaatgtctgaaggaacaaactccagacacaccatttttaagaactgtaacacgcaccacgagggtctgcagcttcattcttgaagtcagtgagaggaagaaccccccaattccggacacactcacatggcagaaagaaagagaccaaaaactctctcatatctcttataagggcactggctgcatcatgaaaggctcatccaagcctaattatttccacagacgcaatctccaaatgccatcttgtcgggggctagggtttcaacacaggaattttgatgggaatataattcagtccatagcacaagaagaggacagtcagataaggggtagagtatatgctgaaaaaagagagatggcatgaggattcccactgtattgttctcatgtattaaatggaaatgc

SEQ ID NO: 5971 - DNA, 660 bp, Macaca Fascicularis
  misc_feature (1)...(660): n = A,T,C or G
gtaacaggagatagctatnnnnnttcatctatcaaccaaatggcaagcatctatttcgtaggccactctactgagcttaattatagatgcagcaatgttaccnnnnnnnnnnnnnnnnnnnnnnnnnttttcaattnnnnnnnnnnnnntttcagaacatcttccaataactcataaaacaactgaagtaaannnnnnnnnnnnnnnnnnnnnnnaccaaacttaggttaaaattaagtttaaaatagttcacacctatactgcataatccaacaattttaatttcagttgaagacatgttactaatataactattattaaaagagtagaggatgtgtaattaaccatatcttctaaaacatgattactaaaagaatatataacatcaatattgaccttggtttcttacacaannnnnnnnnnnnnaatagtgaaggagacaccattaaattttctgaacccatgagaggtactggagatggggagtggaaagtgtttggttcagggatatctgaagaacagaagggcagagatttcttaagtgacgcctcatctacaagctggaaatccctaataacaagtaaaaagcttataaataacaggtgatacactcaactcactggttttagtaaattaccaacacaaaaagtattcaagttc

SEQ ID NO: 5972 - DNA, 126 bp, Macaca Fascicularis
ttccttttaccatgaaattgtcttacttgaaaatactgatcctgatgagagataacatggtgcctaggctatctttgtataacgggctcaaattctctacctcttcttggctaatacttttaactg

SEQ ID NO: 5973 - DNA, 3060 bp, Macaca Fascicularis
  misc_feature (1)...(3060): n = A,T,C or G
ctgttgcttctgaccatttgaacaagttacctaattctctgaggacaagctcgaagaatgggagagacaatatctatatgcagggttgttgggaggaataagtgacatgagtgtgtgccaggagtctgattacagaaggtgttcaattaagtaatctgcaatcattaatcaacccatcagtcactggtattatgtgccatccatcctcccagtgttgccaagttatgggtgcgttctgccagcgtcctagcagtgggaaggcttctggctgccagcggcgaacctctcccttggagtatttctcctctcgctgagaagatgaaatgtgaccgggtctctttaagggccaggcgccgggatccaggcggcgcgcaagggctggacgagcagtagcccgcgccgactctcacaggaaggaagcccgggcctctggatccactctccagggcctctggatccgctcgcccagttatgctgctgcggccgctgcggggctgggccgccctggcgctgcgctgctttgagccgggaagccccgggagcccggcctcaggccccgggtcgcggagggtgcagcgcggggcctggccttcggataaagaacgggaaaaagagaaaaaatccgtgatctgtgtcgagggcaatattgcaagtgggaagacgacatgcctggaattcttctccaatgcgacagacattgaggtattaacggagcctgtgtccaagtggagaaatgtccgtggccacaatcctctgggcctgatgtaccaagatgcctctcgctggggccttacgctacagacttacgtgcagctcaccatgctggacaggcatacttgtcctcaggtgtcatctgtacggttgatggagaggtcgattcacagcgcaagatacatttttgtagaaaacctgtatagaagtgggaagatgccagaagtggactatgtagttctgtcggaatggtttgactggatcttgaggaacatggacgtgtccattgatttgattgtttatcttcggaccaatcctgagacttgttaccagaggttaaagaggagatgcagggaagaggagaaggtcattccactggaatacctggaagcaattcaccatctccatgaggagtggctcatcaaaggcagccttttccccgtggcagcccctgttctggtgatcgaggctgaccaccacatggagaggatgttacaactctttgaacaaaatcgggatcgaatattaactccagagaatcggaagcttggcccataggaggcagaaggtctatggatcatgtctgaaaaatgcctgctgctgccaagttagctattatgagcaatctggaaaaacttgctcccaggagggctttgtgtctggccggcttgatttttctaatggtctcatctcctttgctagtgtctttgtcataagtctctggccctcgtgggtaagtgacaaacgggaccaatgggtttgccaagccctttgctgttcgcagcctcacattcccccgctgcctcttccagtggcttcgtgctgccaagttgctttcaagaagcccttagggagagcacctgctgtgtgcctggcgtcccgctggagctgtgtaccaatcatctcagccttcatcaggaggctgaggtaggagtcttatgtcccaggtgaggaatttgaagctcagaaagattgagggctctccagaggtcacacagccagtgtgcagtggagctggcaccattcagactttcagccaactccacaactttcctttgccctggctgcctcctcctgagagctgttccccactgccctgcctcttctggttggaggctctcgtgtctctttggggagagctggcagtgtgtggagccaataacattttctcaatgttgagcagttcccaaggacagtcagcatttctagacttccacaaaattgtgctgcatttgactggagcctggtgttcagtggtttccccgcccgaggccactgcaggcccatccaccacgtcctcctgtggatgttgacgttaggagattcacacgctggctcctgaatggtgctctgtctccttggcgatgaaggtcctgcttcagctgctgccaactccatgtcagggaagtcgcttttggtgtgtggctggtttgcccagagccaagcggaggcaaggggcagccagccctggcttccaaggctcccgtactatctgtgtccttctataaggagctttactcttggaattactgaaagtctgtggcccaagggagagatacaagtggccttaagtctttttgaaatgttctttcatccaggggaatgcctcaagccatagagcctgaaatcatctttgttggttccgaaaataccttaacttcactcagctggaactgcgttgaaagcaaggctgtcccttggatcaagcagaaaacaagagaaagaaagaatattccctttggggacagtctggaaaactgggattcgcaaataaaggctctggaagcattgctagtcctgaagcttcggaggtgggcagagcgagcttcaagaagactggatggaaaccctgggaaggattaaggctcaactctggagaaacaggccatgggctctcagagcagccgttagctgtaaatagaggtagcaaggccactcccaggcccctgtgagtatgggcacctgtacatgcagtgctccgactctgcagaggtgccaagtgaccctgctgggccagtcccagagagttaagaagtcaaggccggccnnnnnnnnnnnnnnnnnnnnnnnnnnnnnnnnnnnnnnnnnnnnnnnnnnnnnnnnnnnnnnnnnnnnnnnnnnnnnnnnnnnnnnnnnnnnnnnnnnnnnnnnnnnnnnnnnnnnnnnnnnnnnnnnnnnnnnnnnnnnnnnnnnnnnnnnnnnnnnnnnnnnnnnnnnnnnnnnnnnnnnnnnnnnnnnnnnnnnnnnnnnnnnnnnnnnnnnnnnnnnnnnnnnnnnnnnnnnnnnnnnnnnnnnnnnnnnnnnnnnnnnnnnnnnnnnnnnncaaaaaaaaaaaaaaaaaaaaaaaaa

SEQ ID NO: 5974 - DNA, 176 bp, Macaca Fascicularis
ctccctccctgctccagagtcactcgccaagcccctccctccctgctccagagtcacttgccattgccaggagatgggggccccaaccagcaccccactttccaaaccccaccccatcccaccagctcggcccccctgaaccccaccccatcccaccagctccggccttgcttggc

SEQ ID NO: 5975 - DNA, 552 bp, Macaca Fascicularis
  misc_feature (1)...(552): n = A,T,C or G
acctaaattaaatgaaaggggtggttgagttnnccttctatggtgnnttaaagaatgcnnnnnnnnnnnnnnnnnnaaaggaaataaatgggagaaaaatcnnnnnnattgaaggcagcaaaaggcacaggtcaagaagcaggtctagatcccggaccagaagttcctctaggtctggtagccgatcccgttcccgtagtcnnnnnnnnnnnnnnnnntcaagaagcaggagcaggagcctgagccggtgcactgtccggctgtnctcccaggggttggtctnnagaccagcctgccaggccctgcagcaggaggacagagcgtcctggggcatccaccttcctgcccaggggacgtggggctgtcggtgtttgcaggctgatgtcccctggctttggcgccccatgggccccagcctctccccactctgggctcactcacaggggccagcccttgccctacctggctgccggtgcctgggttgtgttgagagggggatgcccttgnnnnnnnnnnnnnnnnnnnnnnnnnnnnnnnnnnnnnnnnnnnntc

SEQ ID NO: 5976 - DNA, 613 bp, Macaca Fascicularis
  misc_feature (1)...(613): n = A,T,C or G
gagtagcggggactacaggcgcccacaaccgcgcccggctaaattttttgtatttttagtagagacggggtttcaccgtggtctcgatctcctgaccttgtgnnnnnnnnnnnnnnnnnnnnnnnnnnnnnnnnnnnnnnnnnnnnnnnnnnnnnnnnnggcacccagcacattcttaacctaagacctccaggattctgtttcttctcccagatcatgtgtggctttctttctggcactacattcattcattctggtcaatttaatgaaggcctatgatgtgccaggcactgtcctatactctgaggacacaggagtggccaagagacaaaattgcatcccctcatggaacttgtagtgaacagtaaaaagaatggtttttgctttcctgctccttgcactaagatgaggttatgagacagttttggtcaatgagttgtgagcagaagaagcctcacttctggctgaagcttttcttttttcttttttttcttctttttttttctggtacaagaccagtgctctcctttcctgccttaatcatggaaccacatacagtgagaggagccgtgaaatcaaagcagtccagaacactgagccactgcatggaggg

SEQ ID NO: 5977 - DNA, 1000 bp, Macaca Fascicularis
  misc_feature (1)...(1000): n = A,T,C or G
caggaacagcacccagcannnngaggagggacagagaagcaaggnnnctgctgaaaccacagaggctcttgcagcatcagatctgaggaataaaacggcacctctggccttcatctgggtgctgctnnnnnnnnnnnnnnnnnnnnnnnnntctgtgactgttttgttcccgtggtcagcgatggccagagggtggtgtggtgggtgtgtgggggtccatctccacctgtctcctccagggagctcccaccttggagctgaagactnnnnnnnnnnnnnnnnnnnnnnnnnnnnnnnnnnnnnnnnnnnnnnnnttcgattcctnnnnnnnnnnnnnnatgggcaccgccagagccatttctcatcnnnnnnnnnnnnnnnaccatgtgactggaagnnnnnnnnnnnnnntcaccagcaataaaacccatggcnnnnnnnnnnnnnnnnnnnnnnnnnnnnnnnnnnnnnggtaggccctggtgcagggcaagccacagcgaccatctcagataccatccacagccagggccgccgtgacccgggacagtttcctgnnnnnnnnnnnnnnnnnnnnnnnnnnnnnnnnnnnnagcccggggtagaggagggagtcaggctttgcttcaaggaggcctctaccttttctcannnnnnnnnnnnnaatgtgtcaatgtgaaagtaaaataaaatgtatgtgccaaacctgacatgagctgcgnnnnnnnnnnnnnnnnnnnnngccacacgtgccccagccattgggggtaggcaggtgtgcgtgcgtgcacggctgcttagggcaggcagaccacaggaggcccagctttcagccgccatggacgcnnnnnnnnnnnnnnnnnnnnnnnnnnnnnnnnnnnnnnatatttagcaaagtcttgttacagtttcagatcaaatgannnnnnnnnnnnnnnctttgctgtttggaatctaactggatctgtatatgaatggaaggccttaaagctagtctaat

SEQ ID NO: 5978 - DNA, 780 bp, Macaca Fascicularis
  misc_feature (1)...(780): n = A,T,C or G
gcagccactgctgcgcccannngtgnnnnnccagctgtgnnnnnnntctgctgtgaatccagctgctgccgnnnntgctgctgcctgcgtccagtctgtggccgagtctcctgccacaccacttgctatcgcccaacctgtgtcatctccacctgcccccgccctttgtgctgtgcctcctcttgctgctgagctcctttcctgaacctgtctcctccccttcagctcacttatcacagaagcagaccttgtgcatatcatagacgaactcaggagaggccattcccaccaactgtgtgtccatatactggacatatatctaggatatatgtcctggatatacatctagaannnnnnnnnnnnnnnttaacccaagtgtgaaattagatgttatttacagcaagaaattaatagaatttatcaagttttataccctatatttgtatttatggataccaagttcttctgtcccaaannnnnnnnnnnnnnnagggttactcagggcaaggatgtctcactctcagatttgaaagtctgattttttcaccctgtatttccttttacagcaatgtttctgtatctttttttttctgcttctgaataaaactccacctttgtcgcatagaaatacaatgttctttttgtgttgctttgtaatgattgtccttagttcctgagaaattacacccaaaacataactgaacgaatcctattcttgctctcaccttcaagaaaatcccaacatgtaatgagtttaaaaaataaataaacaacggcaat

SEQ ID NO: 5979 - DNA, 740 bp, Macaca Fascicularis
  misc_feature (1)...(740): n = A,T,C or G
cagcagaggtagtgagggagggcaagagaagnnnctgtcgctgtataggcaactgcctgacnnnnnggtgactgctgtaaccaacatcaggtccccagcccttttgtnnnnnnnnnnnnnnnnnnnnnnnnnnnnnnnnnnnnnnnnnnnnnnnnnnnnnnnnnnnnccggccctttccctctgtttctttgttagaagttttctgtggagctgaaacccagcctccatttgactgggtttcatttagcttagttgggttcttggagccccctgtttgttgttttgtgttgtttccaatgaaaagcaagtttaccctcagagttatgcttttccaaagnnnnnnnnnnnnntgtttttgtttttttttaatgtttcaggttctcagtgaagtgagttggggaggggttgggagtgtttagtaatcaaggtttagaacaccgtgagatagttacctctgatctccaattcctagctaggggctggatagggggaagggagagaggatttctattcacctttaatatatttttacaaaaaaaaatatagaaacaagcccaccgcttctgtacatgtctaaatatatttttagaagtgggtaggattgtgaatttctgatgcagggcctttttataaataggttagagtagcatcattcacacttctctgttgtttttgcccctgtctttttcttatgttgtgttactaatgtaatttatattttttttagatcctcccttcc

SEQ ID NO: 5980 - DNA, 720 bp, Macaca Fascicularis
  misc_feature (1)...(720): n = A,T,C or G
ttatggaaggcagtgtaaaatcnatcnngacaaacgaacgagagttggtggagnntaaattctattttccgaagccagagaattcataacaatggtgggtttaaaaaagaattcaaatggaaagtgtattctcagaacgcaatgcggcaattgttttttaaagcggttatttattatttcctagagagactggttaactgtaacgtagatgtaacaaaataatgaggcgaatgaaccctaactgtacatactcttgacagaaatgaaatgcacnnnnnnnnnnnnnnnnnnnagtgaagcattgtctatcagggctgtttttcttggctgcatctcagattgtgtgggggatcctaacctcagnnnnnnnnnnnnnnnnnnnnnnnnnnnnnnnnnnnntctgtctccaacgacacataaatactcattttaaaacgaaaacaatcttattaaataccattcattcatatctggatttacagatgcttgttatgttggaaaacctgaacccaatataatccttgcatcctgagaaagacagaaaggaaatagtgggttagaacattacaaggtcataataaacagtggtttccaaatgcagagaattaagttattttcattggtagttggacattttgaggatcatgatattgtcaccctctctttttctttaaacaaaaaatttaaaagaagttatgtatatttttaagaaatgggagg

SEQ ID NO: 5981 - DNA, 723 bp, Macaca Fascicularis
  misc_feature (1)...(723): n = A,T,C or G
cagagnncnnnnnnnnnnnnnnnnnnnnnnnnnnnnnnnnnnnnnnnnnnnnnnnnnnnnnncagccggacaggtcagattggagcagtgctaagagtcnnnnnnnnnnnnnnnngacagggccagnnnnnnnnnnnnnnnnnnnnnnnnnnnnnnnnntgccccgcgctagggactcagggtctgggctgctgccaggtgaggagcagagagactgttcccttgggtggagaggcgtgggcatgagagccacccactgccaagcaggaagaatgttggtgctttttttcagagaggggaaccccactggtttttatggaaacaatggaaacttacagatgcctgggatgatgaggcacattcagaacaaatgcttttttttcttttttttttgagacagagtctctctgtgacgcctaggctgcagtgcagtggtgtgatctcggctcgctgcagcctttgcctcccgggttcgggtgattctcctacctcagcctcctgagtgactgggattacacnnnnnnnnnnnnnnnnnnnnnatatttttagtagagatggannnnnnnnnnnnnnnnnnnngtctcgacnnnnnnnnnnnnnnnnnnnnnnnnnnnnnnnnnnnnnnnnnnnnnnnnnnnnnnnnnnnnnnnnnncatgcctggccagaacaaatgcctttttaaaccttttaaaaacactttaaaaatgcctttttctatgtca

SEQ ID NO: 5982 - DNA, 713 bp, Macaca Fascicularis
  misc_feature (1)...(713): n = A,T,C or G
ccaccctttccccagttcaggccctacnngnaggactagtttgtatatcggcatcctccctagtgggacccaaaccagtgcacacttggtgtgtggagatgggagacaaaggacagatctaggagccttgnnnnnnnnnnnnnnnncaaccctccatcagggccaactgggcaggaaagggaacattgcagacctgatttcccaacgatgtcaccctgtcctccctccttgcttcttgctctgctaactcaactctgccttcctctttttcattcttctactctgccctatatggaggacaaatggacaccaggggtgctgaccttattagtgcctgccccagcctgccccaggtgnnnnnnnnnnnnnnnnnnnaggagtctcccacagttatggagccaggaaagaatttctccacactggatggactgtatattgggattaaaaattatattccttatattcctgcttatatcaatgctctctctgtaaaatctcttcctagtctcannnnnnnnnnnnnnnnnngtttaggagttgtattccttttatttactctttgcttgactgcttcctcctaaccctctacctgctagccctctacttnnnnnnnnnnnnnntcattaactctgttggatcaactctctgggaaaagattctgttaatgtaagtgcacttactccctggatgttgtcactagtctagtggctttg

SEQ ID NO: 5983 - DNA, 1267 bp, Macaca Fascicularis
  misc_feature (1)...(1267): n = A,T,C or G
cagatgatgaatacatttggaaaaacaactggttgcatttagctatatacctgtattatgccacctatnnnnnnnnnnnnnnnnnnnnttatcttagttattttttgtgtttatgttattcccagcactcccagtcacatatcaaatattgaattagtgaatgcatgaatggaaaattaacaattacagattgatgtcccaaatatctttttcaaaaaaaacagtcatcacgtacctataggattaactagatctcccttaatattttcaaaggtctctctgcactgatgtccattgtttttaaaacataaaggaaattaaaacacatggctttcttaatcaatcaacctagaattttttgtctataacttagactgacaaattctattgtagtaagggtaatgattagcaactccataaagcaatgttggttgcagagatcaacactgatgatcatgattttaggataaccaannnnnnnnnnnnnnnncttgtggtcctgggatgaatggtgggttatatatcagcatatgtaacacatatacccatgtccctgcataagggagaatgcattacctctctaacatgcatcacacattttcctcaacactgacttaaaatgtttgtcagtgagaattttaagaattcaaaattcaacaaaattattgtttaatgtgaagcagtagaaaaacatagagtcttaacagctccccaaagcaatgtaatacaggcagcctttggttttttgaagtgtgcagtgtctagttgtggatcataataaaaagatgtctttcactacactccacagaggccattgatcaaggtagaaataaagggggagacacggcatgtacttcaggacttcaactaaaggggaactgtggaatgagaatttcaaatacaacatnnnnnnnnnnnnnnnnnnnnnnnnnnnnnnnnnctgggatcccttcttgcagaagctagtaaggggcagtcttcaccggcagcaagcgctctgtacgaggggccgcttagggaaagtaccagggctgccctggagtggagaaggagtgggccaccagagggtatacagtggctgccctactttaaaagaagaggctcaggagcagacatgtctttatgctagcctgaagtcatgcatatgtggctatacgtagcctgtgattcagaaaatttttcaactttggtgttcataaaaatggaagcaatgatagattacattttaaaagtgaaagcccttgtagtatgagtaatgattcagttt

SEQ ID NO: 5984 - DNA, 2259 bp, Macaca Fascicularis
  misc_feature (1)...(2259): n = A,T,C or G
taatgacagagctgggactgagctttaaagccagagctcttaacctaactaacctctaactaaccctatgcctatttccccctacggacttgggggcaaaggcccttgctcttcatcacgcctgcagtgacacttccctgaggatggagggactgagcaagctgagaagcaccctggccaaactgaaaaagccagatatattcacttatgcaaatgccaggactctgtttgttgaagaggttccaggttgagttacatttgagaagctggagaatgtagatgatcctggaaagccgattagcatgcaaagagatattatgccctgcccaaaaagccaggcaggcaatgaggatatggaggaaacttactctgtgtgcaaactattcaattatagaatcagccagtgggattagtagtaggaatgaatgtgaggtgtagagtcccctcttgcaatctggagaggaaagactttagtgtgagacctccttccagagcaactcatgggtcatggcagacgaagtgtctcataaaggtctggaagcccattgcccaacatagagccctgccctttgtcaatgttcaagaaggatagctggtataatgaataaatcaacaaaataattaccttgccaaaaggtaacaaagaatctggaatgtttcccaatatcccatatcttaggagattctgagagaaccccagtccttaggggagacttaaaaaaagaacttcttgactgtgtaaaataagaaatatatatatgccctatataaagagacacagctaagggacgcagaaaggcagaaagaagggttggacgcgggcattcattcatttttttcattcattattccacaaaggcttattaagcacctactgtgtaccaggcacaggtatgtaagaaggcattggagcaggggacacgaacgaggcacagaaagggcctcctcgttcattcattaccggcaatttatttgtgcgccttaaaaagctaggcattgtgctccgtgctcagcgtgcaggaggcaggaaaacagccaggggtcccgacatctcatagagtaaacatcttgtgcttgagacaggcattaatcgatcatgtacatacacaataaattacagttaggctataggagaaatgagatgctatgaaatgctctatcaacggagcctaacccagttgtgaggaagagatttcagtggacagtgaaaggatgagaagaagccagcagggcggagctggggtggagtgtggcaggcagagcagcacttgcaaaggcccgggggcaggaaggagcttgcagcgagggctgaagggtagtgaggcaggtgagcagggaccaaggtgaggctggagacacagacagggccagattgtgcaggtactcataggccaggagtttagattttattctagggatggtgagggccatggaatgggtttaagcaggaccctaacgtgaatggcctacaaagggaagacaggaactcggagacaagagtaagaggcggagatatgctgaaatacagcataaaacatgggcactggcccttggagctcacactcttgtgggaggaagcacataattacacaaatagtgaagcatagacatggtgtctggtgtgcaggagaagccctggggcttacagactcatgtgtctgtcactcattcattcagccactggcccgttgccatttttggccatctgctaaggtactgggaagtgttaggatccaggtacccaggggtgaaacagactctagccctgctctcaagcagtttattgtcatcaaacaccgccatccaggcagggcaattggtgctggaatgggaaccacagtgggtaccgtggcacacagtggacagagtgaccaactgccaggagtgggcagcactcggaggaggctttgtggaaaatatgatgcccattctgggtcttaaagagatgagtgggcatcttccgggtgatgaagggcgtgaaaaaggcttgtggggccaaagaacaacttgggtaaaaaccgggggaagcgaacaagcatgacgtattggggtcagtgctgatagttctgggatgctgatgtacaaggtggggctgggagatgaggccgggaaagtagccacaagccagagtgtaaaggtaccagtgtggccnnnnnnnnnnnnnnnnnnnnnnnnnnnnnnnnnnnnnnnnnnnnnnnnnnnnnnnnnnnnnnnnnnnnnnnnnntgagaccagcctgggcaacatggcaaaaccctgt

SEQ ID NO: 5985 - DNA, 749 bp, Macaca Fascicularis
  misc_feature (1)...(749): n = A,T,C or G
cannnnnnnnnnnnnnnnnnnnnnncctggnnnggatttggtggtgggtcaaagagggcggcttctactgataaacccagagcctcaaggggcccagccatgtcaaacttctctccctcagggacnnnnnnnnnnnnnnnggaggaaggtnnnnnnnnnnnnnnnnnnnnnnnnnnnnnnnnnnnnnnnnnnnnnnnctgtggctcctctgttttacatactcattagtaagtaggaggtccactggnnnnnnnnnnnnnnnnnnnnnnnnnnnnnnnnnnnnnnnnnnnnnnnnnnnnnnnnnnnnnnnnnnnnnnnnnnnnnnnnnnnnnnnnnnnnagtgtcnnnnnnnnnnnnnnnnnnnnnnnnnnnnnnnnnnnnnnnnnnnnnnnnnnnnnnnnnnnnnnnnnnnnnnnnnnnnnnnnnnnnncttagattcacatggtgtggtctgatgttctgagaacatcaggaaatacaacccttttgcccatttatccttctccccggatcccaaggtggtctgttgctctggcttcctttcattgtcttaggccttcatggagtggatgctgcctcctcctggctgtttttgtgcctgtttgaagctactgctgtctctatttctgggaaagacctttaagagtctggctcaggcctaagggctatgtttggtaccagtgttttgtnnnnnnnnnnnnnnnnnnnnnnnnnnnnnnnnnngttttaagctcatggatcaatggatt

SEQ ID NO: 5986 - DNA, 2199 bp, Macaca Fascicularis
atatatagatgtcacaagaagtacagctagctaatccacagtgttggaaatcagcacggtggtcatcctcaaagggatatggtaagtgggtagaaggggacctcttgagggctaggtgcaaactttctatttcttggtctggtttctggtacatggatgtgtacatctggtgaaattcattgagctgtacacctatgttaaatttcaagaatacgcgtcttcaattttttttttctcttgcagaatggaagtgaggagaattgagagtaacatctgtttatacctactttagggctgtcaatgtgctagatatttattatacagatggcaactcgtatcatcctctcagtcatcctatggcataggtgttaggtcctctactttacagatgaggaaactgacactcagaaagggtcattgtccaagtccatgcctttagcaagtgctggaaacagatctaacctaggatcctaatccaggtttgtcggggtccagagctcatcctccttatcctttttccttcatatcctgttgttttcaaggaaagagcactagatttagagtcagaaaatctcattttgaatcctagtactgccattcacacggtacaatctcaggcaaatcacgtaatttggtgtgttctgaatctcattttttcggggaatttttgtgaggtggggagtgggtggtaccaggaaagggatctggcagagtgcataaagcatgtaacagaggctgcactcagcaagtgcgcagtactttctggttcatctaaaccctactaggcatatgtgcccttcctagcaggggtgtggagttcaaagcagagttcaccatgcccctctccctggtgttgccattctagtaaaatcagatgagcatgaacatcaagggcaatgttggtgggaaaaagagcgctgttcagcccgagggtgtgtgtgaaagtgggcaaaaggccttgctttggagttgagggagcttaggggccaatgcaatacagatgaattgcaggtttgttgttttaacaccagctggcacagctgagtccgttttctccccttgggtcatctcctggataggagagggtgggaatgtggagaaagaatatccaaagcctgttagaatcactttcttaaagacagcagattctgcaaccttttttcatgacagaactgagctaaactttttgtgtgtgtgtgtcctctaagaattgtcaggaaagtggatggaaggtaaatagcatctgtatttgttcggccggttgtcacctgtccctaagtctccttaggtctgctgaggaattgggaactccttgagggtgcggggagggctggggacctctagatatgccctttagggcaggacatacagatggcattttatgtgaacttatggccatggtcatgttctgtaagtgaggcacatggaaaaataggtgctagttacttgccttgctaaggttggaagagttatccttttgtgtccatggctaaaggaccttcttgtcttttaaaggtgcaaagattggcaccatgggctggtgggagaaagcaagtgttttaggaggagagaagggggagcagtgagcaggagccaaggcctccctttgccagccccaatcacaccccctcctcttcacagaagtcttcatttctctgttcctaaattgcacacattgatctgctgtgtacaaagttgcaaagcaagttggcaggagtactggagtgtatcaggtctaccagggaataaatatacttgggtttttactttaaatgaggggagagctggggagtggcttgacagccatggggagcccaagcattggtttcccatcaaacaagcccctttgtagattggagctgtcagtcaatgccagcccttgggtccctgcccctggggacaggcgtccccacccacgctgctggcctgccactttggagaagaggcgtgggtggctaggctgctgggaggagagtcttgaacaggagtctaccctctgcacattcaaggccttgtcactaaggtaggagcctttctaaggggaaggagagaggccgggtctcctgggaacagatcctggtcggaagctctgggcttttcacacctgagtgacctgggtagagcctgtatccgatgttaccttttctgatattaatatcttgattaattccagaccaattgtttaaaaaaaaaaaaaaa

SEQ ID NO: 5987 - DNA, 523 bp, Macaca Fascicularis
ggaaaaccctgaataattaggtgtcttaggtaagagtccctaaacaccacgcactctgtgagtctgtaaagaaataaacaaatatggccgggggcggtggctcacgcccgtggtcccaccactttgggaggccgacacggggggatcgcgaggtcaggagatagagaccatcttggataacgcggtgagaccccctctctattaggaaatacaaaaaattggccgggggggggggcgggcgcccgtggtcccggctgctcgggggggggaggccggagaaaggggtgaacccgggggggggggcttgcagagagatgagatccggcccctgcactcccccctgggggacagagcgagactctgtctcaaaaaaaaaaaaaaaagaaataaacaaatattttttggattattcttacccaattccccccgtttgaagaggatttttttgttctttgcaaatatggaagctgtgaaaatcatctcaagagcctctgaaagcgagtgttagggtggttagagggtt

SEQ ID NO: 5988 - DNA, 713 bp, Macaca Fascicularis
  misc_feature (1)...(713): n = A,T,C or G
agacccaggacctcagannnnngnctcacacagacccccatgcnnnccatccccggaatatagtcacaaccctggatccttccnnngccctnnncctgcctccccacctgctccatgggcataagactgtggggcttcaagcaataacaagcaggggcctggagagaggacacaaggagggtgcgtggtgccctcacccctgcccagagcgagggggcaaggactctgcctccaagggcatctggggttctcccctccctcacacgacacactcccattctctttaggtttgcacctgtggtgtgagcagttggactcagtttggacaagggggaaagggggacttccctgggaaggtccagcagctaaaagtggcannnnnnnnnnnnnnnattgggggcctgggaacactggacctgctccttcttccctctccttccccgtttttgtgcttctggtttgtttctttaatttaacaagtgctgcagtttgccctcccattcccatctatcccccaagtcctttgcaatttcctccctcctgccctacatgggggcggtgggtgtgggatcccttcactggcccccttgggaggcctgggttggactcagggtctcctccagctgggggctggaccgcagcacctatctgagcagttagagcgtctttcttttcagattgtgtacagtagattatttattttgttatttgga

SEQ ID NO: 5989 - DNA, 749 bp, Macaca Fascicularis
  misc_feature (1)...(749): n = A,T,C or G
gnnnnnnnnnnnnnnnnnnnnnnnnnnnnnnnnnnnnnnnnnnnnnnncagggannnnnnnnnnnnnnnnnnnnnnnncggcagggtttctctctcnnnnnnnntgcttcactgggctcacctgcttctnnnnnnnnnnnnnnnnnnnnngctctactgaggatctggggttgggagaggctgttggtctgaaggcagtannnnnnnnnnnnnnnnnnnnnnnnnnnnnnnnnnnnnnnnnnnnnnnnnnnnnnnnnngcacctcagaaaaagatctaaaaaacctagtctatgaatttcccacctccatcccatctatgggaannnnnnnnnnnnntttagagagtggggagatgggtccctgcacttggcctctccataagccttggannnnnnnnnnnnnnnnnnnnnnnnnnnnnnnnnnnntgggcagagnnnnnnnnnnnnnnnnnnnnnnnnnnnnnnnnnngacatacgtatacacacaagcgtgcacagaggcatgtcccgtgcccagcctctccaccatcactgtccgccgctggttggaggggctgcaggggtagtgtgtgcagatcttccattgggcaaatgccnnnnnnnnngagggaagggcctaggaagcccccatgaagaaggttctggatttattccctcctctaaatgctnnnnnnnnnnnnnnnnnnnagccgactggaggctgccaggaattcaggatgcatacagctgnaatttaacccagagcagct

SEQ ID NO: 5990 - DNA, 702 bp, Macaca Fascicularis
acagggagatgttatacaaatggaggaaaccattataccttttgatatggaatatattacagagttacagttcacaaagtagacctctgagctgaaaacccgagtctctgctgtgactgtcatctcactgagcacttcgcctttctttgcttttatttgttccttctataaaaaggcaataatgataatttataatagtttccctacccagagatatcagaaggatgctacagtgaatgttaaagtaccttgagctccttaaatcaaaggtgctatataaatatgtaagactctactttcagaaaaaggtaatattctttcctgcactgatccctactaattctgtattgatccaaaggcaactatatgctaagaaatgtatagaaaatataagtctgtgtctgtgtactatagagatatatgtgacaagtataaacaaaatgaagcaataatgaacagttattggggaaacatgataaagagattatattaaacttatatttgaccataaaatcctttttatggcttgctcaaaccgggctcactgtaaaatcatgatccagcttattgctaatctttatgatatgcttattcctaatctttatggtatggtgtcaaccgttcatttgtatcttattgcaggttccctggaccatagacaaaggacagaaaatacttgctttgataatatatatgctgttg

SEQ ID NO: 5991 - DNA, 1685 bp, Macaca Fascicularis
ttttcagtctccgaaagtgctgggattacagataggagccactgtgcccagctcttccttcattttaaaaggtaaaattggtgaagtaagttgcaaccctttgtggggcccactggttttggcagggccaggctgggctgggatgaatggctctgtaggtctgtctgagctccctcatgtgtgctgaggtcagctgatatgggcaagtgcagctccagccttggctctggcccacatatttcttacccttgttttataacctgtgttacaagcccggtcttttctgcccatggtaacggcagaggcacaaaagagccattggggagcagttatccgatctacattttcaaaagttcaccctgactatgagatgtcagaatctcatttgattgccttttcatgaagtcatgatcctcagggagcctgtaggttttctggaagtaggatatagaataggagctgatatagtcacccatttcttctgtttatgtggctcacttcaccagtcactgtcaagaaaagttgggatatttgagctgacagagatgagatcacaataaacaccaacccagagatggctacacatgtattctgaaatgactacactctgttgaccaggtgaggagtggccctccacagcacatactgtcctatgggcagagcgacaacttaggtatccaagatgctgatgcagcaaggcctagtgctgagtaactgcaggattccagggagctcttcatagctataggcctcagtttcttctttaaagaggaggaaatatgtgaatagaatctatatcctgaatcagtggggttcaagctggtgtgaatacttcatctttgaaagggctgagatactttttctagtacgtttaatttttaaatttttttttaattgattgtagagttttcctgaaagaataaatcaacactgataccaagagagcaaggaatgatggaccaagtctttccaaaacctattaccttgccaaaaggtggtaagtcattacttcttgtcctgaaataccagcagcaagtaagagctccagaatttcagccaacgtgacgtgttgttttttatattcccatttccatatctgaggtgcacagctcctggctgtcctgcctcttggggaacaccatgattccttcctgggctggcagatgactgataaaacataaagaatgtctggaggaagttgtctatgctttgtgaagcccctttttaatttatttactttttcttattttttcattttttaataacttgtttttcccacatgccttctatccttctgatccacccatttttttaatacaaaaaattaagtattttgggtttctttttgccatgtagcacataaacagacctccttaatagactgctttttggtttgaaagagagaagcagtcaagaacacaggttcttgaaaataaggaagtgtgtttgtgagcatatgtgttttgggggagggtagagagtagggttaagtgatgatggttatgagaatttaaaggcttagcagagctgtgagtttaaggtggtcaggaaaattttctccgtaggtcctttatgtccaaatcagggaatgtttgtagaaatatcagattttctttctatttgggaagaggttgtctcccttcaatcttccatctccaaaaaaaaaaaaaaaaaaaaaaaaaaaa

SEQ ID NO: 5992 - DNA, 686 bp, Macaca Fascicularis
atgagatcataggatggaataagtagttatggctgatagtggcttttttcaaaatggctttcttacctatcacacttttttatctgtatttagccttggcatctttatatttgtcttattttgaattttatccactttataataacaagtttatgtttgagcaactttttcatttaatacagaagagtaaggactatgcagtgtaagctgcatcacttctgctttcttcctactagtgacaatcatctggtcttgccctcaagcaacaattgctagatgacatctttgtataagaaagaaaccccagatagagttgatatttcagctttgggctgtcaaaagggtatgtcatggaccaaagcactgttagtatgggtatgtttgcatttggtcactgatatgtaaatgactgctgggcaacggctggaccacttctcaatcagcaaataaagccatgtctattttgctatctcaagatagactgtgctgtgtaataaatcgaattcttaactctatttctccagttttttagtcctttaactttctggattgcaacaaagtctagtttagaccttctttaagccgttttagaagttcaagtataatgggaatttcttttcttggttcttttcaggttatgaggttcggtcagtgacgtaattttttttcataatttgattgatttg

SEQ ID NO: 5993 - DNA, 189 bp, Macaca Fascicularis
  misc_feature (1)...(189): n = A,T,C or G
gagcccctcaccatgagatgggagccgtcttcccagtccnnnnnnnnnnnnnnnnnnnnnnnnnnnnncctggttctccttggagctgtggtcactngaccccannnnnaaagccccctttattaggtagacaatttcccttccctgagtcccgagagacagggccagagcagacccgtataagtaaag

SEQ ID NO: 5994 - DNA, 730 bp, Macaca Fascicularis
  misc_feature (1)...(730): n = A,T,C or G
gaaacnnnnnnnnnnnnnnnnnnnnnnnnnnnnnnnnnnnnnnnncagannnnnnnnnnnnnnnnnnnnnnnnnnnnnnnnnnnnnnnnnnngataaannnnnnnnnnnnnnnnnnnnnnnnnnnnnnnnnnnnnnnnnnnnnnnnnnnnnnnnnnnnnnnnnnnnnnnnnnnnnnnnnnnnnnnnnnnnnnnacaatcgagctaaactgctttccctttgttcttttatcatagagacctgcctnnnnnnnnnnnnnnnnnnnnnnnnnnnnnnnnnnnnnnnnnnnnnnnnnnnggattctcaagattccttatttgcctcgagaaccttgtttaaaagcagaagannnnnnnnnnnnnnnnnnnnnnaaaccaatctagattttagaagtgggctggctatagtgagccaacatgatttagaccagctnnnnnnnnnnnnnnnnnnnncttttggagaatcattacaaaagaaactcctggacattgaaggattatattcaaaagtnnnnnnnnnnnnnnnnnnnnnnnnnnnnnnnnnnnnnnnnnnnnnnnnnnnnnnnnnnnnnnnnnnnnnnnnnnnnnnnnnnnnnnnnnnnnnntatgagagagatgaattggggagaactgtctccgttttatagattaatttctttctaaattatgaccaaaaatattttgctatttctttcttagtatatggacatcttttccgtaaactttgcctag

SEQ ID NO: 5995 - DNA, 751 bp, Macaca Fascicularis
  misc_feature (1)...(751): n = A,T,C or G
ggangcctgcagatgacgaagggcagctcagaccctggcctagcagcaccacattcctgtttttcagcttatttgaagtcctgcctcattctcactggagcctcagtctctcctgcttggtcttggccctaaattggggcaagtgaagccagaggagggtgccctgagctgggtgggctggagtggaactcctcactggctgctgggctccgcccaccctgctcccttccggacaatgaagaagcctttgcaccctgggaggaaggaccaccccgagccctctatgcctggccagcctccagctcctcagacctcctgggtggggtttggcttcagggtggggtttagaagcttctggaagtcgtgctggtctcccaggtgaggcaagccatggttgctgggctgtggggtgagtggcttgcttggcgggacctgatgagttggtggcatgggaaggatgtgggtctccagtgccttggccctggcgtagctgcaggaggagatgggggctttcgcttctccccgttgagctctgccccctctgagcctggtcttttgtccttttttattttggtctctaagataaatgttcgtctttggagggtgctgggtagaagctagggaggggagtgccttctctctccagatttcaccttccagcgtccagaagttagaagggtctgagggagggggcagtgccttacacatgcttgattcccacgctaccccctgcttggtaggcgagacgaac

SEQ ID NO: 5996 - DNA, 416 bp, Macaca Fascicularis
  misc_feature (1)...(416): n = A,T,C or G
ctcggaaggctgaggcaggagaattgcttgaacccgggaggcagaggttgcggtgagctgagannnnnnnnnnnnnnntcagcctgggcaacaaaagcaaaactccgtctcaaaaaaaaaggcgaaaaaacaaaaacaaacaaacaaaaaaaaacttgcatctaacnnnnnnnncttggtcttctcttaatccattaaaaagttgttctttgtttccagcttgcattgattgctacaacagtactaatttggctttcacnnnnnnnnnnnnnnnnnntaatcaaaactttcattgttattattcgttatggtagaatcattattaattcatgtgctttgtgttcagttttgtgctctgagagatgcaccaattgtcaaattaccannnnnnngnnnnnnnttataggagaaagcaa

SEQ ID NO: 5997 - DNA, 652 bp, Macaca Fascicularis
  misc_feature (1)...(652): n = A,T,C or G
caggactgatttattttgggttaagtctaggtaactacactatgtaataaaatgtaagtcctgttttgccacattctttcatccttggaagaaacatttacagactgttttaggagcctaggattggtgaaccaagcagactaagattcatggtttttttgtttgtttgtttgtttcattttgttttgtttttttgnnnnnnnnnnnnnnnnnnnnnnnnnnnnnnnnnnnnnnnnnnnnnnnnnnnnnnnnnnnnnnnnnnnnnnnnnnnnnnnnnnnnnnnnnnnnnnnnnnnnnnnnnnnnnnnnnnnnnnnnnnnnnnnnnnnnnnnnnnnnnnnnnnnnnnnnnnnnnnnnnnnnnnnnnnnnnnnnnnnnnnnnnnnnnnnnnnnnnnnnnnnnnnnnnnnnnnnnnnnnnnnnnnnnnnnnnnnnnnnnnnnnnnnnnnnnnnnnnnnnnnnnnnnnnnnnnnnntggccagattcctgtttttgccatgcttatattccaggtgggagatggatactaaacaactgatgtacaattcctaacaagctaggaagtgatacatgctgcgggaaaacaaaaagaggaaaaagacggatcaggcatgttattatcactgttttggttttatttatttcgtggttttgt

SEQ ID NO: 5998 - DNA, 647 bp, Macaca Fascicularis
  misc_feature (1)...(647): n = A,T,C or G
ggcaaatctcaaacagcaaagcaagcgggtgtggcaggctgagcagcacagcccacgggcatcttctggggaacccaccagtccaggatgtaaaaactgagggaggaggaggactcccttgtccaagttccaaatagggcaaaaggtgtgtttccctggaaagtatttttttaaaaaatgagataaggtcttgctttgtcacccaggcaagagtgcaggggccagatcatggctgactgtagcctccnnnnnnnnnnnnnnnnnnnnnnnnnnnnnnnnnnnnnnnnnnnnnnnnnnnnnnnnnnnnnnnnnnnnnnnnnnnngtcagggctcacttttcaaagccccaaacagcaggcattgggcaaaatgtgtgtttgtttcttggggaggctgttattattttttagatagagtcttgctctgtcacccaggctggtgtacagtggcgcaatctctgcgcactgcaacctcccgcctctcgggttcaagcaattctcctgcctcagcctcacaagtagctgggacttacaggtgcacaccaccacgccttttttttttttttttaaatacagatggggtttcatcatgttggccaggatggtctcgaactcctgacctcagatgatccacccacctcggcctcc

SEQ ID NO: 5999 - DNA, 133 bp, Macaca Fascicularis
caacccaatcataaaaataatcaatcactccctcattgatttacccaccccacctaacctttccatatgatgaaactttggctcacttctcgcagcctgtctaaccctacaaatcatcacaggcctactatta

SEQ ID NO: 6000 - DNA, 258 bp, Macaca Fascicularis
acacagagtgaggggctctgagagtctctatgtatataaagatataggaagaaaatgagaaccatcacgggaatctgttgggcttctccccatgactgtgatcttacccatgtttgaaacacaaactttaaatttataacaattatgattcttgcagttttcaagtaatttgttaaatgcctattcaacacagacagatttttattttcagctcgtggcttgtaaatgcctacaaactgattcatgttggtggtcgtt

SEQ ID NO: 6001 - DNA, 748 bp, Macaca Fascicularis
  misc_feature (1)...(748): n = A,T,C or G
catgctcagtagaannnnnnnnnnnnnnnnnnnnatagaagcaggtgggaannnnntggaaccttctcagntnnngcagcccttccctcnnnnnnnnnnnnnnnagttgttgtgggtccactctctcctgcccatcctctgagggtgtgtctgagcagagtacatcctgcctgggttctttgtggccagccagctttggtggtgagccggaaacaaccnnnnnnnnnnnnnnnnnnnnnnnnaaccttgccttccaaaaatactgcattcagttaacactgccaggtgccattttggttgtctccaggacttggcagctgaaatctctgtgcccagaacacagttgaaaggcccttctcttcctgaggttctgttttcatagtgggctgtgctgggatggaacaaaaatgatgccacacaaaaaattttagatgatagatccagttccatggatgacatgaacatgctactatcaaacagcgatagtgctcaggttcttgtgtgactttcttctgcagcttcacagtcccagctcatagagaggagggtggctttttcccatacacaagaaggtggtgggtgggaattcacctgggccctcacgatccatgtttcctctctagatatctagtttatggcctggagaggaaggtttcctatcagagaaggaagaggactgtgtaggcccttctgttagggcctatctgcgttggttaggacatccttggcctgttggtgttgacccttt

SEQ ID NO: 6002 - DNA, 163 bp, Macaca Fascicularis
agaaaaaagagaagcacctttaaacgcaaatgacatccaagattaaaataatcgcggctttaaaaatatttgatgaaattcttgtactacagtgttctttttaaaccaattctccaagagactaatcaatgaaatttatacgtttcatcaacttataaaattt

SEQ ID NO: 6003 - DNA, 2240 bp, Macaca Fascicularis
gtgctcggcggtgagcacatccaggaccggctccggggcactctgctctggctgcgtcctgcccagtgaatggtgtggcagccattaccaaccactggtttctacctggaggtggacgcccgcccggaagctgcagcaggtggcacggccgcgaggcagagaggcttcctgggctgcattcgggcactgcaggtgaacgggaggaccctggacctggagggaagggccaaggtcacgcctggtgtggagcctgggtgccctgggcactgcagcacctacggacacttgtgtctccatggggggcagtgccgcgagaggcaccagggcttctcctgtgactgtgagctgtctgcatacacggggcccttctgctctagtgatcacgtattattaaaaatctgccccatatggcccttgactgtttcaaacctactcagatgacattattatttaagagatttctgcgtattttggaactggctcctcggtgacttacaattttcaggaatatcattccccaagtacgaatgccagctcccacgctgcctcattccagggagagacgacgttgacccaagagacaatcgcgttcagcttccgaacagtgcaagccccgagcctgctgctttacgtggactctttctacaaggagtacctttccgtcatccttgccaaaaatggaacatggcagatgggaaactctaccacgtgaacatcagcagagaagacggggtggtctttgtcgaggtgaaccagaaaacttggagacaagtgagtctgtcatcaggtacagcattcagagccatcaaatccctggtgctgggcaggattttagagccgggcggccacgtggacgcggagactgcacgggccggcgcgcggggcttctccggctgcctctcggcgctgcagttccagcgcgtggccccgctgaaggctgcgctgcttccagggcgctccgggcgcgcctcggtgcgcggccccgtggccaggtcgagctgtggagccggggaggacgcggcgcgggaacgcacgcacgctcgagcagaatatcctgatccggtggatgagggcgaacccatagctggcgagaccagaggagactccgcagtgattggaggtgtgattgccgttgtgatgttcttcctgctctgtctggctgccattgccgtccgcctgtatcagcagaggaacttgtacacacccaaagaggcgccaccagagagccacggcaccaatgaggcagtgctccgacgcgagctcagcgtgcagaacgcagcgcgggggacccagaaggagcacttcgtctgagcgggaacgaggggcaacacttcactgcagtgactcggcgcttcaccagggctctccatggccagaaatgacctttgcaaatgcaacaggcttcaaggcagtcaggctgcacagacgccccctcagagggcctggggcctcgtcccgagacattgtcctttaccctccttcatgcccttcacatgaccgtgagttagacagcttcataatctgggttagtttcccatgccctgatgtgattttacatggacgtttaacctgcttagcgactgtgagttttggaagggaaacttgctcaagttctgagttctctgtcacagtaggacctgcagcttcacttgctctacacacacaggctgcctatagtcattgctattggtttccacagaaccaagcttcctcttgactgtgtctgttgaatttttaggtcttcttgcgagccatagccaaggggccaaaaatcaacagcctgtctgccttgctgtctgctggccaatgcaaagtgttactcctctgttgagatttttatttttcggtttgtttgcattgcttttgtttagtttttcctattcaaatgttcgtgatgaataaggaaatgtctggtactaactgccagtcttcagctgtgaaactgaaaatccacgtggagcaacactccggagttaaccgcgcacgctctctgctctgttttcttctaatgtcaccgagaccagtactgatggttccagcctctcagccgtgccctgactcatgctgacttcacaaaggtttctgccttctctttttcaactaaggttgaagagcagtagaaccacaaattcttaataatgaaatgtatttttatttgcagctgcaaaaaaaaaaaaaaaaaaaaaaaaaaaaaaaaaaaaaaaaaaaaaaaaaaaaaaaaaaaaaaaaaaaaaaaaaaa

SEQ ID NO: 6004 - DNA, 771 bp, Macaca Fascicularis
  misc_feature (1)...(771): n = A,T,C or G
gtgagatagaannntgccgtactttccaccacagaaatgtatttgtgtcgttggcaccagcctcccccatcaccgttaccattacgggaatcctctccaaagaaggaggagactgtagcaagtaaggcatagagaacacttgctcttataccctagtggtggcggtcaagctaacaagtgtgaaaatgcctttggcatttttaaaaaagtgcaannnnnnnnnnnnnnnnnnnnnnnnnnnnnnnnnnnnnnnnnnnnnnnnnnnnnnnnnnnnnnnnnnnnnnnnnnnnnnnnnnnnnnnnnnnnnnnnnnnnnnnnnnnnnnnnncttacaacactgggagatgtgtttgccagtaagttgctcatcacaagagcaccagacttgggggtgtaatnnnnnnnnnnnnnnnngccctctgaaagaagggttttctgtgctgtgaaatgcatagaactatactttgccatgcacgactgttcctgcaattgatattgtgtgaaatctgggagggtggtctttgggtgttctcaggggccaatggtaatttttgggttggggagcnnnnnnnnnnnnnnnnnnnnnnnnctgggcctccgctctttaactatataaacatttatctgtatatctatgtccctgtctggggggcaggaggaatctgccaaagaccaacagtcttactttatcttactatacttcacaaaggttctaaaatgtgaagagtttacttggattgcagtagcccatttggttgttnnntatatttaa

SEQ ID NO: 6005 - DNA, 3207 bp, Macaca Fascicularis
actagctcattgcgcctctcctgcagtctggttggcaccggctcccattccggctccagcctccaatccgacccccatttcggctgcagcctcggacctagctccggccctcagtctatcgggttgcatcctccctccctgttccggatcctatcttgcgccagcgcctactccaggatcccgtagccagacctcaagccatggctggtcccttctcccgtctgctgtccgcccgcccgggaatcaggctcctggctttggccggagcggggtctctagccgctgggtttctgctgcgaccggaacctgtacgagcggccagtgaacgacggaggctgtatcccccgagcgctgagtacccagacctccgaaagcacaacaactgcatggccagtcacctgaccccagcagtctatgcacggctctgcgacaagaccacacccactggttggacattagatcagtgtatccagactggcgtggacaaccctggccaccccttcatcaagactgtgggcatggtggctggagatgaggagacctatgaggtatttgctgacctgtttgaccctgtgatccaagagcgacacaatggatatgacccccggacaatgaagcacaccacggatctggatgccagtaaaagtcagaactggccgaagcatccgaggactcagtctgcctccagcttgcactcgagcagagcgacgggaggtggaatgtgttgtggtggatgcactgagtggcctgaagggtgacctggctggacgttactataggctcagtgagatgacagaggctgaacagcagcagctgattgatgaccactttctgtttgataagcctgtgtccccattgctgactgcagcaggaatggctcgagactggccagatgctcgtggaatttggcacaacaatgagaagagcttcccgatctgggtgaatgaggaggatcatacacgggtcatctccatggagaagggtggcaacatgaagagagtgtttgaaagattctgccgaggcctcaaagaggttggaaaagattgtgtaggggaactaagtgggaggacataaagaaaaccaaagagtagcataaatagattatgtaatttatcaacccacccaggacatgtctgatagtaaaaaggactatctaggactcactctaggaataaaggtataaaccagctgggaccataccgggaaaaccaggacatgtggtcaccctaagattaggaaaagaaagagtgtcaggaaccttaggaagtgatagggcagttgccggataatgcaaaaaaggaataactgagatgtcaggtcagtgcctggaatgtgtgcagtggaatggtgaggtgtgcagataaggaaaacatttgagcttagactgatgttggcggggagaggttgctgtgttcatgactccaatataaccacccagttctgagccaaggtaggccttgactctgggttctatcattcttgttagagtatcaggtcgaggctttaagttgagagttgggagggagactggggaaggaggaggatcaaatgtttcgagttctagaatatgtggctctatatgagaggttgaactgaatcatcaatcctacatagattgggtctccatattcaagtctacattagaaatccccataaactcaattcaatcttactgtatgttctcaaacatacagttctattttaggtttgcaaagaaaaagggctcctcttttagattctgagaagtttctactattttaggcaagtaatagataacatattctgactatgagtgggtcgggaagtacctttaaattatatgcctcagtttcctcgtctgtaaaattgggataatgagattttctacattttaggttgttgtggggattaaatgaaatacaggtaaagtacttggtccaacgtaagtgcttaataagtgttaaagtgttagctgcattattattctagatggaagggtttcccccatgttcagcatgtaagatatgccctatgccatggttctttctgaactataaacaggatccttttacgcacgttgggtagtggtctttgtgaccgtcactctggtagatcccttgtctcttcaactccaatagtcatcttcatgactacgtggttaattgaagcaaaacaccttcccctgcccctattcctatgaatctggcttttctgctctgttttcatctttctctgcattgacacaggtgctccgttcacagctaacagaacgttatcttacctcttcctggcaaagcttacaccttcatcttctgtctgaaaggacccttccaagctctaggctcattagcaaagcaaagataattgatgcatgcagaactcattgaataatcagtcctctctcagttcagtttaccacctctgttcatttccctagatcatccctaatacaccactccttcgagttttcttcttccacatattttttcacaatctcattattatgcacatcataattttgcatcatgcatgcatgaaaacaataacaagccattttcattaaaaaagaccagtgtcatccattcacagccaagtttctgttctagacatatttctagtgttcttgtgtgtctagctaagggagggtccagggttaatgaaatatccctgatttttcattaacaaaacctttatggactcaggtggagcaacttatccaagaacgtggctgggagttcatgtggaatgagcgtttgggatacatcttgacctgtccatctaacctgggcactggacttcgggcaggagtgcacatcaaactgcccctgctaagcaaagatagccgcttcccaaagatcctggagaacctaaggctccaaaagcgtggtactggaggagtggacactgctgccacaggcggtgtctttgatatttctaatttggaccgactaggcaaatcagaggtggagcttgtgcagctggtcatcgatggagtaaactatttgattgattgtgaacggcgtctggagagaggccaggatatccgcatccccacacctgtcatccacaccaagcattaactccccaccaccaactgatgtctcaagattcccaggagttctgctcattctaatgatggccctttctacttgctctggacctgcccccgcatcccctgcctccatcctagtaaagactccttgctatgctgaaaaaaaaaaaaaaaaa

SEQ ID NO: 6006 - DNA, 740 bp, Macaca Fascicularis
  misc_feature (1)...(740): n = A,T,C or G
cgcagagctgcagcagcgatggctggagaccctgaacactgctgcccgtggggacacggnnnaggacagcccggggaccctgcagcctcaggtccctatgggcacagctgctccgtgagctgagtctcccgctgccctgcactccaccacatcgggcctgtggtctcctgggaggtggcgtcagaggccagatgaagagcgccctggactgctgagggtgggccaacagcccagagctcaggatacttggctttggagggaaggaaactgaggcccagagaggggcagccactggccaagggtcacccagcaagtcttggctaagagcctggcctccagccccagcagtgtggcccagagcaggggccgactgccacagtaaccatcatccatacgggtcgtgtggtgatgctggcccagaaggcagaaggaggcagcatgggcactgccagggacagccacatccggccggtctgcagtgtggtccacccccgcttctgcccagcctgtctacaccgtgtgagctgaatcatgactcgcttcccacctcccttctctgtcctctcctgaagtcctgcctccagcccccaggaggtggacctgccgcgtcctagctggactcacggttcctaaataactgcactcggaagctctgctgggacttaccccagccactgagtggcagacgcatgagatttgtggctgttcctgatgctggtggcacacagtgcttatctgca

SEQ ID NO: 6007 - DNA, 571 bp, Macaca Fascicularis
  misc_feature (1)...(571): n = A,T,C or G
gttacagcatattttgctaaaatcttgaatccattgaagagaagtaaggcccttgaaattttgagaactaggcgacatgtctaatacttgagaaaagtgcttttcacacctctaggccaaggtttctgcctttttttgcttattgggttaattttttgtaatttaataggaaagaatgaaaaggaatagtatccaagggaaaggttttatgttttatagaaaaggaacacacccatagaactggaaggaattgatgatttttatttctattatgcataaagtgatttaatgttgcatttcctgatgtagctgtaaccaatatcaaagttgcttttcctggctgcgcatgnnnnnnnnnnnnnnnnnnnnnnnnnnnnnnnnnnnnnnnnnnnnnnnnnnnnnnnnnnnnnnnnnnnnnnnnnnnnnnnnnnnnnnnnnnnnnnnnnnnnnnnnnnnnnnnnnnnnnnnnnnnnnnnnnnnnnnnnnnnnnnnnnnnnnnnncagcgactcggggaggctgaggtgggaggatcacttgatcccaggaggctgagactgcagagagccatgt

SEQ ID NO: 6008 - DNA, 1891 bp, Macaca Fascicularis
gattatcagacaagacattggcagtgagttcatctgctctactctgctttagaacaacacatgtgattaaccagataggcattttccaaaaacaaaccgtatcactgaagaatgcaagactgtttctttagaaccttccacgcttaacttgaaagctgtcaacccaggaggctgaaacagagcaagattatgaatcctgagtgaatggctcgttctttgcgcccatgcttttgctgcatgctgccatgtggtacaaggctgagaggtatgcactatgatagctaatgaagcacttcctttatgtcacactgaccagaactcttatttgaagcccgtatattatgccactgaaatctcacaatgttagcttttgttctggctagcagaggcagttgcttgtcctttctgtagctaaatttcatgcaccaaagttgttagaccctttactaatatgtgtagctctaagtcataaaaccagcttctgctatgtttgcaagaatgttttgttttgtctgcctttttaatgacagcatcccctaaagccaatcatttgtgactttcaggccattgagagataaaaggcttgaagtaaaagtcattggccctcctgaagtcactcatctatgtcaaatatagtgattcaattaacattttaagaacagagattgagaagaaacttaatttaggatgaaaagaatggcatcagatggaccaaaattaattacactgtgtaatactcaatgtactgagaaatattcagtgtgactcatttgttatatttaaacatattattctcataaggtattatgtgattagggcctccttttctggactatggttagattttgtgtctcaatgcatgctttaagaaagtgacctaaagaacaatacatactgattgtcataacaatctatgaaatataggcttcaattaacctaaatgcaaataagaaatatttaagagttcctcaaagcttataaatttttaaatgaagaaattatgaaccaccttctcaaacctgaggtgtatcaagtccttcagggagtcctccatggttccttcctctccgtcattgaccacatcccatcagtcacaaaataccataactacacgtcccaaaactagcggcttctcttcaatcccttctccaagccctttgtataagtagccaccatttttcattgtgtgaaagttgattgtacaaattggatcattcttgtaatattcagctaaaccagaatagaagaaccagggacaaagcactcgggacatatagcacctgctccaagaattaaatgttccacaagcccagctgctgaaactgcctattggaacctgaaacaagtttttctctcatagctactcaaacaacctgctgtgagtctaaggccagttttacccactactgtcaatcatcaatcagagcttgccagctccccagaattttactagtgccaatgaactttctgaaaaaacaatatgtaacatttttcctttttagaaaacctccaaccttctccttgttttttggacactagtttgtgtgtatgccctgagttgcaattcttgcttccctaataaaatttagagattcgtctcttaaattgcatttgacttagacacctggatctaacacacctgttattttatcctgttttcacactgctataaagaaatacccaaggctgggtaattttaaagaaaagagacttaattgactcacagttccacctggctggggagacctcaggaaactttccatcatggcggaaggtgaaggggaagccggcacctccatgcaactccatgcctatttactggaaacctgttatgccaaacagtactactgctaataaaatgaccagtttacctgaaaaaaaaaaaaaaaaa

SEQ ID NO: 6009 - DNA, 732 bp, Macaca Fascicularis
  misc_feature (1)...(732): n = A,T,C or G
gatgagtttcagggtgaaatannnnnnnnnnnnnnnnnnnnnnnnnnnnnnnnnnnnnnnnnnnnaaccagtgagcaacccgagtggaaannnnnnnnggtgaccatgcaacatacgaaaagcaagaagannnnnnnnnnnnnnncaaacgtgcggctctctcggattcaggcagatggggatgttgtctgtgagcttccnnnnnnnnnnnnnnnnnnnnnnnnnnnnnnnnnnnnnnnnnnnnaggtnnnnnnnnnnnnnnnnnnnctgaagcatgcagaaacggagtctgaggttttcctctgtctctttggggagaggggagactctnnnnnnnnnnnnnnnnnnnnnnnnnnnatgcaagtaaaatttcaaagaggacagnnnnnnnnnnnnnnnnnnnnnnnnnnnnnnnttggaaaactgcagaaggtgctgttgcgcnnnnnnnnnnnnnnnnnnnnnnnnnnnnnnnnnnnnnaacaagtcgtagtcagagagcccggcaccacatccaagtccatcttcacctgtcaaagatggcttccttnnnnnnnnnnnnnnntaattcattcagaaattnnnnnnnnnnnnnnnnnnnnnnnnnnnnnnnnnnntcggtagaaggaagtacaagatgattttgttacatctggannnnnnnnnnnnnnnttccccagttttcctcagaacagcccctttgatcatttatcttttattgttggatttata

SEQ ID NO: 6010 - DNA, 2243 bp, Macaca Fascicularis
agattgttccacctggtacagaaggataggggagaggagtaaaggccaggatctcaaaagctggagattctttcgggagagaaaagatctagagaggaaaatatcgtacatgtgaatatagttcaagacatcatttacgaggccatgcagagcaaacatgaagacatgttaaaagccatgccatttcccatactatcatggctgtcagccaaaggagaattttgaagggagtcaagagagggagtgactgtcaaccaagcagatactttatgagagcagcaaaattatatgattttgtgaagtgttgctacataaatatgatagcaactttttctacacaaagggccccaggcaaatttgtaattttttcagtatacataaaattgttcagtcatgaactactaaaaatgttcattggtatgcagcatacagaccatgtgttgagaaatccagtttgagtaggctctagaacaaaaataactttctaatacttttagaatataaaaagaccattgtatatgtgtcaagtttacaaagaataaggttatcatttaaaagaaagctttatacaaaataattttcaataaagagattattaatatttgcctttgtgctttttctttagattttagccttcatcctaataaggaacatccctggatatgcccgttcagtttacagttcatttttcgcttggtttggaaaaatttcattagagctgtttatttgccagtatcacatatggctggcagcggacacaaggggtatcttggtactgatacctggaaaccctatgctcaacatcattgtcagcactttcatatttgtttgtgtggcacatgaaatttctcagatcactaatgatcttgcacagattattattcctaaagataactcctctctcttgaaaaggttggcatgtatagctgcatttttttgtggactcctcatcttatcatccattcaagataaatcaaaacattaggttccaaaaattctaaaaaacctaaactcttcaggcttactttgtgtgtctctagaagagaaaagcatctatctggagatataaatgtatatgtaaatataaacgtttgtggcaagaggacagttctgtgatatctgttgaacatgtgtggttgtatatattagaaatgtacatatccaatgtgaaatactaaacaaacaaaaaaccggaatgcattgtatagaactgcatgtgaagtcttttctactgaatctatatttccatttgtaaatgattttaagttaacatatgaaggcagggaaatgattacctttccagtaagaatatagataatttaattaacttagtgacaccactgagtgttttgatataactaaatttgtggtaataagactgtctgcacctatattcattgtggaacttcctatttcattggaaactttcttactcaagaatgacggcagtattgttttcttatatgtgcaatgaagtggaatgataaacagtatgcctttaatttatatgtgttcttgttctgatgttatgttttctgaaatgatttttcttcctaactgtggttttcaggtatgcaagccgaaatctttgtacactttgtctcacagaatagttctgaggctccagtacagggttttgtcattgttgatgttattgttgcttctttttataaaaagccaaaattttttttccaatccaaacgtttacctgtttcctttcctcaagctataccagtgtaataccagttaccctgtggatccatttaatatgttatccccactaattaattttcgtatattatttccaatatttggaaaactctttataaccatttggtatttcctattacccacctcctattttaaatatttatcagtctaaacttgtcagtgtagtaaacatgcaagttgttatgattgggctgtattaccgtaagtagaattttaagtaaactggtgaatttggtcaataaatgtttttgcttttttttttttttttttttttctttttacaggctgttagaggtatacatttatttatctgttgtacagatttgattatgattttaatgtttgaaagattgcacttgtttgcttttactatgtgtcgggtaaaatatattttctgttcacagtatatgaaaatatggagtaatttaaacagtaaataaacattctgtggatgcttatttttgtattggcaaagtaaaaaaaaaaaaaaaaaaaaaaaaaaaaaaaaaaaa

SEQ ID NO: 6011 - DNA, 856 bp, Macaca Fascicularis
agttaaaaatacctcatttgccacaggccagtggtgtgctcacatttcccagctggagtgactccctggacctggggctgccctggtggaaaggtctattttaaatcaaatgggagtgaacctttggtcactgatggtgaaatccaagggtccgatgttattcttacaaatacaatttataaccagagcactgtgatttctactgcacatcccaaccagcacattccagcctggactacggatgcttctctcccaggggaccaaagtcacaggaatacaagtgcctgcatgaacatcacccacagccagtgtcagatgctgccctaccactccacaccaacacctctcctctcagttgtcagaaacatggaaatggagaagttcctcaagtttttcacgtatctccatcgcctcagttgctatcaacatatcatgctgtttggctgtagtctcgcctttcctgagtgcatcattgatggcgatgacagtcatggacttctgccctgtaggtccttctgtgaggctgccaaagaaggctgtgaatcagtcctggggatggtgaattactcctggccggatttcctcaaatgctcccagtttagaaaccatactgaaagcagcgacgtcagcagaatttgcttctcgcctcagcaggaaaatggaaagcaaccactttgaatatgttatcccacttccttttggactcctgagtttggatgagaagtcagatgttaacctttctgaagctccattttatctgatgagttgcttatctcctggggttttcaaaattttatgtgtctgatttttgatagatcaattacaatctgtctaagtgtaaaaaaaaaaaaaaaaa

SEQ ID NO: 6012 - DNA, 708 bp, Macaca Fascicularis
tgaactaagaatagagtttctttgagttaaggagaaaaaaatatatatttgggtccatttattaggttaaagttgaccctttcagtgtaaaaataaccacagtgtgtgagctaaagaaaaaaagtaaatttctcctttatattctaagaagctttaaaagaacaattcaggggatattgataactgctactctgtcagtcattgtctctatatgcagtaaaattttatggtccctttatagtaatataaagaattcaaacagtttttcaaaacatttttttccttggacataaaaaattttgatgctattctatttttgtttttattatagcttaactgtatgctgttaaactctaggatgtatctgaatctttcctcccccccccgcaaaatatataaatctgtgctctcacatataatgtatttaatttttggaaaatttaatgctatagtaaatcaagtgtgtgatttaaagtaatcagatcactttgattctttaagttttcagaatttcttttttccacaggtaattttggagaaaataattaccaattaactgataataagcacgctgtcctctgctgtaaaaagtctgaatagatactgtgtatgtttttatgtccatgaacttgagctactcgtgtgcaattatgtgtatgggaatggagtagtgttcatgatttgtatctacatcatcatatggatgta

SEQ ID NO: 6013 - DNA, 709 bp, Macaca Fascicularis
  misc_feature (1)...(709): n = A,T,C or G
ggaacttctgtcctgttcaccactgtatattcagcaccaggcaatctcttttattttttgtttgtttgnaaaaattaatacatatacatggtaagacattccacaatacaaaagggtatacaataaatggtaagcttccccatggaggtcagcctctagtcccctctccagagttaatcactgttatctatatgttgtgtatcctttcagagcaattctatgcatttacaagtttataaatatgtatatttatatatctatttttaatacaaatagtagaattctatacacagtgttctgaagcttgctttcttatatagtattttggagattattccaaattcatacattgggtcagagtaattctttaaaagttccttgcatataacagtgattcaaaaattatatggatgaatgagtgaatgcctgcatgaatgaatgaatctgattcaattggtagctactgctgttctcttggggtctgatctgatcaagacagcaccttttagattctagaatgtgttctgactaaggggttcaggatactattcaccttctccaacagatgccacaggagccttaggaactgggcacaggaagtcttgggcccctggagggaaaagttgagacccaggtcctacttaaaatgcttggttttaaggttcctacttaaaatgcttttttctttattggaaaatgatgtaacatt

SEQ ID NO: 6014 - DNA, 2393 bp, Macaca Fascicularis
agagagggtgatcacttactgtcactaggactacagtttgtagactctcagggagagagactacaaactgtagttaaaaaaatcagaggtggaggtcagggggttagagtcagaagaaaacctctctggagcccaccctgcatctctacatcttggaagagtctgcagttcaggcaccccacagaacccccatagcaatcatctgtagtcccacccccaccccggcctctgggaggctctcaggcaacagcaggggcctgtggggtggggtgggattgagaaacaagctgcagagccatctttgtgacccaggagcaccactggtccctcatctgccaccgaggccaaggaagacccagagacctgcctcaccagccctgccatcgtgctgaaagacagccatgaatggtgattctctgctgccgtattatacggcccagagtggctccagcatgagcatgttcaacaccaccatggggagactgcagcgacaactgtacaagggggagtatgatatattcaaatatgcaccgatatttgggagcgactttatccagatcaccaaaaggggagaagtgattgatgtgcacaaccgtgtccgtatggtgaccatgggcattgcacgaaccagccccatcctcccactcccagatgtcatgctgctggcacgaccagccaccggctgcgaagagtatgctggacacggccaggccaccaagagaaaaaaaacgcaaggcagccaagaacttagagctcaccaggctcctccccctgaagtttgtacggatctctgttcacaaccatgagaaacaacagctgcgcctgaagtttgccactggcagatcttgctatctgcagttgtgtcctgctctcaatacacgggatgacctctttgcttattgggaaaaactaatttacctcttgcggccacctatggagagtaacagcagtacctgtggcattccagctgaagacatgatgtggatgcctgtgttccaggaagacaggaggagcctagaagccgtggatcttcaaggaaagggggatcaggaccaggtcagcatccggagcctccacatggtctctgaggtatgtggggccacctctgctgcttatgctggaggggagggactccaacatgactttcacaaacccactaatgtgctcaatgtatccatccccaaaacatctacggagcttgctgaggagccagcaacaggggtgactaaagaggcagcagcagcaggggcagctgcaggggcagcaacaggcaccgtagcaggtgccttgagtgtggcagcagccaattctgcccctggacaagtgagcgtagccatagctggggtggccaccataggtgcaggaggaagcaaaagcaacatggccattgcaggcactgccagcatggctccaaacagcacaaaggtggccgtggcaggggctgcaggcaagtcctcagagcatgtttccagcacgtccatgagcctttcccgagagggcagcatgagcctggccattgcaggagtagaactgaccagcaggactgctgcagaaacagacatggatgcagcagcgggacttcctgtctccacccggcagagcaagagcagcctgagtggacagcatggaagggagcgaacccaggccagtgctgaagcttgcaaggaggggagggaaagaagggaaaaggacaaggctcttggaaggagttcccgtcgccgcaggacaggtgaaagccgccacaaaacaaggggggacaagattgcccgaaagtcttccagcaggtcctcattcagccacagagccagtagagatggcaaaaaggagaaaggctgtagcagcccagggagcagcaggcacggggaatcgcataaaggtgtcagccacacgcccatctcaaaggagtccaggacctctcacaaatctgggaggagtttatcgaccaccagctccggatccagcaagagacttggcaggatcagctctttcctgaggaacgtcagagccaaccttactacaaaagcagtgggcacaccacatggcagagatgtggacatcatggctaagacggtggagaggagcaccaacgtggccaacgccgagacagcagaaggtggccaggggctggagatggttggttctatgacaccggacatcatggagacaatgacttttgaaacccattaaataagacccagagatggaagctgtaaaggagcccagagctcatagaagtgtccctggagagcctattccagcattctttactgccatttaaataaagaaccatacatctgaaaaaaaaaaaaaaaaaaaaaaaaaaaaaaaaaaaaaaaaaaaaaaaaaaaaaaaaaaaaaaaaaaaaaaaaaaaaaaaaaaaaaaaaaaaaaaaa

SEQ ID NO: 6015 - DNA, 726 bp, Macaca Fascicularis
  misc_feature (1)...(726): n = A,T,C or G
cattggcatnnnntcaggtatttcaacataactataatgttctccttaagtcttttcatttctannngcaagttcttcagctattnnnnttacaatataattaacagtccttttgccaagcagggtctctattatttagtaaaaggtaggcaaatactggaagactattcacatttgaatttgacataaaaagcgaatgaaagccgttttacaattaaggcatcttagatgtcaggacaagaaaactgtaggaccagcattaagtagtcagttgagtgtgggaacataatccacagaagagtctagtgtgtataatannnnnnnnnnnnnnnnnnnnnnnnnnnnnnnnnnnnaattattccttttaagattccccttagaagaacacataacttagatgtcctgaggacagaatctggagcacatctgaacatttataannnnnnnnnnnnnnnnnnnntaaaatgttttcctatttaggagatttaattgtcaaatgaggcttttatcttttgatcctatcaactgatatcctgcagaaaacgttggatgatggatnnnnnnnnnnnnnnnnnnnnttctgtaattttacctttctttccttttcctctgtttctttacttgtaactgaaccctgaaatagaacttaatctgtcagctgcgctctacatttgttctttttgcaccaaaaacactattattgcagatgttcaaactatataaact

SEQ ID NO: 6016 - DNA, 762 bp, Macaca Fascicularis
  misc_feature (1)...(762): n = A,T,C or G
tttcccagagggcacnnnccgaccagtgcacgatgacatcctcannnnncagctgcggcctggccnnnnnnnnnnnnnnnnnnnnnactgtgtcaagggcattggcaaagatcatnnnnnnnnnnnnnnnnnnnnnnnnnnnnnnnnnnnnnnnnnnnnnnnnnnnnccctgcttgagcccgtggaaggggaggcagctgaggagttgagcaggtgcttctcacctggtgttattgaggtgcaggaagtccaaggtaaaaaggtggccagagttgccaacccccggctggataccttcagcagagaaatcttccggcatgagaagctaaagaaggttgtgaggcttgcccgggttcgagatcattatatctatggagttttgctctcgttnnnnnnnnnnnnnnnnnnnnnnnnnnnnnnnnnnnnnnnnnnnnnnnnnnnnnnnnnnnnnnnnnnnnnnnnnnnnnnnnnnnnnnnnnnnnnnnnnnnnnnnnaaccagcatcaagaaaagttgatagttgatactttagccactccccagnnnnnnnnnnnnnnnntttgggatccaaacgacatgccaacctcatcacctctccttgctgggctcgggaggctgccaagggaaaatgccaagggaaggacaggaatcaacaactggtataaaataggtacttaatgtttattaatttaccaccctaggggaaaagcattcaannnnnnnnnnnnnnnnnnnnnngcttgcagtaataatcaataaaact

SEQ ID NO: 6017 - DNA, 731 bp, Macaca Fascicularis
  misc_feature (1)...(731): n = A,T,C or G
ccttgtnnnnnnnnnnnnnnnnnnnnnnncatgcacctcccggaatcccctgaccaccccatagctggtctctttgcccaccagctttcaccctgttcctacagcttcaccccgacattctgggccccatctctagggacagcgggtctggtctcagctttttctggcttggttgctgcttgtggggggcctccacaggggtgtcaggccagatcacctaggcagggggtctcgtcttctgaagaagttgagggttcagctgnnnnnnnnnnnnnnnnngtagatgnnnnnnnnnnnnnnnnnnnnnnnnnnnnnnnnnnnnngggaggaaccagaacaaaaggaagtgtagttagcgatataagggtgtgtcgcatgagggatggaactgagaaacctggaaacaacagtgtgcttcctcaccccgctagcatttgcctagtgatctcctaccgggtccccagccnnnnnnnnnnnnnnnnnnnnnnnctgtacctcccactgccacccagcaaactccggcaactaatcagtgactgtgagcttgtgcaacctgannnnnnnnnnnnnnnnnnnnnnnnnnnnnnnnnnnncattaattcttcacctttaacggcccccgagtccctctagagtccagtccaacccgtgtgcccgacttccaggccccagagagcacagtctcatctgatctatccagctgctctcgctgctccctgacacctcccacc

SEQ ID NO: 6018 - DNA, 1870 bp, Macaca Fascicularis
aataagaatgccatcgatgtgcatgcttttatgtttttcaggaaagggtgtgtttggatgaaagtaaaaaaaaaataaaatctttcactatctctaatggctgtgctgtttaacattttttgatcctaaaattcaccaacagtctcctagtacataaaataggcttaatgactggccctgcattcttcacaatacttttccctaagcttcgagcaaagtttttaaaaatacactaaaataatcaaaaccgtgaagcagtatattagtttggttatatacattcatctgtaatttataagatgcatggccaatgttaatttgcttgacaattctgtaatcattaagtgatctcaatgaaacatgtcaaatgcctgaaattaaccaagttggtgaataaaagtgccaatctggctaactcttagaccatacatactgatagtttttcatatgtttcatttccatgtgatttctaaaatttagagtggcgacaattttccttgctatgggttgcataagctttattttttcctttgtttataattacagtctttgaataggtctgtgtcaatcaagtgatctaactagactgaccatagatgaaggaaataaggtcaagttcaaaaccagcctgggcaacatagcgagaacctgtctacaaaaaaatgaaaaaaattagccaggcatgatggcagtgcaactgtcgtcccagctacttgggagggtgaggtgggaggatcgcttcagcccaggaggttgagattgcagtgagccaggtcataccactgcactacagcctgggtaacagcacgagaccccatctcttaaaaaggaaatatagaaatataaaatttgcttattatagacacacagtaactctcagatgtataccacaacaaatgtgaaaaaaatgtctatcaaagcagttttttgtgtgtataattgcaagtgcatagtaaaataatttttaaccttaatttggttttagtagtatttagattgaagattgagtaaaatattttcttggcagatactccatatctggtggaaagctacaatgtccttgtagttttgcacagcttgctttataaacaagatttttttcccctccttatgtgccagttttcattacgagtaactcatactttttgattaaagaacttgaaattacattatcgcttagtataattgacattatgtagagactatgtaacatccaatcattagaatgaaaattagtactttggtcaaactaatatttagaacattcacatatttatcaaatattcatgtaattaactgaatttgaaacctttaattcaactattatggagtgcttgtacgatcactaatttactcagtttagagtagctacaacttttcaatacttatcaatatttgacatctttcccaatttgtgtatgaaaagtaaatctattcctgtagtgactggggagtcatacatgaggtcaaagacatataccttgttattataatacgtatactataataatacctggttatcctgagcagaaaaaagttatttttaagaaagtcacttcaaatagaaagctgaagtacttataatgtactgagggaacgctaatatgtggaacaaacttttaataaaatgtttattgatgttgaaacagatcagttttttcatccggattattattggttcatgattttatatgtgaatatataagatatgttctgcaattttataaacgttcatgtcttttttaaaaaaaggtgctattgatattctgtgtctccagcaggcaagaatacttgactaactctttttgtctctttatggtattttcagaataaattctgacttatgttactgggaaaaaaaaaaaaaaaa

SEQ ID NO: 6019 - DNA, 633 bp, Macaca Fascicularis
  misc_feature (1)...(633): n = A,T,C or G
gctgggcatcgtgcccgaggccaacgatggggacccggccaccctgctgcctatggtgcannnagagcatgctcnnccgcatgnnnnnnnnnntgctctcccgctccacggaaggtcagctgtcatgcccagcagctgggccctcgttgtgatgggactgctggggaccatgattcttctgtctgaggtcgcataacgccccatggctcaaggccaacgcgtgctgtttgctcttcctggaagcctccgggagctgcccgtaggccccgggccgcctgtctcgatgtgatgctctgctggtggcggacggtccctgcctccccagcttatcccaggccagaggctgcatgccactgtccccggcagcaccagcccctgcttggctgttatggnnnnnnnnnnnnnnncggcagcccaggtccagggcctccggcgcgcaggtcccataaccggcccccagcccctgcccctcccactcgggcccctcctcctgcaaaccccgctccagaagcggcgctgccgtctgcggccacgcgggggcgcgcgggagctctgcgggcgcggggacctgcagacccggcctcggtcacctgggaggggcccgccccggcacaaagcacctgtgggaataaa

SEQ ID NO: 6020 - DNA, 1805 bp, Macaca Fascicularis
  misc_feature (1)...(1805): n = A,T,C or G
tttgaaataaacaagttctgggagctacttgtggtacttggacaccctgttgtaattatttcttccttctctctgcttttttcggggggtaccacgtaaggtcacattggaattgctgttcctgatgtacacagtgcttgtaaaaggttcgaagaactgggagtcaaatttgtgaagaaacctgatgatggtgagtctactattactgtgttcaggcctgtctttagttaatagttactaagcaccaagagacgccactgttgtagtaaaacccttttggctacaagtaacagaagtctccatttcaaccagatttttaaaaaagagaaatgactggaagaatatccgggtatctcagggaactgaaagacagcaactagggtggctttccaagggactagacacaggacctggagagccatcaaaaccctaggctccctctcccgctccccgaccccacccctttctgtcattggccaccagctttcactatcagtgtgtatctttccacccaaaaataagttccttaaagtcaattttatctgatgttcatataacgacaccagctctctttagttcataatcacatggtgtttctttttcaccttttacaacctttgtatgtccttatgttttaggtaggttttttgaaatagcatatgtatggattttgctgggtttacatgtattgttattattttactttgatctctttctgaaatatttcaaattaaaattgaaatactgaatatttcagagtctcaatctaaacatttgaaatatttcactgtttaatttcaccttttttaaaaaaatttaaatatttaatagccagtgctgggtgagannnnnnnnnnnnnnnnnnnnnnnnnnnnnnnnnnnnnnnnnnnnnnnnnnnnnnnnnnnnnnnnnnnnnnnnnnnnnnnnnnnnnnnnnnnnnnnnnnnnnnnnnnnnnnnnnnnnnnnnnnnnnnnnnnnnnnnnnnnnnnnnnnnnnnnnnnnnnnnnnnnnnnnnnnnnnnnnnnnnnnnnnnnnnnnnnnnnnnnnnnnnnnnnnnnnnnnnnnnnnnnnnnnnnnnnnnnnnnnnnnnnnnnnnnnnnnnnnnnnnnnnatcaaaaatatatatatatttaatatccaaatcttgtccccaataggaaaggaatttgcttcactccatcctcattgtgtcactattacctagagtgggatagtattgattttattttttaaagataataatacatatatcaaggtgtttgatcactttttcatttatctcttgtagtgtctcctttgagacaggatctcactctcatccaggctggggtgctgcagtggcactgtcatagctcactgcagccttgaaactcctgggctcagacaattctctgcctcagcctcctcctaagtagctagggccacaggcccatgccaccacacccagctaattgatttttttttttttttgtagagatgagttcctgctatgttgcccaggcttgtctcaaactcctgagctcatgcctgtaatcccagcgctttgggaggccaaggtgggcggatcacgaggtcagnnnnnnnnnnnnnnnnnnnnnnnnnnnnnnnnnnnnnnnnnnnnnnnnnnnnnnnnnnnnnnnnnnnnnnnnnnnnnnnnnnnnnnnnnnnnnnnnnnnnnnnnnnnnnnnnnnnnnnnnnnnnnnnnnnnnnnnnnnnnnnnnnnnnnnnnnnnnnnnnnnnnnnnnnnnnnnnnnnnnnnnnnnnnnnnnnnnnnnnnnnnnnnnnnccaaaaaaaaaaaaaaaaa

SEQ ID NO: 6021 - DNA, 708 bp, Macaca Fascicularis
  misc_feature (1)...(708): n = A,T,C or G
ctgtgagctgggtggcagggatgcggctcagctcgctgaagaagctggctttcctgaggtggnnncgcatggtcagggangccatggagagacaaggagcccagagaaccggtctcctactccctccctccagtactgcgagacctgtgacacccacttccaagattccaaccaccgcacatccactgctcacctgctgtcactgtcccagggtcctcagccttccagccttccacttggggtgcccatctccagcccgggcttcaaactcctactgagggggggctgggagccaggaatgggactgggaccccggggtgagggccgtgccaaccccatccccactgtcctcaagagggaccaggagggactaggctacagatcagcaccccagccccgagtaacacattttccagcttgggatacccgagctgtggctgggagggagagagcccctcaggtggccatgctgagccggaagaaggagagaaggagggaggagaaagacagggcttgggagcgggatctaaggacttacatgaaccttgagttctgactttggtaaaatctgacccnnnnnnnnnnnnnnngtctgaacttgggcctctgacctgggccctttgacttccccttcctgggatctgcccaggtgcagatcctcagtttttggtcagtggactctgtctttgtaagagacgggctgagagt

SEQ ID NO: 6022 - DNA, 2648 bp, Macaca Fascicularis
ggaaaacaagcattgttttgcaccaggatgtctgtgaaatggacttcagtaattctgctaatacaactgagcttttactttagctctgggagttgtggaaaggtgctggtgtgggcagcagaatatagccattggatgaatatgaagacaatcctggaagagcttgtccagagaggtcatgaggtgactgtactggcatcttcagcttccattctttttgatcccaacaactcatccgctcttaaaattgaagtttttcctacatctttaactaaaactgagtttgagaatatcttcatgcaagagattaagagatggatagaacttccaaaagatacattttggttatatttttcacaaatgcaagaaatcatgtggaagtttggtgacataattagaaatttctgtaaagatgtagtttcaaataagaaattaatgaagaaactacaagagtcaagatttgacgtcgtttttgcagatcctatttttccctgtagtgagctgctggctgagctatttaacataccccttgtgtacagtctccgcttcactcctggctacatttttgaaaagcattgtggaggatttcttttccctccctcctacgtacctgttgttatgtcagaattaagtgatcaaatgactttcatggagagggtaaaaaatatgatctatatgctttattttgacttttgtttccaaatatatgacatgaagaagtgggatcagttttatagtgaagttctaggaagacccactacattatctgagacaatggggaaagctgacatatggcttattcgaaactcctggaattttcagtttccacatccactcttaccaaatgttgattttgttggaggactccactgcaaacctgccaaacccctacctaaggaaatggaagagtttgtacagagctctggagaaaatggtgttgtggtgttttctctggggtcaatggtcactaacatgaaagaagaaagggccaacgtaattgcatcagcccttgcccagatcccacaaaaggttctgtggagatttgatggaaaaaaaccagataccttaggtctcaatactcggctctataagtggataccccagaatgaccttctaggtcatccaaaaaccagagcttttataactcacggtggagccaatggcatctacgaggcaatctaccatggggtccctatggtgggcattccattgtttgccgatcaacctgataacattgctcacatgaaaaccaaaggagcagctgttagattggacttcgacacaatgtcgagtacagacttggtgaatgcactgaagacagtaattaatgatcctttatataaagagaatgttatgaaattatcaagaattcaacatgatcaaccagtgaagcccctggatcgagcagtcttctggattgaatttgtcatgcgccacaaaggagctaaacaccttcggcctgcagcccatgacctcacctggttccagtatcactctttggatgtgattgggttcctgctggcctgtgtggcaactgtgatatttatcatcatgaaatgttgtctgttttgtttctggaagtttgctagaaaaggaaagaagggaaaaagtgattagttatatctgagatttgaagctggaaaacctgatagatgagactacttcagtttattccaggaagaaaggttatgatgcaagatttctttcttcctgtgaccaaaaaataaaaatataaataaaaataaaaatatttttaaaatttaaaaaaaaaaacggcacgaggaacaaaggaacactgcctcatggggatcaaaggaactgtgaagcgtagcacagatggggacttcattcatgctaatgttgacattgacttaattatcacagaagaacctgaaattggcaatatagaaaaacctgtagaaatttttcatataattgagcatttttgtcttggtagaagacgccttcatctatttggaagagatagtacaattcgaccaggctggctcacagttggaccaacacttacaaatagcaactacaatgcggaaacatatgcatcctatttcagtgctcctaattcctacttgactggttgtacagaagaaattgagagacttcgaccaaaatcacctcctcccaaatctaaatctgaccgaggaggtggagctcccagaggtggaggaagaggtggaacttctgctggccgtggacgagaaagaaatcgatctaacttccgaggagaaagaggtggctttagagggggccgtggaggagcacacagaggtggctttccaccccgataattgttgaagacattgaacctattcatcctcctctaaccttctttactgtaattaaatttcaagtgggagacttaactttagaactcacctccagcttgcactttgctttaatttctctgagctccaggaatgtcttagccagcctcgcttgcggttgtcacacacactctcattttatttcaggatgaatgaataatcctgccttttgttatgtgcatgaacagaatggaacaattcaagtagcttcatcttcagagactgaatttattctgatagacttcaattaattacaaaggattttgctaattttggggaataaataatgaaaaaaaaaaaaaaaaa

SEQ ID NO: 6023 - DNA, 534 bp, Macaca Fascicularis
ttaaaacataaaccagttgtgtttagagaaccttaagtcaggcagacatgactgttttctttgtacaagtgtgaatcaaaatatgtatttgtttttcagagtttggttaagttatgtcattgtttactgcatagtttcctgagtttatttgtaaagtgtttatggctaacagttcagttctgtatttgttgacaggtaaataagtggagttgagtgccatttttgaaaaatttaccctctagctttaacactgaaaataataataaattgtagatttttgcaactaagtttaaagcagtgtgactgtgttgcttaaatattactgtttataaccaccaaaaaagtcctagtagttttttggcaccttatgtttaaaccagatttttagatttagggtagacctgaccttgttatttattagataacattttgaatgtatccattggatttctaaaatgtattgtgaatttctcagacaaacaggatttatgctggagctctgttttgcttagaaataaaatatttagtggttta

SEQ ID NO: 6024 - DNA, 668 bp, Macaca Fascicularis
tcaaagctacgaaccacagtcaaatccttctcatgctaccagctggagaaagctctctgcttttaaaaggctcatgtgaccaggttaggcccagcaggataatctattttaaagtcaactgatgagtaaccttaactacatctacaaaatttattttgccacgtaacctagcataattatgtaagtaatactagaaacggaagggtccatggaatcatcttacaattcttcctaccacaatagttgactatgagtattgacatatacttgtataatgtattttatcaggccacaaaaacctgaaggttaacacagaatgtttatatagttctgtctctacctactttgtgaaaactatgatcttctcaaattcctcctacctctgagattccttagggagaattttatttgtgcctccaaaagtacccttaagtgcctttttcttgcctttctttttcagatgtttcattgccaaattgccatttcttggcagtcaagaaaaatgtactgagctgggcatgatcctacttgtaataaacaaagcagtgttccttttctgcaaggagcttacattctcaagtgacacatacatatatataagataatgcaaatactgataaaaattatgaagatcaacaagatactaaattagcaaaccaaatcagcaa

SEQ ID NO: 6025 - DNA, 1387 bp, Macaca Fascicularis
actcgcaaatgcagggaaggggtgagacctttcaaagctgccaagtgggcaagcttccagcagcagtctgggagcgagaggcagagccaccaagctgggtggcagggcattgagcctcgcgtttcaatttctgttcagtcctcctgtaatggaaaattgctctgcacaaagctaaagtgttacagttctttccagcacccctcccccgccccaccctccaccggcagccttcggatcagagggacagagcccgcaggaaggtggaaggagggtggttgtggcttcttactatgtcccttgcttcaggccctggccccgggtggttactcttttcctttggaatggggctggtatcagggtcaaagtgtccaaataattgtctgtgtcaagcccaagaagtaaactgcacagcgaagcagttaaccgaatacccccttgacatacccctgaacacccggaggctgttcgtgaacgagaacagaatcactagtttgccagcaatgcatctaggactcctcagtgaccttgtttatttggactgtcagaaaaactggattcgagagctgatggattataccttcatcggggtcttcaaactcatctaccttgacctcagctccaacaacctaacctcgatctccccactcactttctcggtcctcagcaacctggtgcacctgaacattgccaacaaccctcacctgttatcgcttcacaagttcacctttgccaacaccacctctttgaggtacctggacctcagaaataccggcttgcagaccctggacagtgctgccttacaccacctccctgttctggagaccctgtttctgagtggaaacccctggaagtgcaactgctctttcctggacttcgccatcttcttaatagtgtcccatatggacccctcagatgatctaaatgccacatgtgtggagcccacagagctgacagggtggcccatcacccgggtggggaacccactccggtacatgtgcatcacgcacctggaccacaaggactacttcttcctgctgctcatcggcttcggcatcttcgccgcaggaactgtggctgcctggctcacaggtgtatgtgctgtgctctaccagaacatccgccgcaagtcaagcgaagaggacgaggacgaggccgggactaggttggaagtcagcaggcggattttccaacccagacgagctcggtccaggagttccctcagcttatttagttgccagagaccactatcctatgtgcctcccccaggctccctgctttctctcttgccctccccatcccaccaccttggagctgtcatagagattgaaacctactagtaaaataaataaaatctctgctagccaaaaaaaaaaaaaaaaaaaaaaaa

SEQ ID NO: 6026 - DNA, 752 bp, Macaca Fascicularis
  misc_feature (1)...(752): n = A,T,C or G
gacagcaggaagaatgtgcttggtcacatgcagcagggtggagcccaaccccatttgataggaannnnnnnnnnnnnnnnttccaaggagtaacaactgtatgtctgtaccaatcaaagagagtgatgcacatgtcctaaatctaacctatactccagactcgggctgtgttctggggatgcgtaagaggattagggtactaaaagattatatcatcatctacctcattcctcattttgagcatcgaatccccaaggaacagtggtggctgaaactgaggcccatcctcaaaatcctagccnnnnnnnnnnnnnnnttggacacttcagaccatgcccacctggagcacatcacccggaagcggtctggggaaggggctgtttaaacctctctggagtgaggggaacagattatctgnnnnnnnnnnnnnnnnnnnnnnnnnagtacacatcttctcagtgttttagctgtttttttcattaggtttccttttattctgtaccttgcagccatgatcagtcctggccaggagctggagggggcagtgggtgggagctccttttaggtagaatttaacatgacttctgccccagctttatctgttacacaaggctgggcacctctagtgctactgctagatatcacttgctcagttagaattttcctaaaaataagctttatttatttctttgtgataacaaagagtcttggttcctctactacttttactacagtgacaaactgtaactaca

SEQ ID NO: 6027 - DNA, 1879 bp, Macaca Fascicularis
  misc_feature (1)...(1879): n = A,T,C or G
aaaattcatcagtaagttgtttatgtcagttggagaagtacactcaacaacatagtagaataatttattcattgttaaccaacacgtacacaacacttaaactaaggcagatactattttgaatggcttacagatattattatatttaatccacgtgacagtcgtatgatttaagtggtatgatcacactctttttagagataaggaaacctgggcatggttaagtcttgggcccaggatcacacagctggtaacggcagaacctgtatgtgaacctgagaggtctggtttcagaatgcacgttcaacccgctatgctacgctgcttctgagtaatacgaggcaatgatttgtaaatcacagtgataacctattttattcctttgtatcatcctgctctactcacctcttttaggttcattaaaggatttagttgaatgccaaatgtgtggactgaggagaactggctttgagttctgacgttggctgtgtggctttggaagagtctcttctctgagttgctttcttcattcaatgggtgtgacaatatcaatcctgccgatttcacaaaagtcaaaatgttttgccctctagaaattcgttaggtatcattcgaaaaagccagtggctctccagggatgaggatgcttaacgaggtcttgctgtctacctgtgtttccagcttccccattctctgcagcagctctagaggccactcctttagacctgggtctgccttgaggtgttgttacataatatttatgataaaataaaaaaccacatgtgtgatggtatcatgacatgaacatgagccttgctgacattaaaatagagcaggtggtctccattcctaggtgaagaataacangatcacccaagtgtttttaaaatgtgtgacttttcggagagggtacctttgagtggctcttccactgaccccagaacttccaaagcatcaggcttaggtcgaataggattcatctgagcttctggttctgatcttgtaaaagctaactcatgcatgcacaacatgataggccatgtcacgcctcacagcctttttctgcgctatccttttatacattttttataaggcagaatgcattcaaagcattctgcctcaaaaggcattttgctctaatggctgtgtggaaatgtttattctctgcttctatgtttttaaaaacaaaagggtaatcagaagcatttaattgtcttagatgctcaacaaatagtaattaaaagctatttttttttttttttagttttgcagaagtataagcatgtctgtgaattgaataaggccctgtgtcaagcctgatttgcacagcgaaggtgatatattttagtagtgccaactgagggctcattgcccagttgcatgataagcaaaccccatttgaatgggtgttgattcttcatcctggttctctgtagtccgaactcaaggctcagcgtactgttttcagtaggtcgcctccacttgatctttgttttcctcttaagtggcatgctgaaaaaccatattcatacgaatgtgagagagatggggagtctctccatgttgcccaggctggtcttgaactcctggcctcaagtgatcctcaggcctcagcctcccaaagtgctttgggagtgtgagctcaaagtgtgagcccccatgcaccttgcccccagaactttgagtaacaatactcaaaaatatgtcacttctgtgaaaagattagtatgttctggccgggcatgnnnnnnnnnnnnnnnnnnnnnnnnnnnnnnnnnnnnnnnnnnnnnnnnnnnnnnnnnnnnnnnnnnnnnnnnnnnnnnnnnnnnnnnnnnnnnnnnnnnnnnnnnnnnnnnnnnnnnnnnaaaaaaaggccaca

SEQ ID NO: 6028 - DNA, 736 bp, Macaca Fascicularis
  misc_feature (1)...(736): n = A,T,C or G
gcttcagtgctgatagntnnntagcaactcctattcttatgcccttacttgaaaatagtccttttattttgtgtatttaatttcctaagtttcagatttaatatctgttgtttcctaatatgttgattgccagaacgttagaattttacctaatttcttgtggatatttcagaagttctggttaaatcacaacttaaaagtttttaaaaagcgctttgagcatatgtatgtttatgttcagtgacaaatcatagaaaaccattcacaagttttggtttaattttttttcatttgttttagtgactgtaattcaggatgaaagtttttttgttcttgtacttaacccttttttataagcagctgaagacaccatatttaacactattatctcagtgacaggnnnnnngctgcattgatcttacgtgagcatattaatccttatagttcatgaggggattattagtacaatccccattttactgtgtttgagttaaaaaccaaacatccctgtaatttaatttgaagattctttaannnnnnnnnnnnnnnttnnnnnnnnnnnnnnnnnnnnnnnnnnnnnnnnnngataaaatacactgagagagaattggtccatttgtatgctgtatttctattacttgccaaaagggatggggttaagattaaacttgtttccattctcttcatgtggatatacatccnnnntgtttaactgacacactgggggctcagttgt

SEQ ID NO: 6029 - DNA, 1223 bp, Macaca Fascicularis
gcaaaacagtagcttcactcagacaccgtaaccatcatctcatcctggatgcaacttttgtggttaacacagggagaaaagaagtatcactcttttcactgcacgaatgtgaaaacacacaataaagagaagggagaaagaaacggcttacaaaatatacagatcttggtagacaacgtggctgcaggctgttgaattggaattccctgtggctgtctgagggcagggtgtctggagagcggtcggctgacctgttcctacaccttgcatcatgccagctttgtcaacaggatctgggagtgacaccggtctgtatgagctgttggctgctctgccagcccagctgcagccacatgtggatagccaggaagacctgaccttcctctgggatatgtttggtgaaaaaagcctgcattcattggcaaagcatttccaggaaaggagactggctctgagacgaccagaaatattggttcagcccctgaaagtttccaacaggaaatcatctggttttagaagaagttttcgtcttagtagaaaagataagaaaacaaataaatccatgtatgaatgcaagaagagtgatcagtacgacaccgctgacgtgcccacgtacgaagaagtgacaccgtatcggcgacaaactaatgagaaatacagactcgttgtcttggttggtcctgtgggagtagggctgaatgaactgaaacgaaagctgctgatcagtgacacccagcactatggcgtgacagtgccccatactaccagagcaagaagaagccaggagagtgatggtgttgaatacattttcatttccaagcatttgtttgagacagatgtacaaaataacaagtttattgaatatggagaatataaaaacaactactacggcacaagcatagactcagttcggtctgtccttgctaaaaacaaagtttgtttgttggatgttcagcctcatacagtgaagcatttaaggacactagaatttaagccctatgtgatatttataaagcctccatcaatagagcgtttgagagaaacaagaaaaaatgcaaagattatttcaagcagagatgaccaaggtgctgcaaagcccttcacagaagaagattttcaagaaatgattaaatctgcacagataatggaaagtcaatatggtcatctttttgacaaaattataataaatgatgacctcaccgtggcaaaaaaaaaaaaaaaaa

SEQ ID NO: 6030 - DNA, 665 bp, Macaca Fascicularis
  misc_feature (1)...(665): n = A,T,C or G
aggggagaggagggagggtnatnngggccacatagaaccatgaacctggtctaactcatcagcactcttcccctatatatcctccatctctttctatgtcccttctcctttcccatcatccgtgtccttttttgccccatcccttttattattccttttttctttctttcttcctcccttccaccttttgcctctcattcatttccttttccatcttctccaactttcttctctcttttcctcccctcccccttttactccctcctcagacnnnnnnnnnnnnnnnnnnnnnnnnnnnnnnnnnnnnnnnattctggaaggtgtcccggccactggagctgtgctatgctcccaccaaggatccaaagtgaccccaccaggggacagccagaggaaggggaccatggggtatccctgtgtcctggtccatcaccccagcttctttgtcccccagtatccccagcccagcccgccaacaagaggacacaaatgaggacacgtggcttttatacaaagtatctatatgagattcttctatattgtacagagtggggcaaaacacgcccccatctgctgccttttctattgccctgcaacttcccatctatacaacgtgtggagaaggtgaagaaccctccccttcacgccctcctaccaacaacaaa

SEQ ID NO: 6031 - DNA, 1369 bp, Macaca Fascicularis
agagattacagaattttctcagtagcatttcagtgggttcctgatggtctagtcttatatctcatgtcccctgaaactttgacccaggagcctttctaacacaccaatttgcccatgtctcactcatatggaaggagatatgtaaaattggtgaaggtattgacttaccaaggtcgcaattactggcggaattgtttgagctcatgtgttggacactcaaaaaaaaaaaaagtaattttctactgccagatcaagttttcagggtagcatcattatttgggaagacagggatattcaattatataatttgagggcctctttctggaaaacaaatataatcaatccatcagtaggaagacaaagaacacgtcatgccgtaattaaaacagtttcccccaattgtgttcaatatacattatccccataggtaatttgaggctaagaagtgcttctagttacttgttaacactttgctcaggccttctctgtgtattttacgcataaagggcttaactcttaaataatgaacgcttaaactctcaattgtaaacaagatcatggagggcatttttctttgagtgggcagacattttcttccttttattattttctgtactccacttttaagctgtgtagctctttcttttgtaatggttatcgacaacacccttttattttgtataccatcgcttctgagccattttggcacctggttctgctaaagttaactggagactgctgctttccactgcagagactgctgggtttttgttctcttgagtacacattccaaggcgaagagttggttagcacagcttagttaggagtaattgacagatattctgggaaatttcctcaaactcaagaacattctgggcaaataccacacaatttcaacgtgtttcagtgtaatgccatttgtgtttacaaggaaagattatcattttatatctctaatttctgatttaactttaatcatacggctcttcccctctgaacaagtaggttcagtcacatggtatgaattattcaacattatgtttactgttgagaagatatttgagagctaagtttgcagaggcaaagggctacttgaatttcaaggctgtcttttattaccaagctgagaatcttaacagtattgtgatgtctattcacatctgttgggaaagggggatttaatccaaaaatcaggaaaggaggtatcaaagtaatgccatctggctgggaccctaacatctgtatttggatggtagttatgcccttatcctactctccaatatctttaacccaaagatattcatggtaagttaaaatctgcgctaaatatacttgttggcatgcaagttaaaaaaaaaaaaaaaaaaaa

SEQ ID NO: 6032 - DNA, 593 bp, Macaca Fascicularis
  misc_feature (1)...(593): n = A,T,C or G
ctggccaagaaagaagccaacgctgtgcgcccctgcattgggagtgtttgtcctcgggaagagaaacggccggaagagaggcccctgcaggctaggagccttcctcccccgccccaccttccccagccgcattctgccaaactcccgcgccagccagccactctccgcacgggtgtcagagcctcggtccctgttttggaaaacgcctcagtaagcaagactgcagagtccctgccccnnnnnnnnnnnnnnnnnnnagggagaggcacgacttagaagccaccaagcggccccatctcttggaagagccccagnnnnnnnnnnnnnnnnnnnnnngagcaggccgaggagtctgcacacccgttccaggctgtattccggnnnnnnnnnnnnnnngtataagggacgagtacagtaatacctatagcagacgtgtttgtaattgcaaaaccnnnnnnnnnnnnnnnnnnnnnnnnnnnnaaannnnnnnnnnnnnnnnnnnnnnnnnnnnnnnnnnnnnnnnnnnnnnnnnnnnntgaatctcaaaacacaaggctggggaaaatgcaaattgcagaatgcctttgtnnaac

SEQ ID NO: 6033 - DNA, 743 bp, Macaca Fascicularis
  misc_feature (1)...(743): n = A,T,C or G
atnnnnnnnnnncanntctcccgatgaccccataaggtacctctcacnnnnnnnnnnnnnnnnnnnnnnnnngtcctgcatcaaaaactacccagtggtgtctgtcaaagatccctttgaccagnnnnnnnnnnnnnnnnnnnnnnnnnnnnnnnncagtgcaggaatccaggtagtgagggatggtctcacagtgaccagcccaaagaggacggccaaggcggtgaatgagnnnnnnnnnnnnnnnctcnnnnnnnnnnnnnnnnnnnnnnnnnnnntgactgagtccctccgggtgtgcaagctggcccaggccagtggttggggtgtcatggtgtctcatcgttctggggagactcaaaatactttcattgctgacctggtggtggggctgtgccctggcagctcaagactggtgcccctnnnnnnnnnnnnnnnnnnnnnnngtacaaccagctcctcagnnnnnnnnnnnnnnnnnnnnnnnnnnnnnnnnnngctggcaggaacttcagaaaccccccggccaactaagctgtgggcaggcaagcccttcagtcacctggtggctaattagaccctcccctcgtgtcagctcgggcagccgaaggcccctgaccaacgtttgtagggnnnnnnnnnnnnnnnnncccctcgcccaccgccgtggagtttgcaccgcttctttagaactnnnnnnnnnnnnnnnnnnnnnnnnncgagatcatgccactgcactccag

SEQ ID NO: 6034 - DNA, 758 bp, Macaca Fascicularis
  misc_feature (1)...(758): n = A,T,C or G
ggcgcccacagcagcagcaccaggcggcgcaggcggtggcaacgcaggtnccctggccgcccagtggaaccagttactgagagcagagcagtggcgcctcactccaccctgcttgctgcgccggctgcttgaaatgcgggttttattatcaggtgtagtgaggcccataaatcaggggatgttgcccttgagaagatggtttgttacagttcccaagagcaggggcagcaccacacggcgcgggtcggggacacacgggagagcgctggagtctgctggagtcagggggaggagagggaaacgtgagcaagagcctttattggggtttctgtgggaagaaacagtcaaggcagggtgagcaggctttggactggctggtttgagtaatttcagggctctgggacagaggagctgtccggagttgtctggtacctggccctggtatgatcagggcagggaaatattggccctgagtgtgagagacagaggaggtggtgggctgtgggctctgnnnnnnnnnnnnnnnnnnnagaaggaatctctagtcctgggaggggcagcctttctatggtcagctaggccccaggacatcaaagcatcagacacagaaaataaaaatgttgctgtgggtagcagtaattcattttttattaccacccaccattgcagtataaggagatagcatatgcgggttatctattattccttttgttgttgttgttgttgttggacattggagttacctccagctttggctt

SEQ ID NO: 6035 - DNA, 735 bp, Macaca Fascicularis
  misc_feature (1)...(735): n = A,T,C or G
taaataatgacgcgtcaaacaatgtcacanccnnnnnnntagttttatcaattnctagcagtaatantagacttgctgtaagttttgttttctgatgtcatacccttgtcatannnattattaaatgaccaatacgatgtatgaagtagacaaaaatttactcaaacttcagtcacatcctaattgtgataatttttgtttaatatttaattctaaaccaaaatacatttgcatttttaaactaatttgtctcaaaattttgctttatgttttcagatnnnnnnnnnnnnnnnnnnnnnccctgaatgttattgtccctcttgattggtttttacttctgagcgatatgtcaaaagacacataagcttcaaaagtcaatacaaatctcatttgccataaaaatcaagatatagatgtctgttccgtaaactccttgaaaaacattttaaagtcatcaatatgatctgcttcnnnnnnnnnntaagttagctttcttattggagttgttttatttcttttctgtaagtctgaaaagtagagattttgttttatgcattttagtaacctgcaacaaccaactctaaaaaagatttggcttgtaatgatggtctctgttttttggggtttggagtacataattgtaatatttacttagttttttgcgtttttctttgttcaaggtattgactggtttcataaattttttgaaagtttttctttcattggttggaaagc

SEQ ID NO: 6036 - DNA, 350 bp, Macaca Fascicularis
ggatccctttgaagactatagggcctaaggaaataccctacgataactaaagagacagaagctttctgtgacacttctttgtgttctgtgaaatcatctcacagaattacagcttttccctcaagaagcttttcgctaagacagttcttgtggaactggcaaagtgatatttggaagcccatagagggctatggtgaaaaaggacatatcctcagatgaaatctggatagaagctttctgagaacctgcttagtgttctgttaattcatctcacagagttacatctgtatttcgtggatctctttgctagccatatttctgtggaatctgagaacagatatttcggatcc

SEQ ID NO: 6037 - DNA, 743 bp, Macaca Fascicularis
  misc_feature (1)...(743): n = A,T,C or G
caggataaacatgcttgtctccattannnnnnnnnnnnnnnnnnnnaatgaaaaatccatccactctgctgccattcacagcctaattttctggagtagtccaaataatgtttggaaaaacgtggggttgtatgtcattactatgactgatagcagaataataatgcatcttacttctatatagagatagacttacataggttacccttgaaattcgttagtttgacgtgaagttttaggaaaggtagaacccagaaagaagttctaattagttgtctaaatatttttcagtgagccaagaaattcaccatgacaaacctataataacaaatagaagggaagagataggacgggaaagctaacaaaattttggcaaagaggaatatatgtaaatagctaattatttacttttgtgcttactttatttagattatttctatcagttacaatccttttatagttaagtgtacctaatttatggaatgggtgctatcctgtttatgtgtgtcttggtttttcttgtggctacagaaaaactgttgcaggacaacactagtttgatatttgatttactctccaatgagactcgatggctgggccgtggtagactcatagttcctcttgttctttattaaattcatcctgctaattagatttctagtgacttgtaacatgtagtttacactgaattgcgaattacagatgcatacaactactatactagaaaaaattgtcatttctgg

SEQ ID NO: 6038 - DNA, 550 bp, Macaca Fascicularis
taggggcatactggcttcccagccaacagcgaggatgctggggtaaggaagatgatcaataatatgttgttcatctcttttcttttgttgttgagagaaggtagtgctgtgtcatctaggatggagggcagtggtgggatggatcatggctcattgcaacatcttcctcccaggctggatcatcccatgtaagcatcccaagtagttgggagtacatgcacaagacaatgtgccccacctaatttttttattttgtagataataagaaggtcagggggggtcgtgaagtcctgaggtcaagagatcttcccgcctcggcatgccaaagagttgagatttacaggagtgagccaccacaccaggccagaggtatattttcaaagaatgctggccccaggcacactcctcatcaattatcaggaggcagggacagaaactttccaacaggggtcagtagggtcaagccgacccagagtggacatgggatgctccaggaggtctagggtaccagtgtgctcagatgaagctcttgtgctcgtgtatgttatga

SEQ ID NO: 6039 - DNA, 709 bp, Macaca Fascicularis
  misc_feature (1)...(709): n = A,T,C or G
agcacacggccgggnnntgccagnnnacgtattagcccttcccagggagggggccgtgccaagcatcccagagccgggctggggccgccaaaacgtcttggcctgggtcctctgggtctgagtgcctgatcccctggcaccccaaaaaagcggaggtgggtgtcgcaggcccggggcaggggtgcctgctccaggagggtcccaggcggtggttcccgtgccagtggcacccaggggcagggacagctgaccccaacccttgccaagtgtggggtgtgtgtttttaccttggtgaatctcacctgccaacgctttctcgtgagtgccgaccaccttctccgaccatgtcacgcccaggcggcagcagcccccggccaccgcaagacccacaccctgggtctcccggcttccacagaggggcatccccgtgccaatgtccccagtggtggcagcggatcctgcggctggcctggtggacgggacccggtgatacttgtatattacacagtcctgatttcagacaatttcaaccttaatctatttaaaaaaaatattctatacaagctgtttttaagccttttaccatttgaaatgcatgtgttgtgcgcgttgagggatgggaggaggggatgagaggcggctcagtgtcacctcccacagccaccggccctgacccttaatccagacaccgatggaagtcgacttttca

SEQ ID NO: 6040 - DNA, 737 bp, Macaca Fascicularis
  misc_feature (1)...(737): n = A,T,C or G
agcaggctggcnnnnnnnnagcatgactaggaatgcgatggcttacaatgttcagcaaggtgtgcttctgtgctagctgtgtccagcatatactgcccttaannntagtcaccataagtgggcttagctgtgtgtgtgttttttttttttttttgagagagagnnnnntnnnnnnnnnnnnnnnnnnnnnnnnnnnnnnnnnnnnnnnnnnnnnnnnnnnnnncctcccgggttcaagcgatnnnnntgnctcggnnnntggagtggctgnnnnnnnnnnnnnnnnnnnnnnnnnnnnnnnnnnnnnnnnnnnnnnnnnnnnnnnnnnnnnnnnnnnnnnnnnnnnnnnnnnnnnnnnnnnnnnnnnnnnnnnnnnnnnnnnnnnnnnnnnnnnnnnnnnnnnnnnnnnnnnnnnnnnnnnnnnnncacacctggcctgaagttaaagatctttttgaactataacagtactttatagtatatttttgtttcccaagtccctttgtatttagaattctagtttcctttttttctccttaaataggtttgtgtgtttttttttaaggtatgtcatgattcatgtaaaacactttgaaaatacagtatagtgttaaaaaaataagtcactggtaatctatctggagattatcaactgttaatttttggtgtattttccagtgttctctgtgtgtatgtagttgagctcatttctatatgtacagtttttgtgtattgtg

SEQ ID NO: 6041 - DNA, 656 bp, Macaca Fascicularis
  misc_feature (1)...(656): n = A,T,C or G
agggcaagctgattgcatgtgcattatacctatgcctttaaacattcccataaaaagtattatnaagaaattccattccacactaggactgatgaaaaggtggttgattttgccttgtgataattatcaaaggatagtttttcatccttaggttttattcatataagagtttttttatttttattttctctgttaacttaggaacacatcataaattcacaccaactgacacgttgctgacatctgtacttgacataaccatttttattcctaccggaagcattaaatataaaagatggttaattttgaagagcaaagggtgctgaaatgacttgtacggctggctggtgctttcttaaatggattgccatagtttagtaaagaatgtgatttacattattgtcattttttctattaaaaccttaagaatggggcgctttagctgtccctgcagtgttttcatatctagtagtcattttagggaaagtgataatctgtaaaatgaatagttatgttttgatatgactgatactttctttgttaaaagggtgtattaagtcttcaatttcaagtgtagcttaaaagtgtaaacattatgtgattcatttgaatacaagaatgcctatgaagtactcactataacagcattccttttg

SEQ ID NO: 6042 - DNA, 4490 bp, Macaca Fascicularis
gcctgccaccaccatgtctgctgcaaatcctgagactcctaactcaaccagctccagagaaactagcacccagtcttcatctgctgcagttagccaaggctatgttttaccagaaggcagaatcatgccaaacactgtttttgttggtggaattgatgataggatggatgcaactgagattaaaagcttctttggtagatatggttcagtgaaagaagtgaagataatcacagatcgaatcggtgtctccaaaggctatggatttgtttcattttttaatgacgtggatgtccagaagatagtagaatcacagatccatatccagggtaaaaaactgaagctgggccctgcaatcagaaaacaaaatttgtgtgcttatcgtgtgcagccacgtcgtttggtatttaatcctcctcctccaccgcagtttcagaatgtctggagtaatccaaatgctgaaacatatcttcagccccgagtcgcgctgaatcctataactcagtacgttcaggcatatccttcttatccaaattcaccaggtcagggcatcactggatatcagttgccggtgtataattatcagatgccaccacagtggcctgttggggagccaaggaattatgctgtacctctggcatatcctacttatccaaatccaccaggtcaggtcatcgctggatatcatctgcctcctgctgcaaatcctgagactccaaactcaaccagctccagagaaactagcacccagtcttcatctgctgcagttagccaaggctatgttttaccagaaggcagaatcatgccaaacactgtttttgttggtggaattgatgataggatggatgcaactgagattaaaagcttctttggtagatatggttcagtgaaagaagtgaagataatcacagatcgaactggtgtgtccaaaggctatggatttgtttcattttttaatgacgtggatgtccagaagatagtagaatcacagatccatatccagggtaaaaaactgaagctgggccctgcaatcagaaaacaaaatttgtgtgcttatcgtgtgcagccacgtcgtttggtatttaatcctcctcctccaccgcagtttcagaatgtctggagtaatccaaatgctgaaacatatcttcagccccgagtcgcgctgaatcctataactcagtacgttcaggcatatcctgcttatccacattcaccatgtcaggtcatcactgaatatcaggttcctgtatattattatcagataccaccacagtggcctattggggagaccaggagttacgcagtacctctggcatatcctacttaccgaaattcaccgtgtcaggtcatcactggatatcagttgcctgtatataattatcagatgccaccacagtggcctgttggggagccttggagttatgcagtacctctggcatatcctacttaccgaaattcaccgtgtcaggtcatcactggatatcagttgcctgtatataattatcagatgccaccacagtggcctgttggggagccttggagttatgcagtacctctggcatatcctacttaccgaaattcaccgtgtcaggtcatcactggatatcagttgcctgtatataattaccagatgccaccacagtggcctgttggggagcccaggagttacgcagtacctctgatgccaccacagtggcctgttggggagcccaggagttatgcagtacctctggcatatcctatttaccgaaattcactgtgtcatgtcatcactggatatcagttgcctgtatataattatcagatgccaccacagtggcttgttggggagcccaggagttatgcagtacttctggcatatcccacttaccgaaattcaccatgtcaggtcatcactggtggatatcactttcctgtatattattatccgataccaccacagtggcctgttggggagcccaggagttatgcactacctctggcatatcctacttaccgaaattcaccatgtcaggtcatcactggatatcactttcctgtatattattatgcgatgccaccacagtggcctgttggggagcccaggaattacactgtacctctggcatatcctacttaccgaaattcatcatggcaggtcatcactggatatcacttgcctgtatataattatcagatgccactacgttggcctgttggggagcaaaggagttatgttgtacctctggcatatcctacttatccagatccaccagttcaggtcatcactggacatcagttgcctgtatataattatcagatgccaccacagtggcctgttggagatcaaaggaggcgtatcctacttatccaggttcaccaggtcagatcatcactggatatcggttgcctgtatataatcatcagaaatctgtggaccgaagcatacaaacggtggtatcttgtctgtttaatcaagagaacagactgataaattctgttgttactcaggatgactacttcaaggttaaaagagtgcatcactttagaagaagctgggcagtatttaaatgtttgatcttctcagctatccagtttcatgggaagttgctggttttgaatattaagctgaaagttttccactattacagaaattctgaattttggtaaatcacactgaaacttcctgtataagttgtattattcaactctagtttaatcttacattgaaactgttcttcattagatgtttgtttagaacctggttctgtgttgaatatattgcagaaagtaaaaataattgagactgaaagtaaattaagatttatctgcaaggatttttaaaaagttgaaatttgcattttaagtgttaaaaaggaaatactgattttcaaaaaaaaaagtttttaaaaccgaatttgaaagacaagaattttgatagtctgaatacaagcatttcatttctgcaagtacctgtgaacagtacagtatttacaatattgagttttgcgtttatgatttatctagaaatttaccacaaaagcaaaatttttaaaatggtatttttaattagtggcactcaatatgtagttagctttattgaagttttcttatctaaacccagtaaaacagactccaagcaaaccgtccaatcagtgagtcatacatatgtttattaaaaatattttatcttttatctagaatctacacatacgtatctaatttgattgagatagtaattaagataactaaaattctgggcccaattttttatagaatccaagacaaactaaactttactaacaaactaaactctttctcaaggagttaccattcttttttgtaaaaacattgttctttgaaatgctaaacttaatgactatgtctaattgtgcaaaaactggtattaaagaatgctgtaacttctttatgtcactcaaaggttaatcaggagtatgcgaaaaagaattgtttttataaaaacattgaagtattagttatttgctatagatttttatttttgttttttaaccttttatatttccttttgtaaagtaaaatatgtccagaagagtcaaagtaggtagttttaatatttctaaaccacgaaagttgtttagttatatataactataactgtatatgaagttgtttagtaagtatatcttaagaacgtgctagaattcttaactgagtaagttaacattgtttctagattagcaggtgtcctcattttacattgtgacacacagctggagccccagagctcttttgctatacccacagtcttgttttccccacctcttttactagtcttttaggaggtttgctcttagaactggtgatctaaagaatgaaagtagctgtatgagcagttcaagggccaagccctggaatggtagccatgggatataatacctttctaagggaaacaattgtgtctttatcattttatctgccatggacatgagtttaaagtggctttctggcctttcagtggcttcatccctaaaacatggagactctaaattaatgtagttactatgggccatattactagtgcccactggagtctattttttctcaaaattttcattctgaatctgaaggaaagagtcttttaactttagaattcccaagagggctttattacacctgagaaattgaaagcaccatttgtcccattaaaaaattatctgtagcttttttagtgctttgacatttctgacatatatcattctgtgataaagtctccagatttctataaatgatacctatattctaaagagctagttgtaattattccaatatgaccttaaggaaaagttagggaataaatgtttgcctttgttggagtgaagtatttaaaagagtaagatgaaagtgataaagtcctgaacctttcaaaatggaaaattaattctaaacttagaaatatgtttctgttacctattgcagatactgtctttgcataaatgaataaaaataaatttttttcttgaaaaaaaaaaaaa

SEQ ID NO: 6043 - DNA, 2178 bp, Macaca Fascicularis
aagactgaggaatcatctttgtgcctcccatttgattgcattttctttggtcaaaggttcccttattcatgggacttgcctgggtccaggaccccttgacaggtgctctctggctgcctgtcctctgggcactcttgtcccaggtctattgttttcatgacccaccaggatggcgctttacctcctcagaaattgtgatccccaggaaagtgccccacaggaggcgtggagttgagatgccagaccaactctcttacagcatgcgtttccggggccgaaggcacgtgattcacatgaagctcaagaagaaagaccaggagaggctagtagatgtaagactgaaggggaggagagagatcaagaatctgaaaaggtaaaactgtctgaaactcccagagcaggccacgtttatttgtggaggcatcatagaaaaaacttgaaaattcactacacggttactaatggattattccagcggaaccctaatgtgtcacacataatagagaatgtagtgattattaacagtatcatacataccattttcaaaccagtttatttaaatgtctatgtacgtgttttgtgcatatggaatcaaaaggatttagtaaggttttatcggatgcctgttggaaaagctgtaagtgattttggtgtgtggaaatatcataaatggtatacaaatattaaacatgatacctcagttgtttttacagcatatcgacttgaaaaccgggactgttatgccagctttgatggaatgtgcaaccccaactggggagcaatgtttgtgtatttaatgaggtatcacttatttaggggggcatgtttaacagcacatgcactaggtcataacttgggcttgtcacatgattctgcaggttgttattgttttcgacgaaccaactgtctcatggctcctgttcctgatcttaatgatatgatgagcaattgttcttatgatagtattcaacacaggttgaatatgtgggatctttgtttgagtgatccaaatattccatacactaattttccttatgtagctgatcgttgtggagacaagatcaaaaatcagagggaagaatgtgactgtggctcccttaaagattgtgccacacccccctgatagatgttgtgagacctcttgtatcctttctcttggcagtgtttgcaatacaggactttgctgccatgagtgtaaatatgctgcccctggagtgctttgcagagacttgggtggtatatgtgatctaccggaatactgtgatgggaaaaacgaagagtgtccaaatgacgtctatgtccaggatggaaccccatgttcagcagtatctgtttgtgtaagaggaaactgcagtgaccgtgatacgcagtgtcaagccctttttggctacgaagtgaaagacggctccccagcatgctatcaacaattgaataggattggtgaccgatttggaaactgtggggttattctacggcgaggaggaagtaaaccttttccatgtgaagaagatgatgttttttgtggaatgttgcactgtagtggtgtcagcgagattcccggtggaggtgagcacactacatttcgtagtatattagtacgcgacataaaagaagaaaaatgctttggctatgaagcacaccaagggacagacttgccggaaatggggctggtagtggatggtgcaacctgtggcccagggagctactgtcttaaacacaattgtactttttatcaagacctgcattttgagtgtgatcttaaaacatgcaattacaaaggagtatgtaacaacagaaaacattgtcactgtgtgtttgggtggcaaccaccaacatgtgaactgagaggaacaggaggtagtatagatagtggccctccacctgacaaacaatatcgtgttgcaagcagcatacttgtgaatacaaaccgagcactacttttaatatttactcgttacatcctttttctggtttcgcttctctttggtggcttttcacaagcattacatttttatggaagagaaagggaaggagacaacacaatggagtaaattacattgacacttactgggagatataatcaatagtcactctgacaattagatcatcttttagcaattctgatgtcatcttgaaataaaatcacttggcaatttaaaaaaaaaaaaaaaaaaaaaa

SEQ ID NO: 6044 - DNA, 920 bp, Macaca Fascicularis
  misc_feature (1)...(920): n = A,T,C or G
gtcggccagctacaatgaggtgaccccgggggacaggagttggcaccaaatggtaatgagagctctgtcctcccaggagtccacaccagaacaccagggcttggcagagcctgagaacgaccagctcccggaggagtaccaacaaccgccaccgtttgcccctgggtactgctagagaacaggtccaccctggctctgtcctcttgctaccgggggctgccacactcctgaatgtcctaacgtttcttccatggccccacaccatggcgtccgggagtctttgggaacccgggaaacggaacgaagatgtttttggggtctgttcctgcagtcacccgtggggcgagctggttattttagcaataatcatcnnnnnnnnnnnnnnnnnnnnnnnnnnnnnnnnnnnnnnnncgcccgtgccagaccctctattcattatttgacgcctgagagcaagcccctcaggtagcgtcaccctccatgttttgaagaagagactgaggttccgagaggataagaggcgtgaccaaggccacagagctnnnnnnnnnnnnnnnnngatttgaagccaggtgaatccgagcccttttcccacagcatctgtttgttccgttgtctaaaagcacacttctggccgggcgcagtggctcatgcctgtnnnnnnnnnnnnnnnnggggcnnnnnnnnnnnnnnnnnnnnnnnnnnnnnnnnnnnnnnnnnnnnnnnnnnnntnnnnnnnnnnngnntatattaaaaaattcaaaaattacctggacatgannnnnnnnnnnnnnnnnnnnnnnnnnnnnnnnnnnnnnnnnnnnnnnnnnnnnnnnnnnnnnnnngcagaggttgcnnnnnnnnnnnnnnnnnnnnnnnnnnnnnnnnnnnnnnnnnnnnnnganactccatctcaaaaa

SEQ ID NO: 6045 - DNA, 738 bp, Macaca Fascicularis
  misc_feature (1)...(738): n = A,T,C or G
agtgataaaagcatattcaagttaccaaatcnntcaannnnnnatcagttgctgattaaataaataaggggaagcatcttgttcagggacaacacgttggagagattcttatcaaagcaagccaagcaaggtttnnnnnnnnnnnnnnnatcttagtttgacatagtgaccctcaaccaccaccatttgccccagaactggagcacaatgatttaaatcatttacctgtctcacttcttcttggcatgcttaaaagcaaacatgattcactacttcctgtccttcagtccgggcatttggggtgccagtgannnnnnnnnnnnnnngctgaggtttgggtgtcttgcaggaagtatgtcattgcagttaatttcgatgaaatgaaacagtaactagggtccatgcagcccatgactccctgattacatctagccatgccctacttattatttcagaaagaaagagggggaataaaggcagtattgccacactgattagaagcacattcattccactttgatgttgaatnnnnnnnnnnnnnnnntgcttgagtnnnnnnnnnnnnnnnnnnnnnnnnnnnnnagtgcacaacatagagcaggaattgagaatgccaattacatattnnnnnnnnnnnnnnnnntttttttcaagtctctaataaaaaaagtgtaagttgagattaacataggtgatgtttcatgaagtnnnnnnnnnnngagactccgtctcaaaata

SEQ ID NO: 6046 - DNA, 747 bp, Macaca Fascicularis
  misc_feature (1)...(747): n = A,T,C or G
tccaagnnnnnnnnnnnnnnnnnnnnnnnnnnnnnntctacaaaaaaaatactaaaattagcctgttgcggtgacttgtgcctgtggttccggctacttgggaggctgaggtaggagggattgcttaagcctggtagatggaggttgtagtgagctgagattgtgccattgcactctagcnnnnnnnnnnnnnnnnnnnnnngtctccaaaaaaaaaaaaatcttttgttcgaatgccctatagccatcctcacagcgcccaggattgtgactgactgcatttttaattattgaaacttggctttccataacatgnnnnnnnnnnnnnnnnnnnnnnnnnnnnnnngagcaaggtggnnnnnnnnnnnnnnnnnnnnnnnnaggtaaagaggcgcgtctcaccannnnnnnnnnnnnnnnnnnnnnnnnnnnnnnnnnnnntnnnnnnnnnnnnnnggatgnnnnnnnnnngaccgcagccacgnnnnnnnnnnnnnnnnnnnnnnnnnnnnnnnnnnnnnngttgagtttgcttggnnnnnnnnnnnnnnnnnnnnnnnnnnnactgaacnnnnnnnnnnnnnnnnnnnnnnttttattttactttgannnnnnnnnnnnnnnnnnnnnnnntaannnnnnnnnnnnnnnnnnnnnnnnnaacaaatgtttagaaagcaaacatgacgcctgtgctgtacaacctcctttctgttggctgtttaaaggatgtacttctatatatta

SEQ ID NO: 6047 - DNA, 741 bp, Macaca Fascicularis
  misc_feature (1)...(741): n = A,T,C or G
cgcccggccgggaccaggtagacttaaaaatagggtaggagaaaaaccagtttctttnntggnntnnnnnnnnnnnnnnngaaannnnnnnnnnnnnnnnnnnnnccccgcaaaatcacccatgtcctcagagatgtctaaagcttggggctccaggaaatcatccagtagagttggagattcagagnnnnnnnnnnnnnnnnnacatgctcctaactcccttcccattaaaggtgttagaccagagggtgttccttttccacaataatgggatcggctggtgtgcctgcagggaggaagagggaggtggtcaannnnnnnnnnnnnnnnttaggatggttctgactttgttctccctcccctagtgttctcagcctccattctgcagtgtttagagttttagggaaagggtttgggtgccccagcatccaggtgttgtgtggcttagcgcacgtgaagtgaaaaccttttggggttgtttggaagcagctttctggttcttgtcattgtatcctgaggtcccagaaccctactctcccacgaggaccctcagtgaccatgatggccataagcctggccaccctgctggctcctgggtgagctgaagaaccttgcctgtgacacttttcgagggnnnnnnnnnnnnnnnnnnnnnnnnnnnnnntgctgggactcatgcgggtcagttcctgcggcctggtttcgctggtcctgtcttgatgagcaccatgtnnnncctcc

SEQ ID NO: 6048 - DNA, 718 bp, Macaca Fascicularis
  misc_feature (1)...(718): n = A,T,C or G
acgtctcacgatggacactggccccgtactgtggctccgaattccctggtgaacaatggtgccgtggggaattcagagccaggctttcgaggactgactcctccaattccttgggaacatgcaccgcgtccccatttcccccttgtcccagcttcgtggccttannnnnnnnnnnnnnnnnnnnnnnnnnnnggaaatgcccgatttcagcccaacaaacctttctatactcaagctggtctaccgatgcacagcaaccagccnnnnnnnnnnnnnnnnnnnnnnnnnnnnnnnnnnnnnnnnnnnnnnnnnnnnaaaaagtgacatttaatggaaagcaaaacaaatcaggtcctgatttaaaattttaacacgtttagatagcttatttaaattctaagactgtttttacagactgtattatttgtatataaatatgaactatagtttttactagtatcaccaaattgagtgatacaaatttcatctattttattaccctatttttaagggaattttatgttttgtttaaccttgatgaattgtataaagagagaatttaaaaaattacattctttattttctattagctgtattcatactttggttgcttcagactttatatattgttcttaagagttaggaaagaatttcatgtgttttaaatttgtcacttctattctttacagaaccttgtagtgcnnaaaaacttttaaaa

SEQ ID NO: 6049 - DNA, 488 bp, Macaca Fascicularis
  misc_feature (1)...(488): n = A,T,C or G
cagtggagccgccacaaaaatgcagattttcgtgaaaacccttacggggnnnnnnnnnnnnnnnnnnnnnnnnnnnnnnnnnnnnnnnnnnnnnnnnnnnnnnnnnnnnnnnnnnnnnnnnnnnnnnnnnnnnnnnnnnnnnnnnnnnnnnnnnnnnnnnnnnnnnnnnnnnnnnnnnnnnnnnnnnnnnnnnnnnnnnnnnnnnnnnnnnnnnnnnnnnnnnnnnnnnnnnnnncttcgtggtggtgctaagaaaaggaagaagaagtcttacaccactcccaagaagaataagcacaagagaaagaaggttaagctggctgtcctgaaatattataaggtggatgagaatggcaaaattagtcgccttcgtcgagagtgcccatctgatgaatgtggtgctggggtgtttatggcaagccactttgacagacattattgtggcaaatgttgtctgacttactgtttcaacaagccagaagacaagt

SEQ ID NO: 6050 - DNA, 782 bp, Macaca Fascicularis
  misc_feature (1)...(782): n = A,T,C or G
caaggagggtgtttgaacttagagnnntaataaaannntaccaaataaattttgagtagaataatcgtcttttgcaatgtacattttaaaaatttcacaagttcttttttgtatataaagaacagtagactgggcacaannnnnnnnnnnnnnnnnnnnnnnnnnnnnnnnnnnnnnnnnnnnnnnnnnnnnnnnnnnnnnnnnnnnnnnnnnnnnnnnnnnnnnnnnnnnnnnnnnnnnnnnnnnnnnnnnnnnnnnnnnnnnnnnnnnnnnnnnnnnnnnnnnnnnnnnnnnnnnnnnnnnnnnnnnnnnnnnnnnnnnnnnnnnnnnnnnnncaggagtttgaggctgcagtgagctgtgattgcgacactgcactgcagcctnnnnnnnnnagaccgtgtctctagaaaaaaaaaaaaaaacatgatacatgccattagaaaaagacagcaaagcaggagtataagaaagtaaattcacccaaggtctcaggaccttgagtactcgctttggtgctgattacctctgtgcaaatggacacagcataataaattggtagtttcctgctctttttgcatcatcttttccagttaatgtgaagcctctgggggctggcctgtgtgcattgatgactgtgttgagtcaggggtagcagtgagattcccttttagctgctgcatttggggaactcagactttccagctgcttcctcagggtagactcctcaaccggttcagccgccctgttaaaaggaattgacttggtttcatttggtgcta

SEQ ID NO: 6051 - DNA, 1197 bp, Macaca Fascicularis
tgtgcaccacctttaatcactctggggcaactctcacatcttgctgcatgtacatgtatatggctactattgaagtgtaattgtgagatggactccaacaagcattgtgtgtgggaaaatgtatttaactactgtgtgtgtgtgtgcgcgcccatgcatacacacacgagcagagaaatctctgatcttgaactaatcctgcacaggcatccttccctttatagattgattccggcaaaggcagaataaaacaaatttcctataaagagaattctgatataaaacaagtcatgtagtcccatggccgggaatctctccatagatgctgaaaacttaaacttactactttaggaaaaaaaaaaaaattcaatttcagacactgagttatatatgaaattaattaggctctattccaacagttgtttaaattttaaatagtccatattgagtttaattaaaacaagggatgcatgcagtcaaattgataatttaattcttcaagtgataatataggaagtttcaccttgcctttgtccgagccccacctattaaacccctttactcacagtttgaaactgaagcagtaaacttgtttccagacatctttttcagattgtcttaagcccaaagttgcctcacttccactattctcagcagccaaccacgatttggcagctgctccactgttagggttgagggaacagggatcagtcctattagaagtctgtgagtctcaaactctacctgttctctgcaatcatccaaaatttgaaaaggaagctatatccagtgtttcattaccaaacagattcactactcttactgattcttcactgagctttgctagtataagcagagttccaagtcccccctaggggttgtctctacacttctttatcattccagtgggtggagtttagctgagggaaggacatttcataagggttagttggactgagcagtatggacatttgcttttttcattacgtactgttgtttttccttgttagatgtgctttggtggttttaatattgtgccagggatggggaaatgggtgggggttgtgtgtgtgggaagagtacttattattgtgttttcttcagtgtaattgttcttggtaattgatacctctctgttttatttctcccattctttccaaaataaaactttttgaaaaaaaaaaaaaaaaaaaaaaa

SEQ ID NO: 6052 - DNA, 730 bp, Macaca Fascicularis
  misc_feature (1)...(730): n = A,T,C or G
tagcatagancnntgttctgcatnnnatgtttgtatattttgtttcacagttaatcttccctccccaagtttgctattcaaatcagctgcctaaatgacatttctagtagtctgatgtatttttttgaggaatagtttgtgattccaatgcaggtgtcttcattaccattacctctacactgcagaggaggcaaaactcctttattagaattactgcacatgtgtatggggaaaatagttttgaaagactagaatgatacaagtgagcaaaagttggtcagcttggctatggagtggtggcaataatctctaaacattcctaaagaccatgagctgaacctaaactcccttggaatctgaacaaaggaatataaaattgccatttgaaaannnnnnnnnnnnnnnnncctcagagatagatcagccagtggcccaaagccatttcaagtacagaaattgtattgagactacaactaaataaatttgaacattaagtataattttaccacttttcctctttataagcatatttgtaaactcaaaactgcacagaagtgactttactttctcaagtttgatactgagttgactgttcacttatcccacacccttccccttccctttcctaaggcaatagtgcacaagttaggttatttttgcttccgaatttgaatgaaaaacttaatgnnnnnnnnnnnttttttcttttgcaagacacctgtttatcacc

SEQ ID NO: 6053 - DNA, 749 bp, Macaca Fascicularis
  misc_feature (1)...(749): n = A,T,C or G
caaagaccgtaacaaaaagtaagtctggccgggcgcctgtggctcaagcctgtaatcccagcacttgnggaggccgaggtgggcggatcactggagaccagnnnnnnnnnnnnnnnnnnnnnnnnnnnnnnnnnnnnnnnnnnnnnnnnnnnnnnnnnnnnnnnnnnnnnnnnnnnnnnnnnnnnnnnnnnnnnnnnnnnnnnnnnnnnnnnnnnnnnnnnnnnnnnnnnnnnnnnnnnnnnnnnnnnnnnnnnnnnnnnnnnnnnnnnnnnnnnnnnnnnnnnnnnnnnnnnnnnnnnnnnnnnnncaaaagacggatgtgggaactcaaattttcatttttaatataatccccaagattttctctaagaaataaattgttttgtattttgtaacttaaagcagctattagtaaatttctgagatatagcaggagaccaaaacatgtttggaaagagaataaatatatgaagagagactggctgttttattttcaatgtattgaatatattagactactatttattttctgagtggatgtgattaaatattcagacgtttagtgtatgattaagagtgagatagagatttctttggagttattaaatccatcctgtcttttacataatggacaaatcaagttaaaaaaatttttaggtagcttagcttgttttctggtgctgttgacctgcaagagaatatacttttgcatatacaggtgaaagttttgcaatttatgtatataagaa

SEQ ID NO: 6054 - DNA, 741 bp, Macaca Fascicularis
aacaacaaaaaaaagaaaagcaaaactctgacatctctgcttcctttgctgctaaatctctctccctcttctctctcgggtttttctccagtcatctggctgtttccctgccaggagatttgcatctgcttttttcctccctgccccatctagattggcatttcccccaactgtacccttcggtccacagggagcttctgagtggcagtggcaggagctctagggtaggaaagagggatgacctggtttctcaagcagtgaggcctggaagggaatgttccaaagagggccacatcagtgggggtcctgtgagtgggggacccttgtgtggcctgcagatctgaccaggcgccatccgtcctctcttccctaggctctggaagaggatctgaaccaaaagaagcgggagcaggagatgttcttcaagctgagcgaggaggcggagtgcccaaaccccaccaccccaagcaaggccgccaagttcttcccctacaattctgcggatgcttcttaacaactgcccggggctgtggctggaagcttggtgggccccagggccttctccttcattctctgtgaacatgtaactcaggaccccttttccctcttgcatctgtgccagctcaaatccagcccctcgccctgtgccatcccagctgtgcccgatagacccgccccagtgttcctgacttctcgctggcctgtggagggtgaggtgtaatgatgaccctcatgtatgtt

SEQ ID NO: 6055 - DNA, 4329 bp, Macaca Fascicularis
gcttccgcctcgcctgccaccggggtttgtatgaaaacaccgggcggcgggcggcgagggatccgccgtgatccaggtgccgagccgggctgcggctcttcgcggtccccgccagcgccccatcctgagccgattatctgcaattatgaaatgaaataactcaagatgagcaagttaaaagtgataccagagaaaagccttaccaataattctaggatcgtgggactcctggctcagctggagaagatcaatgctgaaccttcagaatcagacactgcccgatatgttacatcaaaaattcttcatctggctcagagtcaagaaaaaacaaggagagaaatgacagccaaaggttctacaggaatggaaattctgctgtcaacattagagaacacaaaagatcttcaaactacacttaatatcttaagcattcttgttgagctggtgtcagctggtggaggtagaagagtgagtttcttagtcaccaaaggtggttctcaaatactgttgcagttacttatgaatgccagcaaagaatctcccccacatgaggacttaatggtacagattcattctattcttgcaaagattggaccaaaagataaaaaatttggagtaaaggctagaattaatggggctctgaatataaccctgaatttggtcaagcagaatttgcagaatcatcgcttggttctaccttgccttcagcttttacgagtatattctgccaactctgtgaattcagtatccttagggaaaaatggagttgtggaactgatgtttaaaatcattggaccatttagtaagaagaattccagtcttataaaggttgctttagacactcttgctgcattgctaaaatcaagaacaaatgccaggagagctgtagacagaggatatgtccaagtgcttttaacaatttatgtagattggcaccgccatgataaccggcatagaaacatgctcattcggaaaggaattttacagagtttaaaaagtgttacaaacatcaagttgggaagaaaagcatttattgatgccaatgggatgaaaattctgtataacacttcacaaaatgtctggcagtcaggactctggatcctcttgtcaatacctccagtctgataatgaggaagtgtttcccaaaaaaatcgactgccactcccaacaattaaaagttcttttcatttccagttgcctgttattcctgtgactggtcctgtggctcagctctacagcttaccccctgaagtggatgacgtagtagatgaaagtgatgacaacgatgatattgatgtagaagctgaaaacgaaactgagaatgaagatgacctagatcaaaattttaagaatgatgatattgaaacagatattaacaaactaaaaccccagcaagaaccgggacgaacaatagaagatctaaaaatgtatgaacaccttttccctgagcttgttgatgattttcaggactatgatttaatctccaaagaaccaaagccttttgtatttgagggaaaagtacgtggtcctattgttgttcctacggcaggagaggaaacatctgggaattctggcaatttaagaaaagttgtaatgaaggaaaacatatcttctaaagaagatgaaggtgaaaagaagtctacctttatggatctagcaaaagaagatactaaagataatgatagaacattacaacagtagccagccccaggttttactgcagaagtgaagaaggactgcagtcttcctcttactgtccttacatgtgctaaagcgtgtccacacatggctacttgtggaaatgttctgtttgagggaagaacagttcagctagggaagctttgctgcactggagttgaaactgaagatgatgaagatacggagtcaaattcatcagtagaacaagcatcggttgaagtacctgatggaccaacactccatgacccagacctctatattgagattgtgaaaaatacaaaatctgtcccggaatattcagaggtggcttatcccgattattttggtcacgttccgcctccattcaaagagcctattttagaaaggccttacggtgtacagaggacaaaaattgctcaagatattgaaaggctaatacatcagagtgatatcatagatcgtgtggtatatgacttagataacccaaattacaccattccagaagagggagatattttgaaatttaactccaaatttgaatctgggaatctgcgcaaagtaattcaaattagaaaaaatgaatatgatcttattctgaactcagatataaacagcaatcattatcatcagtggttttactttgaagtcagtggaatgcggccaggtgttgcttacaggtttaacatcattaactgtgaaaagtccaacagtcagtttaattatggtatgcaaccactcatgtattcggttcaggaagcattaaatgccagaccatggtggattcgtatggggactgacatttgttactataaaaatcatttctcaagaagttcagttgctgcaggtgggcaaaagggaaaatcctactatacaattacatttactgtcagttttccacataaagatgatgtttgctactttgcttatcactatccatatacgtattcaactttacagatgcatcttcaaaaattggaatcagcacacaatcctcagcaaatctattttcggaaagatgtgttatgtgaaaccctgtccggaaacagctgccccttggtgactataacagcaatgccagagtctaattattatgaacatatctgtcatttcagaaatcgcccttacgttttcttgtctgctcgggtacatcctggagaaactaatgcaagttgggttatgaaaggaacgttggaatatctcatgagcaataaccccactgctcagagcttacgagaatcttatatttttaaaattgtccctatgttaaatccagatggtgtcatcaatggaaatcatcgctgttctttaagtggagaggatttgaataggcagtggcaaagtccaaacccggatttacatcctacaatttaccatgctaaggggctgttgcaatacttggctgcagtgaagcgtttacccttggtttattgtgattatcatggccattcccgaaagaagaacgtatttatgtatggttgcagcatcaaagagacagtgtggcataccaatgataatgcaacttcatgtgatgttgtggaagatacgggatacaggacattgcctaagatactgagccatattgccccagcattttgcatgagcagctgtagcttcgtagtagaaaaatctaaagaatccacagcacgtgttgtagtttggagggaaataggagtacaaagaagttataccatggagagtactttatgtggctgtgatcagggaaaatacaagggtttacagattggtacccgagaactggaagagatgggagcaaaattttgtgttggtcttttacgtttgaaaagactgacctctccactggagtataatctgccttccagcctgcttgactttgaaaatgatttaattgaatcaagctgcaaagtaactagccctaccacttacgttttggatgaagatgaacctcgattccttgaagaagttgattacagtgcagaaagtaatgatgagttagatattgagttggctgaaaatgtaggagattatgaaccttctgctcaagaagaagtgctttctgactctgaattatcaagaacatacctaccttgagcccgctaccatctcctgttaaccgcaaagaagaaatggaatatcttggtttttatttcacaggaaacttgagagaaatgagtttatacagagctgactcaaaaagacaaaaagtaacttgggccagtttggtttcaagacaataaatatgttattaattaatgataaaattggcacttgtcttattttagatattcagtgcactttatgtagcattgaatgatcaaatattggatttacctttaaaaaacctgagtatcattgcatgaatttttatctccctatggttatatcctgcatcaaatggataattttgaagtgtgttcagaatataaaattgaaattttagagttgttgaaaatcctgagttgttgaaaactaatatatatgtacatggatttctatagatgtgtttgtttagaagtgggtagatattgaagataagactgttcttcagaatcatgttaactattgggttgtgactgaagtaatccagggtttgccttgaaaccattacattctacatttaccaaattaaacaaataaaactgtattaaatgttgcaaaaaaaaaaaaaaaaaa

SEQ ID NO: 6056 - DNA, 711 bp, Macaca Fascicularis
gtagctaggattacaggtgcccaccacctcgcctggctaacttttgtgtatgtagtagagacaggttttcaccatgttggccagggtggtcttgacctcctgatctcaagtgatccacccacctcggctttcaaaagtgctgggaatatacacgtgagccactgcacctggccatgtttttcttatttttgctcctcttcttttcctcaacacctcaggttggtgaactggggagattttgagggacaggctcagtgctccctcaaaattcccctgtcgcacatcgctgaggccctgtcctggaaactccccaaaagtggatggtctccttataggatgggagcttccaaaatggctccacagggaagagttaacgtgagtcctttccttcgtcttcattgacatccagcatttgtgatttccatggacatcagtacttttgtagctgaaatctttattaatctacttaaggagataattaatttaataaatattcagacattagttgcatccaatatttaaatttctttaatcaattggtaaacatagccatgattatatatagtttaggcttcataaacttcgattaaatggattttacgaaaaacaaagtaaccattttattctacctgtatcctatatcaatatgttgtgtacttgaaatatccacaagaaaatgtatttcaaaaatcaaagtgtatttattgccta

SEQ ID NO: 6057 - DNA, 2286 bp, Macaca Fascicularis
agcgccctgccgcgggcaaaacctcccgaccatgccccgcactccgcccgctcctgcgaccccccagccccgctcaggcccgagcgcccgcagtcgtcgcgccgccgtgccaaccatgcagtaaaggctgaaaatctgggtcacagctgaggaagacctcagacatggagtccaggatgtggcctgcgctgctgctgtcccacctcctccctctctggccactgctgttgctgcccctcccaccgcctgctcagggctcttcctcctcccctcgaaccccaccagccccagcccgccccccgtgtgcccggggaggcccctcggccccacgtcatgtgtgcgtgtgggagcgggcacctccaccaagccgatcccctcgggtcccaagatcacgtcggcaagtcctgcctggcactgtacccccagccaccccatcaggctttgaggaggggccgccctcatcccagtacccctgggctattgtgtggggtcccaccgtgtctcgagaggatggaggggaccccaactctgccaatcccggatttctggactatggttttgcagcccctcatgggctcgcaaccccacaccccaactcagactccatgcggggtgatggagatgggcttatccttggagaggcacctgccaccctgcggccgttcctgttcgggggccgtggggaaggtgtggacccccagctttatgtcacaattaccatctccatcatcattgttctcgtggccactggcatcatcttcaagttctgctgggaccgcagccagaagcggcgcagaccctcagggcagcaaggtgccctgaggcaagaggagagccagcagccgctgacagacctgtccccggccggagtcactgtgctgggggccttcggggactcgcctacccccacccctgaccatgaggagccccgagggggaccccggcctgggatgccccaccccaagggggctccagccttccagttgaaccggattcccctggtgaatctgtgatgccccccaatgttggggtgcagccaagcaggaggccaaggggccggcacagcccccatcccactgagggtggggcagctgtggggagctggggccacaggggctcctggctcctgcccttgcacaccaccccggaacactccccagccccacaggcaatcctatctgctcgccctcctgcaggtggggccttacatatctgtgactttgggtccctgtccccacccttgtgcactcacatgaaagccttgcacactcacctccaccttcacaggccatttgcacatgctcctgcaccctctccctgtccacactgctccgctcagctgactctcatgttctctcttgtctcacatttgcacttttccttcccacattctgtgctcagctcactcggtggtcagtgtttcctgcacactttacctctcatgcatttcccggcctgatgttgtggtggtgtgcggcgtgctcacactctccttcatgaacacccactcacctcgtttccgcagcccctgcatgctgctccagaggtgggtgggaggtgagctgggggctctttgtgccctcatctgtcatggtctcgtcccattcctcaccatttgtttctctgtcttctcatcccactccaagggtgccggcatcaccctgagggctcccccttgggaatgggggtagtgaggccccagacttcacccccaccccactgctaaaatctgttttctgacagatgggttttggggagtcgcctgctgcactacatgagaaagggactcccgtttgcccttccctttctcctacagtcccttttgtcttgtctgtcctggctgtctgtgtgtgtgccgttttctggacttcagagccccctgagccagtcctcccttcccagtctgcctttgggcctccctaactccaccgaggctgccagggaccagagtcagctggttcaaggccatcaggagctctgcctccaaatctaccccttctcttcccggactccctcctatcccctcctttcttccctctttccttccactctccttccttttgcctccctgccctttccccctcctcaggttcttccctccttctcactggttttccaccttcctccttcccctcttccctggctcctatgctgtgatatatatttttgtattatctccttcttcttgtggttgatcatcttgaattactgtgggatgtaagtttcaaaattttcaaataaagcctttgcaagataaaaaaaaaaaaaaaaaaaaaaaaaaaaaaa

SEQ ID NO: 6058 - DNA, 684 bp, Macaca Fascicularis
  misc_feature (1)...(684): n = A,T,C or G
agctagagagtcnnatannnnatgaggaaggaagtagnnnnnnnnggcagtttcactgtcttcatacgtngtcccctggacccagtccagaagccaccaagccagcaaagctcttatgnnngctaaacactaacacnngagagccaaagaggttgtgtagagaacctggttncttagtgatggggacttggtaccttaggagtccagtgaggaagagaaggaacctctgattgtgcnnnnnnnnnnnnnnnnnnnnnnnnnnnnnnnnnnnnnnnnnnnnnnnnnnnnnnnnnnnnnnnnnnnnnnnnnaactggaccaannnnnnnnnnnnnnaaaccactcccagcacagctcagtgaggccctgcccaggctgagcttcttcagggcgtcttgaggccccgactgccagctgaaggcctacaatttttccgtgtgccccacctatccgcccaagaccttttctgctccccaccatcttggaccaaccaaaagctgaacggatgccacactgtgctggggccccttgacctcagcagagccgcttcttggtgctacgcagcctccacactcagagcccgtggactgggctggcctaagggccggggctgatggtactgctagcccaacactgctctctttgtgttcagtttttttgtttttgtttttattttatttttttcc

SEQ ID NO: 6059 - DNA, 751 bp, Macaca Fascicularis
  misc_feature (1)...(751): n = A,T,C or G
agcaagaatatttaacatttcactgcttccannnnnnnnnnnnnnnnnnnnnnnnnnnnnnnnnnnnnnnnnnnnnnnggaatatcagggaannnnnnnnnnnnnnnnnnnnnnnnnnnnnnnnctatcatttgtacttgacaccagctacctagcaggctcattgtgannnnnnnnnnnnnnccatgttatttatataaagtatctcagtgtaatatagggaattgcaggttatttgaaaatagtaacaaagaaaacccaaacgagaaactccatttctagaattagtttnnnnnnnnnnnnggnnngnntttgaggacaaacttttggcggtattatttttgtgcacaggaggaaaattgttagtaggtttatagatattatttttataatagaatgttaaacccctgaaaaacatcaaaaattgtctcctagaactaattctatgttttaaaaacttgttttaaagagggattctaaatagcaatagggtcttttctcctttctccactccaatggtttaatgggatagaggaatcaatgtttatatttttaaacctgtaaatattttattttgggtattttgtatatttgttgatataattnnnnnnnnnnnnnnnntaccattgtgcatgttgctgtttttgatagtcactcttttaatgaatgtaagaagcttggactaatagcacttttcttgttccattcaaacatctgaaaatgaaactaccacactgccattttaactgtt

SEQ ID NO: 6060 - DNA, 693 bp, Macaca Fascicularis
gatagcaatctagatgatgtaattagatgttagtgttatcactcttccaatctttctgtaagtatgaaaatttcccaacaattttttgagaaattgccacttataataacagatacttacttcaagggaccaacttagttaacattctacgtcccctgcctgtttaatcttagcctcttaaccaagtggtctccaaatcaggttcatacattctagggtacagagaaaacaaaccactacgacatagaaagaaaatatttaaatttctattaataactttttatctcacccttttttctattttttgctgtgtttcataatgtacaatatgcattagtacagaacttgtaaaatttgtgaatatatgtacatatttttaaggctacacactccaaaaatttgttactcatcagggtatctaatcaaaaaatttggatactactcttctataaaacagaaacgactttttgttttaagtctctgaccaccaaagatcattaaaatcagtcccttttgcttttatccaggggtttactgactcttaataatttattatgagaaattttaggtctaacagcagcagcaaaaagacagtaatgacagtggtaagtgttagcagaagccagggaatcagataattggcaaagtgcagtttggccacaagttagcaccaataaaatgttcaattctgtt

SEQ ID NO: 6061 - DNA, 2192 bp, Macaca Fascicularis
acttcataacttcctctgttttactcaccttgtttatcgtttttttaaaaaatgtgtagacaacataattcctctgggatacattggtatctgctactgaaaatctctttgatttgagtggaccatgtgaaaagacacatatttctcctctataaatgtccccctcccaaactcattctgcaactgtgtagggcttccccacaaaacagcaactatacacctaagtgtcccagacagagcaggtgacattacatcccaggagtggacaaggcccagttagtagccacatcttaatgccttgccacagttctgcctttggattttgtggtaaaaacctgaagtcttggctcagagacacaatgaaagctgcaaatattccacccagcaatgcctggaaacacccactctctgtctcagccacaccgcaaggtcaaccaaagcagcccaaagtcttaaattatctgcctgattccgtgcctcactcagggttgaaagcccacataggttatcacactgaagccctcagccctggatcaaaatactataatttcccatgcgattttgccccctaaaacctacccacctggtcaatttcttatttatttctcaagatttcttgtatatctaccaagatgttggagtttagtggggatctatccctttcttccccatcttaaaccttgaaccaatccagagacagatgcaggatttcagtagaagaaaataatattttggatggctgaataggaacagctcccttctccagctcccagcgccagcaacacagaagacggatgatttctgcattttaactgaggtaccgggttcatctcactagggagtgccagacaactggtgctggtcagctgctgcagcccgaccagcgagagctgaagcagggcgaggcatcacctcacctgggaagcgcaagggggaagggaatcccttttcctagccaggggaactgagacacacaacacctggaaaattgggtaactcccaccccattactgcgctttaccaagggtcttagcaaacggaacaccaggatattatatcccacacctggcctcgagggtcccacgcccgcggagcctccctcattgctagcacagcagtctacaatctaacagcaaggcagcagcaagtctgagggaggggcgcccgccattgctgaggcttaagtaggtaaacaaagccgctgggaagctcgaactgggtggagcccacagcagctgaaggaggcctgcctgtctctgtagactccacctctggggacagggcacagctaaacaaacaaaaaaaagcagcagaaacctctgcagatgcaaacgaccctgtctgacagctttgaagagagcagtggatctcccaacacggaggttgagatctgagaacggacagactgcctgcttaagtgggtccctgacccctgagtagcctaactgggagacatcccccactaggggcagactgacactacacacctcacacggtggagtacacccctgagaggaagcttccaaagcaagaatcagacaggtacacttgctgttcagcaatattctatcttctgcagcctctgctgctgatacccaggcaaacggggtctgaagtggacctcaagcaatctctaacagacctacagctgagggtcctgactgttagaaggaaaactaacaaacaagaaggacacccacaccaaaaccccatcagtacatcaccataatcaaagaccagaggcagataaaaccacaaagatggggaaaaagcaggacagaaaagctggaaattcaaaaaatcagagcacatctccccctccaaaggaacacagctcattgccagcaatggatcaaagctggatggagaatgactttgatgagttgagagaagaaggcttcagtccatcaaacttctcaaggctaaaggaggaattacgtacccagcacaaagaaactaaaagtcttgaaaaaagtatggaagaatggatatctagaataatcaatgcagagaaggccataaacaaactgacagagataaaaaccatgacacgagaaatacgtgacaaacgcacaagcttcagtaactgactcgattaactggaagaaagagtatcagcgattgaagaccaaatgaatgaaatgaagcgagaagagaaacctaaaaaaaaaaaaaaaaaaaaaaaaaaaaaa

SEQ ID NO: 6062 - DNA, 728 bp, Macaca Fascicularis
  misc_feature (1)...(728): n = A,T,C or G
cagttcctgcatagaggannnagatagaagccaccnnnnnncttttggcattttnnnnnnnnnnnnnagtccttgcctcctggtaaagccagacttgggtttaggctttcagcctccttcctcctttcctggccctgtttctccagacgcccccttagctctttctgtccctgtcttttggccagaaactgagcctgaacaggatccactgggagcccctctaggactgatctgtcacgctgtgctcccctcccccagttcggccgtcttttcactctagccggccccttgccttccctgggtggccctgcttggcttcccactgactcctcagcccccgcctcaggaggccagcagcacagcccctgacgtgcttctggttctgtcccctgccctggactcagtcaaccccagtcctgcattcctgttccttcttctaaccagacggcatttgctcctgaccatgacacccaagttcccccacagggaccacacccaccgtgctttggcttcctcatctccaaaatggggcccccggcctctcccagtgggccgtgatgctcgcacacactgtctgccatccagcagggcttggcaccctggctggcagccctgagcacctgcgtaggtgaggggggcagctggccaggacggctgtggttcattccttggatctgaggccaggagtcactggatccttgagacagttatcttacaggatgtgtcgc

SEQ ID NO: 6063 - DNA, 762 bp, Macaca Fascicularis
  misc_feature (1)...(762): n = A,T,C or G
atacaggcatgcacaaccatgcccagnnaatttnngtacttttagtggagatannnnnnnnnnnnnnnnnnnnnnnnnnnnnnnnnnnnnnnnnnnnnnnnnnnnnnnttatttccctgggtagcttaatataagtcataagtaactgattgtggtcagaagtgtggatgtaattatttctagggaaccccatgnnnnnnnnnnnnnnnnnnnnnnnnnnnnnnnnnnnnnnnnnnnnnnnnnnnnnnnnnntgatcctcttggtatacgagtgacctgtgagcagagaccatgcctggcccatctatgtagttagcaaggcaggtattctgcatcttggagnnnnnnnnnnnnnnnnnnnnnnnnnnnnnactgaggcaaaggaattggctcaagcattagggaggggcatctccggaggacaaggcaggtatggaaggagatcttataatagtagccaaacatannnnnnnnnnnnnnnnnnnnnnnngagtagaaatgtcgggtatcctcaaccatagttccacacaactcagggatgtggaagggaaccatagagaaaagaaaccccatctatgttttctaaatatatccctccctaccctttttcctttgagaaagttttgaagttattatatatttaacattagtgtatctcaacatattacttgaaaagagataaactgcatgacaaaatgactcatttttaaatttctatgatttctatagttatgtaatatttatataatgcttagtagtgcc

SEQ ID NO: 6064 - DNA, 749 bp, Macaca Fascicularis
  misc_feature (1)...(749): n = A,T,C or G
atgtgagatgcggctgagttcnnnaataccatcgctagggaaagggagcaggaatgttggcataaaccttgtccatccctttgtttctgtagctaatgtagaagatgcatcaacctcagtttgtggctcacaagatgaggcatttaaggtatttgatctaaacggtttcttgacacctaagcctagtccaggcttagcaaaaaaggagacccattctcctttttccctttgtcttccattccttttcaagttcccatgtttgtgagggagaaatgtgacaaaccaaaagaaatacgttatttctttgtaataagccaaaagaaactcaagtctttctgctggtggccagcaggaggcagagtgatttctttcctcatgatgtcccaatctgcattgctggaaacctgctactgaaagaagttaaaagctgcctgtgaatgtaatgtacaaaagaaaggttaccaaaggagaaacaaactccggcaggtacgnnnnnnnnnnnnnnnnnnnnnnnnnnnnnnnnnnnnnnnnnnnnnnnnnnnnnnnnnnnnnnnnnnnnnnnnnnnnnnnnnnnnnnnnnnnnnnnnnnnnnnnnnnnnnnnnnnnnnnnnnnnnnnnnnnnnnnnnnnnnnnnnnnnnnnnnnnnnnnnnnnnnnnnnnnnnnnnnnnnnnnnnnnnnnnnnnnnnnnnnnnnnnnnnnnnnnnnnnnnnnnnnnnnnnnnnnnnnnnnnnnnnnnnnnnnnntagag

SEQ ID NO: 6065 - DNA, 2153 bp, Macaca Fascicularis
attgcttagttaaaagtgtgttaattgaaaggagcttctggtcaaggataagaccgaggaagtctaaaagaccttttgggaaactgaaaatttccctctggcattttactttgcataccgccttgtgatttttagggaacatggctttctctggttaccggggctaaaattagatgttcttttagtttggttctgtcatgtgaccacctgcctgacaatgccttttttttccccccacaagcatagattactcagtatgttctctttaggctcacttaacatgagaacctttagcttctgaaaaatctgcaatgctactctgaggttgacattgaaaagtaagcacttctcctaatattagcattgaaaagtaaggatttcttatagtaagagaaatggccccagatcaaatctgttgttttatttcatcctggtgtttttcttctacggaatcttcttaccaagctctgtgtggcttggttttctaataatttcagcctatttcagaaagatgatgatgatgcaaacaagaagtaatgcaaaattagcctacaatgttgcatccacagaagtagatttccgctttgcattaggactccgttattcacaccgttaaagaccagttagcagattaatgcattatccctctatgcttcaagcccatacttaatttgtttaggtcattaccaacttctttataactggcacttccctttgggtcttataacatcctcaagcagtaccatttaactcatcaattcttagtcttttttttttcttccaaattcaattgtacttttatctgtattgcatttaactcagctttagtatggccgttcaacaagaatgtttttgtaataataaattgaattgggtttagtacaccctgaaaaattgccacaaagtattcccaaaggattgccttacttggcagggttgtaatgcagaaggatttttaaaaattgataatagatgttgaaattattactctttatagcattgtttttcaatacaacacatcaatttttgaaatatgttatttctgtcagtgtttaatacaaaaactcacccattcccactggtgtaaaaggtacaccggtgactgatgtcctaatacaaagtagcactgatatctcaggtgagtgttccaaagataatatctggggaaccacaggctacttgtttttgacttatgagtcaaggagtcaaggcttcattcagaacgtttttattttgacacgagatcataccactgcactccaacctggtgacagagcaagactccatctcaaaaataaataaataaataaataaataaaataatacagacagacacatgataagccaaactgttcctgcaaacatagctacgcttcatgaagatgtaatgaggcttacaagaagtaactttaggtaggagctgtttttgtttgaagcactgcagaattatactgtaacttcccctcaccccagttgcaattgtgtcatagtcatctgtatatcaaactattttattcccataactccactggcttggatgcctaagtgtatgatgcttgaagcctcagaaaagaaataagcatatttcaaaaactgcaaaaggtttttcactgcctgcctcttgcggaactgggttacaccctggcactgttctgatccaagcatatttgcttggggaactaagtgctgactagtttgttttctatgtcaagaggcaatattaaaaaacaatttgcaagaaaatgtgtttcaagagagcaacctaagctaagtcactctgcaatatttcttgaaaataacgaccttgtcttgtatcagtggaagatgtaaattgcttagaaagggaaaagtcaaatcgttccagaactgctaaaaatcattttaaaaaccgtgatttagtttggaattatgattgtagtctgttgaatagtatttaccatggcatttcatacccatggtattttataccttctgactatcaattttagtattattagatgtttgtgtaaccacttgcttatttaaatgaattttgagtactgcctaattgtcagttatatgaataaattacatgtcattctactgtaaaaaaaaaaaaaaaaaaaaaaaaaaaaaaaaaaaaaaaaaaaaaaaaaaaaaaaaaaaaaaggccc

SEQ ID NO: 6066 - DNA, 799 bp, Macaca Fascicularis
  misc_feature (1)...(799): n = A,T,C or G
atagctannnnnnnnntcagcagatagaattatgctgtttaaattcaatagtgtaacttgaagacatagtgttttattataccaaaaatattatattaaccttatttaacttagttttatccaaatcatgttaacttaaaaaacatttgatcagttcctatatttctaggagtttggtgaatatttatttataaatgcttatttttttccaagccaagttagaatggagcatctttaaaggattttataaatgaattttgcaatgctatcctgagttaataaaatatcacatatacataacacacattaatagacatacaaacacaaatagagatttcatagctttcatcctgaaatttcagccatgaatcaggcataaatattctgatggttaattttagacatctacttgattggattaagagacacacatagctggtaaaacacaatttctgggcatatgtgtgagggtgtttccgcaagacactgaggtaaccctgacccaatgtagatgggcacagatatggtttggctgtgtccccactcagatctcatcttgaattgtagttcctataattcctacatgttgtgggtgggacccagtgggaggtgattgaatcatggtggtggttactgagatgctgttctcatgatagtgagtgagttctcatgatctgatgtttttataaggagcttttcccgtttggctcagcacttctccttgttgctgccatgtgaagaaggacgtctttgcttccccttccaccatgattgtgaggcccctccagccatgtggaac

SEQ ID NO: 6067 - DNA, 686 bp, Macaca Fascicularis
  misc_feature (1)...(686): n = A,T,C or G
cacannnnccattcccatccctggatatatnnnnnnnnnnnnnnnnnngggttcagtgtgcttggagtcaggagtgccaagttcccaagagcagcgtaaaatatccctgtaccccttgacagttttaagcatttctgcattaaacttgaagattccagagattccccaccacctaatgatctaagaatgcagattggattcttcgatgttcaaatttctcatctacttatgaaaatccctaattatatagttttatataacgagtatacagagtaggattgttgattaaattgagcggttggaacaccctcatggggcactggcaacatggaatgtagagagctgatgtcttccccctcatagaggccattggcttcctttgtatgaggagagggagaagtgattcgggaaggagaagttggtatgtacagcgtcaatgctgcccctcgggctacccagcaagaggattctgcgtcaaggaactggacgagccgctacccaaacagccaccatctttactctttacaaaatggacccatcgagaatgttgaaaagcttggnnnnnnnnnnnnnnnnnnnnaaaaaattattttgcattcagcatggactcgaccaggcatctatggagattatttttttgcttcattttataaagttgtatttagaaaagtcttaagtattgtgct

SEQ ID NO: 6068 - DNA, 159 bp, Macaca Fascicularis
ttaattaacaccaaccaccaaactttttataaaaatagccatagcaatcatcctatgagcaggcacagtagtagtaggagttcgttttaaaaccaaaaaatacttagtacacctcctaccacaaggcacaaccacaaccctcatcatcatgttagtagc

SEQ ID NO: 6069 - DNA, 1886 bp, Macaca Fascicularis
tgtcagacgcctaccacgtgaagaggtacagccgggcgcagttcggggagagactcgtcagagagctgctgggcttggaggacgcctctccgacccactgatgctgggggtgcaggactcggtcaggggaggggtgaggggggaggagagcctgccattccaacttgcccatcagagacccggagatggcctggtgtatggtttgctgcctgggagggatgcacggggcctctggagggacaggacggatctgatcagaggacggttgctgtccttatttgcattccaagaagagcacgtcctccctcgggaaacagtgccgccagcgtggtgagcacctacacccaagttctcaagggcagattctctcctgatatccgtggagcttgggaggcaacgtggactgtgactgcaaaggaaggccctgtggtggaatgagctggagcatgctctaagagaggcgtctgcttcctaaagatctgcagtcgtcggggacgtggttcaagttcgtgacttgaaggaagcaaagacgccctgcttggttacagtggcttgggtgtcgggggaggccggggagttttccagcactggcctcatgtgagcacctttgagccggtctcttagaagaagtcacgcatcctgggtatgcagtagtgaaatggggagtgggtgcccattctgaaaaatgaggcattcctgctcattccctctgcttagctggtgggcaggggagaaagggaaacgccaaaaaattggagtgaagggtgatgctattttttatttttaaatatatcttcaggttattttcttactgttgcttcagatctaatgtaaaaggcagatgtcccctcctctccacccccctcaccaaccccggcctcagtcacggctccttgcatgaccacagttctgtgttctggcctgtggcagggccaggaagggccgctggcttccgaacagacgtggttgctctccacgaggcccatggggagcccgcgggccctaagctttgtcgcagatgtcatcattggcagaattacttgtcttgaaaaatatgtagcattgctgaaacacacaaccgaattctctgcgatggccatttgctcattgtctttcctccgtgtgtagtgagtgaccctgtttgccttctcagagtggcccctcagaacaacagggctggcctttgaaaatccccaaaacgggactgtggtgaccaccctggtcaggtgtgatttgacacgagggccggaggtggttgctggccgcaggactggagaggctgcatgcccaacgctggcagcgaggctcgtgtgtccccaggcagatctgggctctttcccaacccaggtttatgcgtctccggggaagcctcggtgccagagtggtgggcggatctgaccgtccccacagaccagaaacaaggaatttctgggattacctggtcccctttcaacccagtttatgtaaccacctcattttttacaaatgcagaatctattctactcaggctttgggactctgttcctcgtcctcactcagttactgcgagtgttgctgtccgcatgctccgggccccacgtggttcctgtgctctagatcacggtgactcccccaccctgtggttggaattcgatgccacggattgcaggccaaattttagattgtgtttccaaacacccttgccgtgccctttaattggattgaaagcacttttaccacatggagaaatatatttttaatttgtgatgcttttctacaaggtccactatttctgagtttaatgtgtttccaacacttaaggagactctaatgaaagccgatgagttttcttttctgtccaaacaagtaaaataaaaataaaagtctatttaaaaaaaaaaaaaaaa

SEQ ID NO: 6070 - DNA, 711 bp, Macaca Fascicularis
  misc_feature (1)...(711): n = A,T,C or G
aaaaaggtagagctgctgccatgttnttagttgattcatcatctagtctatatcacccaaaagaattagaaataggcattcaaacaaaaacctgtatacaaatattcattgaagcactacttacaaaagccaaaaggtagaaacaaccaaatgtctatcagctgatgaatggataagtaaaatacatccatataatgggatattccgccatgaaaataaatgaggcactgatacatactgaataaatataagtgaaccctaaaaacatgctaagtggaagaagccagccacatgattccatttataccccaaacaggcaaatccatagtgacaaagccaattagtagttatcaggaactagggagacaggtgaagagggagtgaccgcttaatgcgcatggggattccttttaggattatgaaaattggatgaattacggctgatctgatggcagtgggttatcagaacttattaacatgagtgtcattaaagttggtatatagcccctcactgctaaatctggcttaaaaatttttttaattttgatgaattagtggtgatggttgcacaacattgtaaatatactataataaatgtcactgaattgtacactttaaggtggttaaaatggcaaattttccatgtcttactgaaactaagtactgtactatgtaatacaaagtacatagtataaaattttaaaagtgata

SEQ ID NO: 6071 - DNA, 1820 bp, Macaca Fascicularis
atattccatatttataaaatgattaaataaattttttatatcaaatatgatgcttgtcatacagatttcagtccatataaaatataggatgtttaaatattcttcttcataaaagcatctttgaaaggaagcatcttatttcaagagtatccagaggactttgcaatggaagcaatgggatgccttaagttaaattttaaagtgacttatgatgccatgactcaatgtagcactaaagaaaaatactaaaaatgtttggagataagtacatttgtttgttaaattcaattgagacagtagaaggactctggaaatattggaaaactagatgatataccatgaagaaggaagttaacaatgtaatatttgatggacaggcaactgcttaagggaataactaatctctgaagattttgtgtgttcctaaaacatttatagaggaataaattctgtagtgagatatttacccaaactacaacagttatttatttctttttaaccttgtttttaaaaagcactttctcctaattcttctcctttactcgtaaaggtgaactgatttggggtttgtagtgcagacagatttaaagatttatgagtaggtaagatttcttgcatctagtagattaatgacttttaaaatagaggtatcacttatttatgttttcttgaaaattcccaattaatgatacttaataggcattgcatgtatattttcgtaagatgattaaacttttttcttaatttctatatatgtgtgtagattatacatatgttctgtgtatcacatgtagattaagagtatttcatccctgtaactatgtagttatagctcttgtcagcaataatggaatataccactgataaaatattgttccccaaagaaatactcagttctgcaaaagggtaatgttctatttttccattatgaagacacttaggaaaatgttttaaaacgttataatgtgtactagacttctgtaactccttttgcccttcgtcactcatcaaaactctattttcctgaagctaattttggctaggtactagaagatgatctgattagaacaattcagatttaggggtgaagtttgtttgaatttttaaaaggagcctatcataacaaacatgttttcaattaatagaacgtgaaaaacctttagtgtgcccttccttgtctcccgtaccacacatatagatacattagtcaacactttgaagtacctcccctggaaacaatgtctcatagtgacattgttttagaaaaaaaaaaattaattttatcacaacattgagtataaaaatgggtgaatgtcatgaattgggttaaatacatgtgttgtacatgttttcattggtaaccatatttgtctatctagttacaagtcactaactgtggtaaaaatctaccaccaatgaagaaatttagaattgagtgatatgtagtgtcaaccaaaattggaaatacttgtggctcatcccagcactttaatcacagcctaggcaggagaatggcttgggcccaggagttcgggtccagcctgggcaacatgatgagaccacgtttctacaaaaaaataaaatcagccaggcttaatggtgcacacctgtggtcccagctacttgggaggctgagggaggaggattgcttgagcccgggaatttgaggctgaagtgagctatgttaatgccactgcactctagcctgggcgaccgagtgagaccctgtctcaaaacaaaacatcaaacaaaaagcaaacaaacaacaacaacaacaaaaaaccccaaaacaacaaccaaaaaaaaaaaaaaaaaaaaaa

SEQ ID NO: 6072 - DNA, 880 bp, Macaca Fascicularis
tccgaaacaacaggtgagacttccccttggagacttgcccatgctttctaaagtggctctcccaaacctacctttgtcctaacttagttgtctgtgattctcaatacagtaaagataagcctctttgaatatggaggccgctgcggacggcccggccgagacccgaagccgggtggaaaaagacagccggcgggcaaaaaaagacagcccggcgaagacccaaagcccagcccaagacacctcaatcatgttgaggaataacgcagatacaggcaaagttcctgccttaccagagcacaagaagaagcgcaagggatacttgccagcagagtccgttaagatcctccgtgactggatgtataagcatcggtttagggcctacccttcagaagcggagaagcgaatgctgtcaaagaagaccaatttgtctttgtcgcagatttctaactggttcatcaatgctcgcagacgcattctcccggatatgctgcaacggcgtggaaacgaccccattgttggccacaaaacgggcaaagatgcccatgccacccacctgcggagcaccgatgcgtctgtgccggccaagtcagggccccgtggttcagacaatgtacaaagcctgcccctgcggtcctcgccaaaaggccagatgtcaggagagaagataccagagccggggtcggcccctagccagaagctcaccgtgatagcccaaccaaagaaaaaggtcaaggtttctaacatcacgtccttgtcttctccagaacgtgtgtcaacagaggagtacgccgacttcagcagcttccagctgctagtcgatgcagcggtacaaagggctgccgagctggagctagagaagaagcaagagtctaatccatga

SEQ ID NO: 6073 - DNA, 728 bp, Macaca Fascicularis
  misc_feature (1)...(728): n = A,T,C or G
agccctttgagcnnnnnnnnnngcatcatacgtgtttagtatatggacatctaactgaaattattaatatggcaatttatgcgtgcctgttttggaaatactctattttaatggaaagaattatgtagaaatactggatacatttttaaaaacatccataattcaccatcttgacataactagtatgttcatttttgtgattagagttcaatatttnnnnnnnnnnnnnnnnnnnnnnnnntattattttgtattcttctcttttcacttaaaatcatataacctagtacgttttactcatttcatggtatgcttttatatcatttctctcttagaaattgaatttgtaaaaattaattaaaaaatnnnnnnnnnnncatattctgtatgaagaataaattattcttcagatataagtagaaaagtgatgttaaaacagtaatctaatcaataataatgtttttgatccaatgttgactgaagtgtttatattttggttaatttctaaaagtnnnnnnnnnnnnnnntgttatttggagaagtttctgctatgtttagaaccaaactatgttatgatttcacactttgaagcttgataggaaatattgttaaggaaataaaaaagaaaaacaaatgatccaaagcaaaggaaatgatagaccttttgtgttatgaaaaattaactcactgttcttgttgatactattatgtcaagttagttatctcac

SEQ ID NO: 6074 - DNA, 959 bp, Macaca Fascicularis
  misc_feature (1)...(959): n = A,T,C or G
gcgggcgccnnnnttnnnntgnntgtaacatagaccccgggtactgggggaggggagggctggggaggatggggaatgttatataaatatagatataattttattttcggagctaagatggtgttatttaatggtggtgacgggtgagcgctctggcccaggctgggccagactcccgtctaagcatgaacaggacttggccatctttccgacccctggggaagacatttgcaactgacttggggaggacacagcttccagcccagcctctccttcgggccagccccccctgcgagcctccaccagccaccagcgggaggagggagggtgcgctgtgggattgtttttgccataagcgaactttgtgcctgtcctacaagtgaaaattgttcagtccaagaaaatgatgttatttgatttatttaaaggctaaaatttgtttttttaaaattctttgcacaattgtttcattgtttgacacttaatgctctcgtcatttgcataagacagtagcattctgaccacacttgtacgctgtaacctcatctacttctgatgtttttaaaaaatgacttttaacaaggagagggaaaagaaatccactaaatgttgctttgttttcttgaagaaagtggcaacacggtattgtgattttatttgtgcaggtcatgcacacagttttgataaagggcagtaacaagtattggggcctatatatattttttttcacaaggcattctctaaagctatgtgaaattttctctgcatctctgtacagagaatacacctgcccctgtatatcctttcttcccctcccctccttcccagtggtacttctactaaattgttgtcttgttttttattttttaaataaactgacaaatgacaaaatggtgagcttatgatgtttacataaaagttctataagctgtgtatacagttttttaagtaaaataacc

SEQ ID NO: 6075 - DNA, 734 bp, Macaca Fascicularis
  misc_feature (1)...(734): n = A,T,C or G
gcgnnnnntgcgggaccacancnngaaggaggtcgctttctacaaccgtctgttctccgtcccttctgttttcacaccagccgtggacaccaaggcccctgaaaaggccagcatccaccggctgatggaggccttcatcctcaggctgcagacccagttcccctccactgtcagcactgtgtacaggacaagtgagaagctagtgaaggcccccagggacggccctgctgccggcgactccagcccctgctgcctcctctgcatgtgtgccctggatgtcgatgcggctgacagtgccacggcttttgnnnnnnnnnnnncacgtctctcccagatgcagtcgcccacccccctgacagagacccagacacccccggggccctgctgttctccaggggtgggccgggtccagggctgtggccagggggcctgcaggagggaggacccccaagcctgcatcgaggagcagctgtgctatagcnnnnnnnnnnnnnnnnnngacttgccctcactggaccccctgccgccgtacatcctggccgaggcccagctccgcacacagagggcctgggtnnnnnnnnnnatccgggactgtctgattgaggacagtgacgatgaggcaggccagagctgagcctgaggaggtgcttgacgagacagcaggtggtggccgcctggtgcagggcccagcacactggagctggaaggcaaggacgggggactggcctccgatg

SEQ ID NO: 6076 - DNA, 3441 bp, Macaca Fascicularis
aattctctctaagaaaagaactggaagctttcttggtttcagtaggggcaacaacagtccacttctcagacaaacaatggctttgtgactttggcttcttggtagacattatggaacaccttcgagaactcagtgaagaattaggagttagtaaagtctttgctgctgctgcctttgaccatatttgtactttcgaagttaagctgaatttatttcaaagacatattgaggaaaaaaatctaacagactttcctgccctcagagaagttgttgatgagctaaaacagcaaaataaggaagatcaaaaaatatttgatcctgataggtatcaaatggtgatctgtcgtctacaaaaagaatttgagaggcattttaaggacctcaggttcattaaaaaggacttagaacttttttcaaatccatttaactttaaacctgaatatgcacctatttcagtgagggtggagctgacaaaacttcaggcaaacactaatctttggaatgaatacagagtcaaagacttggggcagttttatgctggattgtctgctgaatcttacccaattatcaaaggggttgcctgtaaggtcgcatccttgtttgatagtaaccaaatctgcgaaaaggctttttcatatttgacacgaaaccaacacactttgagtcagccgttgacagatgagcatctccaagccctgtttcgggttgccacaactgaaatggagccgggttgggatgatcttgtgagagaaagaaatgaatctaatccataagactttgtagtacaagattgaaaaactcaacaagaatttaattctaaaagcaaaaatcggtttgagttttcaagtttactaatttggattgtgagaaagtaccaagtaccagccgtccaaactgatcacaattaaaattctgacagttgcctttttttttcatctcaaatggcagcatgggactgaaacatgagaatgccaccttttttaaaacttagtttaatgacaaagtcgttgtcttttatgatatagttaattttaaagagatttagtattaatgtgagttgaatttgcggtctgttttttaggtgttctgaagatatatgccaaaaatttcagctcttgttttaatggagtgttaaaattctgattcatatagtcttaaattatcaactcgttaaatgtgcttttgaaccaatttgcagaaactcacatagcaagttcataagtttccgaaaaggaagatgatacatatagtggaggtgttttgtaactatcaaaatgtttgagactcttttttaaacatttctgagtccgaaggtaatactgacaaatttcttcccttttccctccccatcacccacctcagtgataccgacattactgatagaggaagtcattagaatcatttttaagttgctgatataggagatttcctgcaatttggagataagactaattattgggggttttccttggatttttttttataactaggggctattttatcagcttgcctattaaaggactatggtaagtatagaatcttaatggttgccagttagtaattttttttttttttactgtagacacaagttcggccctatcaaaaaggatgaggaaaaaagatttttgcactccgggattaggaggtgtgagatgttttagcttttttgtcttacctgcgtggatgttgctgctgtatttaaaaaaatcctgcttaaagtaaacactttgttttaaaatgatacagtatcagatttttttagatgctagaaatggattctaaaatttggaactgtggaacacgttctatatttaagatagcacacaagtagaaatatttaaaagcagtcttattcacagatttcaataattctgtatttccattaagataatctgctttgtgccaaaacggtaatttctaaacctctgttaaccgtgaaaaggcaatcttaaagtttgctatgtaaaactaattataaacaggatccaacttatattcatagatcttctcaagtattatacagtttaaaaattattgttccaaagtcctgtcttaactattgaaacaccttccagcaaattcaaggaaccaggctacaactaagaatttagatggaattgatgtctgggcaattaaaataaatgccataagagcctgaaaaccaaagttgtgccagtggctttcaaatagaggcagtaacctgtccttccagaggatgctgagaaatgtgtaggggcacttttttggttgtcatatttactcggggcttctgttggcatttaaggctaaagacactcatgcccttcagtgcatgggacagcctggcacaatgaagaattatccctcccaaaatgtagattatttcaagggatagagcactttaccattagaagcaaaattaaaagtgcaaggtggacaaactgacagaatacataggagagactaattccaaccttctaaatttggctggtaaagtacaataaaggcattgataagttctgttagctcacagtagcacctgtaaattgggaattaataattgaatcagatttaagggctctgtcctgttacacatatttaaggcagaaaaaaattgtatatcgattaggtacttatcaagaatgatcaagctgagattttggttaatagagtaagcttacatatctagaaaaacaacatagtgggaaaacggaaaaaaaaaaaaaaaatctgcaggtaatttcccacggcagagctttattacctgagagaaagattggaagacctgaaagccacttccgctttctaacaccagttctttaaatattgaaatcttgtacattttgtgaaattctactatgttttgcttaaggtgttaataagattagtttgtatcgtatagtcattgagtgagggggagatataagccaaggattttaaattgacccttagctatagagaatttgctataagctagtcttgtttgtagaaaaaaaaaaagtgtattttcgtgttttctgtattaagtaattctgtaactgcatggcagttttttttttgtttttgtttttataaatacagttgttactggtcctgttgtagcagtgaatatagttaaaataagtaccttttaaaaaaaacgataatcggccaggcgcggtggctcacgcctgtaatcccagcattttgggaggccgaggtggggggatcacaaggtcaggggttcgagaccagcctgaccaacatggtgaaaccccatctctactgaaaatacaaaaaaaaaaaaaaattagctgggcgtggtggtgtgcgcctgtaatcccagctactcaggaggctgaggcaggagaatcgcttgaacccgggaggtggaagttacagtgagccaagattatgccactgcacttcagcctgggggacagagcaagactccgtctcaaaaaaaaaaaaaaaaaaaaaaaa

SEQ ID NO: 6077 - DNA, 742 bp, Macaca Fascicularis
  misc_feature (1)...(742): n = A,T,C or G
caggggtggcccatgtgaggtgtcatcccgtcccnnncataattactaaatannnnnnnnnnnnnnngcctttactgggcttttacnnnnnngtgnnnnnnnnnnnnnnnnnnnnnnnnnnnnnnnnnnnnnnnnnnnnnnnnnntttggctaaggactgatccacttccatgttacttacatctgtgggtttttgttgnnnnnnnnnnnnnnnnnnnnnnnnnnnnnnnnnnnnnnnnnnnnnnnnnagcactcgtgtccatgcatgtacttcagtgtttccctccgtcctttctgatatgaccaaaaatccagttgttctttgtccccctcacnnnnnnnngctaaccacttgtttttcnnnnnnnnnnnnnnnnnnnnnnnnnntttgnnnnnnnnnnnncaggaatattctattggaaaagataannnnnnnnnnnnnnnnnnnnnnnccccttcctcaatgtttctagccttcactctccattgtcttttccgggctgtattacaccccctgtggnnnnnnnnnnnnnnnnnnnnnnnnnnnnnnnnnnnnnnnnnnnnnnnnnnnnnnnnnnnnnnnnnnnnnnnggccatggatcacacctgtaaggtactaattattgcccagcctggggagatcaggagannnnnnnnnnnnnttagtaagttgggtttagcttttgtgtgtgcatcagtgactnagagttctgnnnnnnnnnnnnntaanngcatgaagcac

SEQ ID NO: 6078 - DNA, 724 bp, Macaca Fascicularis
  misc_feature (1)...(724): n = A,T,C or G
cacatgacagttttctctaaatgggcaaaatgagatgttcntgaactccactcacagtgagcttccaggcacattcaggacaacccctgttatacatgatgttaggttatacagatacaaagatataggtcatggcttcaagaatctctccattgaagtagaatggcagtgttgaggttaggaagaaagaaaggaaagaataagtagacaaatactcacataacactacatactctgtggtatagttatgcctatatatgaaatagaaataaatatagatgcaatgaaatataaatggtttgggaatagagaaaacaaaaatagctcagagcagtctgaactatgtgaggtatacaggctcagagaacatgagtgtgggactttcagtcacagccccctacctctacccatgcctgaggacggttgtctaaattcatttgttcctgacttgcagcctcacctgttatcttcatgttcctggaatttgtgatgcaaagaacaatgtatgaccattcaaaagcttatgttatttcaaatccttgataaacaacttaggaactgcctcttctttacatttaaaaactcactagtacttgctgctaattggagcacatatccagggcaacttgaatctgtgctccccaggttgcagtccttaaacttggcccaaataaactctctacttatatatttagtttgcctcagattttttctttaagtcaac

SEQ ID NO: 6079 - DNA, 722 bp, Macaca Fascicularis
  misc_feature (1)...(722): n = A,T,C or G
gtttttatataaattatgntttagagtagaacataaatgacnnngagttaggataaggatgataggatgggtgctggagatgccctgctttgcttatttgtttctgtgggggatttaatactataaatgaaaatggcttctgctctattaaaaagtaaaaattgtcctccaaatataaaactccttaatagatatttttgaaattagaatctttaaattttataaatcagctgttgccactacacaactatgatggcatgtgcttataacatttttataacattccgtctgtgtctattccctaaatatcatgagtttattataaggaaagtgataaaaatacagtaatgaaataaaaatctgaatgtttctaggaaaggttttggaaggaaaaatgacctgaaatcagtgcgtactgcgaagtacagcgaatattttttgttctttgtcttcaccctcacccnnnnnnnnnnnnnnnccaaaaaatagtttgatacttaaaaaaaagaagtaaatacttttctcaatattgttttggctatgcaaatatttgttttgcttaatgtcctccatttacacttgtcagcaaatgtagttgcaaacaaatgctttctttttatttttcctttggtttggggtatgtaaatagcctaaagtgtacattgaatttcacattgtaaaagttttattttatccactgtgtatgatacaacttttacaat

SEQ ID NO: 6080 - DNA, 1195 bp, Macaca Fascicularis
  misc_feature (1)...(1195): n = A,T,C or G
agctcacagatgcaaatggagagcgccacgatgccctnnacgtggtcnggncactggatgaagccatggagctgcggggcatgcggtaccacccgatcgacattgagacctcggtcatcagagcccataaaagcgttacggaatgtgctgtgtttacctggacaaacttgttggtggttgtggttgagctggatgggtcagagcaagaagccttggacctggttcccttggtgnnnnnnnnnnnnnnnnnnnnnnnnnacctgatcgtcggagtggtggtcgtgnnnnnnnnnnnnnnnnnnnnnnnnnnnnnnnnnnnnnagaagcagcgcatgcacctgcgagacgggtttttggcagaccagctagaccccatctatgtggccnnnnnnnnnnnnnnnnnnnnnnnnnnttccatggacttttctagagatgtagacattgttctccgtgtccactgaagcgtgcagacacagggcaacactcaccagaatgcagccttttgtggtgagagtggaggaggaagaggaggaggaagaggacttctcacagcagccacgatcggcgtgggggtgaaatgtgaatttannnnnnnnnnnnnnnnngaaggactttggannnnnnnnnnnnnnnnnnnnnnnnnncccatttcaaaaactttcttttcttttctttcttttttaattattggataataagtgctttcttcgtaaatgtggtattttgttaagccgaaatagcaattaaannnnnnnnnnnnnnnnnnnntgggttcttttaaacaatttatgtagtgtgacaaagaattgttttctctgttttaatgtgtcatgaaatcttaatgacatggatctgttactaatttaagccattgctagatctcatccttttagggaagtttgaggtacgagaaaaccttccaaatagcaccttccaattagattatagcagctttctttgtcagnnnnnnnnnnnnnnnnnnnnnnnnnnnnnnnnnnnnnnnnnnttagtatagaatgagaagaaattataaataaggctgtatttcggcaattatcttgcaaatatctttgtactaaactaaaaagataaaataagttaacttcctcaatatgtaattatgtacaaaacgtttaatttattttgatctctttagaactataaaagagaaaaaccnnnnnnnnnnaagaaagca

SEQ ID NO: 6081 - DNA, 708 bp, Macaca Fascicularis
gacgcggccggtgtagtgtgggactgagccacggccgccgggcgcccagtcccgacctagccaagagcagccagcttgagcctggtagagagggcatgatgccggggatcgctggcccctgggaacactgcgccctgacccaaagacccttcctgaactagagtggcaaccccagcggaaagggagaccgaggcgtcgggaggctgtgtagggtctcgattccagtacctgtaggtaccgtggttctcatcccttggccgaatctttcttcctctggacaaagggtccagtcgggaaaccttcctgaaaggcggcgcgccagcccgggcacagaaggcttgctcgccgcctgctgacttccttactttgcacacggaagggacaggaaccgcgagcgtgcaactagcctggagctacctgtctggactcgcaggccctgtggctgtttccccactgctgccaccacctctcttgctccttgacaccgaggaggaccccactaggatctcagcgtcgtgaactcacctgaactttggaaggttggcactccggggccgcatccccctggggaaatgaccgaacgcggggtttcagtgggtcccgcccgggtctaaggaccctgtgttccttctgtgggcacgggcagtgggaggccagtggaaaggcgcaggggcccacctacgcgtctcacatcttcaggggccgcat

SEQ ID NO: 6082 - DNA, 1854 bp, Macaca Fascicularis
aggaaatggaagagcctccgcaagaggctctggctgaacccttggaacatgaaagcccagccgcttcctcaagtgctggccacactaatggccaggaagacgacgaccagaagaaccaggccgaaaggaaggcagataaccacactgctcacagaatagccgaccagactgccctaagagtgcctagccaggctaagttcaacttatttagccaaactaccaatggagtagctgaacaaaatgggcgtagtacacctggtcaggctggccacagagcatccgaccctgctaatgtttctgaccttagagcagatgatcaggttgaccaaacaccatctgaacaaactgaaggcaaggcatctagccaagctaataatgtacagtatgaacagagtgatggtcaggtgtctggcctgaccgaggaaagaactgctgaacagattgaacgaagattatctagccaggctgagagagtaactgctgggcagattgatggtagactgtctatgccatctgaccagagaggttccagacagactgaccacagaatgtcaggccaggctgagagaagaacttccgagcatattggtgatagattatctacacagtctaaccgaagagcttctgaacagactgaccgcaaaatggcaggccagtcccagagaagagcttccgagcagatggaccgtagactatctgacacggctgagggaataacttctgagcagattacatacacattatccagactatctgagaaaagaccttctgtgcagattgacagtgggtcatccgtaccatctgaccaaagtccttctgtgcagattgacagtgggtcatccgtaccatctgaccgaagtccttctgtgcagattgacagtgggtcatccgtaccatctgaccgaagtccttctgtgcagattgacagtgggtcatccgtaccatctgaccgaagtctttctgtgcagattgacagtgggtcatccgtaccatctgaccgaagtccttctgtacagattgacagtggatcatccataccatctgaccaaagaccttcagtacagattgaccgcagaatgtcaggcaaagttagaacttctgtgaaaactgactacagattggctagcctggttgaccaaggaacttctgagcagattgacctcagatcgcatggcctcgttgaccacaaaacatctgtaaagactcaccaccaagtgtatggcaaagccactgaactagctgaacaccagactattgaccaagctcatagtaatgctgatcaacctccagttgacaaggctgactacagtgaatctgaccagattgaccacttagcagacagacaagctaatcacaaagaccaactgtcttactatgaaagacatggccagtctgaagacaggatatttccccagttaggcaatagcaagaaggacaaagaggctgactacagagtacaaccctgcaaatttgaggacagccaagtagacctcaattccaagctttcagttgaaatggaaactcaaaatgcaaccactaccccagcctaccacccagttgatgccagattcaccagtaatttccaagcaaaagaccaagcccttttcccaagactcccctccatctcatccaaattgaaccatattagtagtcaagaaaaaactcaagccgtagtaaccaaatctgtgcaggaaatgatgaaaaacagagacaaaatgtgaaatctacaaagaacgagcctctcttcagcattgtttacaatcatgtgtcaatactatgttctgttttccatctggaaaaaaaatggttttgaatagacattggtggtgactctaaaaaaaaaaaaaaaaaaaa

SEQ ID NO: 6083 - DNA, 721 bp, Macaca Fascicularis
  misc_feature (1)...(721): n = A,T,C or G
cctttttttttttttttttttttttttttttttttttccaagctgctgttagtgtttattaaaaatgacttatttgagnnnnnnnnnnnnnnnnnnnnnnnnnnnnnnnnnnnnnctcccctgagccctcttaaagtggtaccccaggccnnnnnnnnnnnnnnnnnnnnnnnnnnnnnnnnnnnnnnnnnnnnnnnnnnnnnnnnnnnnnnnnnnnnnnnnnnnnnnnnnnnnnnnnnnnnnnnnnnnnnnnnnnnnnnnnnnnnnnnnnnnnnnnnnnnnnnnnnnnnnnnnnnnnnnnnnnnnnnnnnnnnnnnnnnnnnnnnnnnnnnnnnnnnnnnnnnnnnnnnnnnnnnnnnnnnnnnnnnnnnnnnnnnnnnnnnnnnnnnnnnnnnnnnnnnnnnnnnnnnnnnnnnnnnnnnnnnnncaaaccccaggctgtgtggcaccttactaaaatacaggacttggggcttgggaagcagggaaacggaaaggatgcannnnnnnnnnnnnnnnnnnnaagccgtggcactcctcattggcaatcccaataannnctacttttagccaggccccaagccttctgactgcccttgcaccatcccctacctaggnnnnngcgagccacatcannactcctggcnnntccctgcttccagctacgctcaatatgctatctcctgnnnnnnnnnnnnccccagcanctggcactgccctg

SEQ ID NO: 6084 - DNA, 576 bp, Macaca Fascicularis
tggggacgattcgatgtctaatgacggcttccgtgaatcaacatttcttcctcaaagctacacactgtcaggggttgttgggtttctgaagtttagtttcgcaggctcctacttgtaagtatcagatattatggttctgccaaaaaaaggtcacctctctccctcttcctgtgttggaagatgacctcctccctttaatttgtgtcaaggacttgtttctgaaactttacagcaaatagagtatctgtatgaggtaacgtcgagggtcacttgttaaaagctcctttctgacagttgtttattctggggctagtgagacacataattatggtgttctataccctaactttttgccaaaagaatctataccccttttgtaagtatatagacataaatgttattatatatgaataatagattcacaatgttataaagcatacgatagtacatcagtgtatgtaggaatcacggccgttttcagggcattgcctatcaggtccaggttcatcagggcctgctaggcagcggctgctgggagatgggcctgggatcagccctggcgaggttcaggcagct

SEQ ID NO: 6085 - DNA, 122 bp, Macaca Fascicularis
  misc_feature (1)...(122): n = A,T,C or G
aaccttnnnnnnnnnnnnnnnnnnnntagtgcccagggagtccagcgaatggcatctgtggccaagcgaggtctcaggtacaaagcaaaaggnnnntttaaagtaaaatannntggattcaa

SEQ ID NO: 6086 - DNA, 1805 bp, Macaca Fascicularis
  misc_feature (1)...(1805): n = A,T,C or G
ttttaaattccaaaattagcagaccatgcattaagggttttccacatagtgagaagcaaaatttgatgctccttttcttgctgggtgaagtacagatcctgtggagtgggttgggaagcaaaatgctttttctgttagtttctgcttcagtgagttttctagcaatctattttagtcttcattaacatataaagattgagtttggggttaaaacatagtaggatcatttgtctagcacacacaatggttccacatggggatggaaaggccaaagatttgtggttgtgtgcatttttggtaactgtttgcaaagttggaataagccacctgcctgtgataaaatatgaccctcactcactcttgtaaattgcttttgcccattcacacttagaggtcattaatcttgtttccctttatggatggacattctgcacatttcctacagttgattcagctctagtttagagatgtatacaaaattcaccaagtgcatttggagaaaaatgtcactttgcaaggcttcaagttaaaaagtgctatctttatcttaactacacagaaatacaggcatttgcaaaacaggccgtgaagaggataaaaggaacaagacataaatagccaataaataattacaaattcttacaaataaaagaatttgtaaattgttttatttacaagaaataaagaattctttatttgtaagaatttgtgattcttacaaattacaaataattgatcaaacaggagcgacaggagtatatatcataaagcaaacacaacggaatttaaaatcatgtcataatcagatgaataaatatttgactttccatcatgtgcggggcctctactcgattatgtaaacagaaaataaatacgataattttgacagaatttttcctttcaagataaccctactttgccacatcagagttaggccaatgcttgattaccctaatttcctcttgaaatgatctatatgtaaatgaaaatgttgacaaattattattcagccaatttatactttctattgatatgtctctaatttctgcccttcatgtttaaaattgatgtaaacgactggctcaacatatttataatttagagcttgagactgtgaaaggtatgtctggtagttctttccatttcaggcaagctattaccattcctgtaaacggcgtctcccataatttgccagagtccaggaattaccagtttctaaagggcctcacacagtctcagtgtcttcttccctgaactatagcatattcatacaatgagctcttgctacttattttcatattgattctcattttaaataataaattaaaacacttgccacttaaaaaacatgtggcattacagcttaatggaactaaagtagaaattgctttaaaatgaatttttggagcatattcttatatggtttatctcattttgtagggatgaaggatatcaatgtatccatctgttatttgaaagtatcatggtaggcnnnnnnnnnnnnnnnnnnnnnnnnnnnnnnnnnnnnnnnnnnnnnnnnnnggcgggcggatcatgaggtcaggagattgagaccatcctaactaacacagcaaaatgctgtttctactgaaaatacaagggattggcannnnnnnnnnnnnnnnnnnnnnnnnnnnnnnnnnnnnnnnnnnnnnnnnnnnnnnnnnnnnnnnnnnnnnnnnnnnnnnnnnnnnnnnnnnnnnnnnnnnnnnnnnnnnnnnnnnnnnnnnnnnnnnnnnnnnnnnnnnnnncaaaaaaaaaaaaaaaaaaaaaaaaaaaaaaaa

SEQ ID NO: 6087 - DNA, 732 bp, Macaca Fascicularis
  misc_feature (1)...(732): n = A,T,C or G
gaatgactgcgnnnttggggagcagctgcaagagccccacagcccacacacctatagtcgtcagaaccagagaggcccagggccctgtgcagtgggcagactaacagctggggggctcttcagagccttgcaggatgcgggccaggctgccttgagacctggacccacttatctggtcactgccaggccttcctgtctggcccactgtgggagggaggggactccagacaggatgaggcccacacagtgccagctggactgctgtgggtgtgtcagactactgccttgccttgtgtcccccaaaacctaatttcctgctgctctgggcagtcaaggcagatgccacagttggccaggagcctgccttgttggaggcttgaggtggcacgggggcttccccaggccaggactctgctggagctctggggctggggaccccagacagttgctcggagaggtgattttgggctgccatggcagaggttgccctttctctgtatggcccggcccagtccgggagggagggatgctggagctgctatcttggctcccagggacttggtgtccatgctgtagcacatctgtcactgtgtggacagatgaggatgaggctgccacgtgctgtgccctttcctgatgcagctcgtgatgcgtgagatgctggaatgtatttaactcgcagcgcaggtgtctctgatgttttcttcacccccattccatccccccactcac

SEQ ID NO: 6088 - DNA, 187 bp, Macaca Fascicularis
tattttgacgcattattttaaacaaagctctatgtgttcgaatcttttgaacttgaggggatatattccatccctagatggaattcctttccgagctagacctcatcagacatgataaccaggaggcaggctgcctctgacattcagataaaaggggcttgcctggggtgagggggcagtgagggta

SEQ ID NO: 6089 - DNA, 1850 bp, Macaca Fascicularis
cagctgagtttctagagaattgtgttccttatgtctctgtatcctgcttaacaacaggtggagctcttgtccagtgcaacttaagtgacttcttaaaacttggctaacaaatgccagccccagaagtcactctagtgtgttcagagaaagaaacctgtttttcctgcatatcttatttcctccatttagcatgcttaccagcaaatcagagatagtgttcattgtttaagtgttttaaggctgttgctgaagtgtttcttcttagtccttttccttcagggcagtacaaagaaatccagtccatccacttctcccttccccacctacacaataactagataacaagctgacagcaggtaccacttcatgcttcctttagtcgtagcagagttctgtctttataagtatatgcacatcttcatttctgagcttttctaatcctaggaacagttcattctgattagtaaagtaaagtagatgtgggaagcaggactgtttaaaaaccattgaatcatgatttagtttctcaaaattcagacgtaaaacaaatttgtatatgcattaacatttgtgctgagggagtatatctaaatggagaaagaagataagcaggctacagaaatcttaggaacttagcttgcccactctcactcaacggctgaaaaatatattgtcttttttttttcaccttgtgcttttaatgagaacagagagaagtataatatctaaagctgattggtagctctgtggtgaatgtttaggagctatcaaaattgagagacctcagggaattcagttactggagaagggtaattgtggtaagaataaaaccttaaaagttgttatgaaagctttgctgcctgctcagacttggaatttatacagtactccttgtctggtgccagggagagggcttagcagtcagttctgtcccagctgccgtcatttgattgtgttggtaaggagaccaacaaaaagaagagcatttcaataatctaaacaggaccaaacaaagagactgaacaaaggtgtgtgccacagtgtcagggaggggatggtggaaggagacatggcctggcagcattccgaaggtgggaaatggcaggctgcagtgcagagggagtaaacagccaggacctgtggctttgtagcaaaatcagagtggccagtgatttgttatggtgctgtcagcatatccgttcttattctttgtatacaataattgtgcatttggcaaattgtggcaagaacagagaatgactgttgagaacttttggattgctgtcaacagtcagactctgtcattctgaagaaatgccataggttcaaacccagaaactgaggaggtactttgtgtttttcttaacagtttttctcttttaagtgttagttgtctacataatatctctgtcctttctccctttttgtgtcctatggccacttccacatatactcttacccaaccccttaagcctatactcttcccctcttaatagcagcaattgttcagggcatgtttatggaccagtctgcaaacaggaaactctacttcctgaatatgatgggagctaaatgatactaactgaataagatgaaaatttgtgagttaagtgttctttaaagatctgttgctaaaatgcttttcttgtgagaagaggaaggagagcgcacaagttagtgagcgagaggagcttcattgcggagaaagtcaaagtcagtctttctgaaaagacctgctgtctttattgaattaacatacaactagggttaatgacatttacctgccaaccaatgttgcagtcctcccagagagctagttttgggttttaaaaaaaaaaaaaaaaaaaaaa

SEQ ID NO: 6090 - DNA, 2093 bp, Macaca Fascicularis
atgtcctttttcatgttgctatattctttattataagtggcttttaagtttttcaaaccaacatacttctatggctgagaaactgtggctgccagataggaagaagaaaaaatcatgaacatccaagcaaagcagactgagtcttattacatgtcttccccaccattgaagatccaactcctcaaaggctgctggaatctcccaagattttttccacttcatctgccactacatccctctctctgggagatacctcggcatagtttgatgcagcaactctgccctcatgatgcacttttaacacatttttttttttttagctgatgagactacttatagttattaaaaatattggggaatatttataatctgttcaatttcatgttaatacactttttggtgtgcaagggttctaaagattctatccatactaaaaacagtctcttagtaatatcacttgaaaagagtggcatatatgatggttgaatctattaataacatttggaaatttttccttttattttgtataaatattaaaacttattcactgttattttgaaaggtattctggaacctgacgactacattatggcaagaaatggttcaatagatgaggctataaaggatactggaatggaaaataaccaggttgggatagtcaagaagaagatagactgcagcaaataggatattctacattgattagtgagagatggaagataagtactataagctagtggtttttgctacctccaaaatgataaacatagttgagcaaggctagggatggcagaaagtgtgggaggagggaacagattgaaggactatctcaaaacttcatctaacttcatttatgtgtctcccttactctcactcttgtctctcattttggactctgtcctcactctcttgttccttcaaccccagaacaacaggagaatattgttcaaaggagaagccaacataatcagaatgaatggagggtgtggtaaccccttaatgttcatctctccttttccctccatctcagtttacctccttccctggacttcagcagaaatgaatgagtcattgagtggaatcaataccatgatgatgtcttaacagcagatgtacttactttctctttttaatttgctaaattgttgtctttatttttttgattttcttctaattccattttcttttctttatcattctcatctcttctcactggactatttctcctccactcttcatctcattaagttttatttattcttgcatattctgttctgctttctcagagtagaaagtatttatcatataattccatacacctaaggtattgaaaactgagaccacaaggggcagtatttctggtgtaccccacatcttattcctgtaaacacacgtttatggactacagagattaattatgttagcatggtgtttaacatattgcctaataaataatgggttcttataatagcctaaaataactgtgttagaattctatgaaatcggtattctaaaatagaacaagtgaatcattctcttttggaagggggaaaaattatgaagagacatttaccagaaattaaggaaacaatacatcagtgatttcagttactcataataatattttctttcagattctaccatatatagtagatagtttatgagagcttcatagattgtttttcttttatttcacattgaacattatggatttgatgagaatgtgtggaaactggttttgaagtgatacatgttgatataaactgtatttttattttgtacagagaaatcaatttattactttatcatccaatatatttcatgtttctgtcatcaaactaaaatttattatcttaagtccttatataaaggagataaattgtatgatatctcaataatagctacttcctgttaaccaatttattttctctgcagatctgtgcatcctgatttgtttctttcttatttgtgcagttcttactagctttatcaggaagagtagttgcttttttaaaatggttactgtttcatttttataattaaactttatctttcagtttcaaaaaaaaaaaaaaaaaaaaaaaaaaaaaaaa

SEQ ID NO: 6091 - DNA, 751 bp, Macaca Fascicularis
  misc_feature (1)...(751): n = A,T,C or G
acagactgactgggtacccnnctgcttttggtgctcacagccaagtataggacagcttgtctcaaggctgctggagaaatttgggcatattaggaaggcatggagaggaagggctcccattcttggccatgttctctctgcctatgggcctgtgttgaatgnnnnnnnnnnnnnnnnnnnnnnnnnnnnnnnnnnnnnnnccgtgtggcttccctggccattgctctcatcagtgtcccacaggcagtcaggcgatttctgtgataagcattcccttagtcccaccccgccaagtcaatatnnnnnnnnnnnnnnnnnnnnnnnnnnnnnnnaagtgctcnnnnnnnnnnnnnnnnnnnnnnnnnnnnnncacagcaattaactgannnnnnnnnnnnnnnatccttcactctgcccctaacttctcaggaacatacatcacagctgcaagagaatgggtaggaaatcaactggcactagaaatgagttctgagtcacctgggttctagtggctctcnnnnnnnnnnnnnnnttgtacctgatttatggatggctgtgattctgtaagacaaaaatggctagtgggttctctggccctatcttaatcatcagatgagatggaacttattcatagttttgtagaatttactgctagcaaattgctttgttaaagcaaaaaataaaatgcctgacaaaaatattgtttcaatgactgtgtttagccatgctctgtnnnnnnnnnnnntcaaaa

SEQ ID NO: 6092 - DNA, 667 bp, Macaca Fascicularis
catagagatcagaataaacaataccttctccccgaaattacaaccattgtgccaaaaataccaaaattgtgaccattttgctacattgcccccctccaactgagccattggagagtttcttataaacatcatggcactggacccctaaactcgcccatagacacctgagagcatagctgtcttccccagtcccccacaggcggggcgtgatgcaggggcgcctcctgtccatgtgcttctaacactcggtgccagtgcggatgtgccacttgtcccaataattcttttaatagctgttgctttgttgttttcgcaaacaagattgtatccagaatcacacagtgtttggttgtcatatagcttcagtctcttgttcgagaacattcctgcccctttttgtcttgtatgacattgacgttctggaagacaccttcactttgggtttgcctgattgctccccccaagtaggtccaggttgagttttggggcaggagttctaccccaagggacgccgtgtcctccccagttgggtggggatgttcgtggcagcagcactgaccacggctacgggggtggtctctgaacctccactgcacgaacaccatgctctctagttaataagcacctgtggtgacgtgtggaacatatgggtgcagcgcggttctgt

SEQ ID NO: 6093 - DNA, 742 bp, Macaca Fascicularis
  misc_feature (1)...(742): n = A,T,C or G
caagggtggatttagaattaaaggaaatacctggnnnnnnnnnnnnnnnnnnnnnnnnnnnnnnnnnnnnnnnnnnnnnnnnnnnnnnnnnnnnnnnnnnnnnnnnnnnnnnnnnnnnnnnnnnnnnnnnnnnnnnnnnnnnnnnnnnnnnnnnnnnnnnnnnnnnnnnnnnnnnnnnnnnnnnnnnnnnggggagggagggcattattggacggtgattaaataatgcagatggcccttctgtttnnnnnnnnnnnnggaagaggtcagactgcccagttgaggcggcaggcatttattcggagtcctgttggatagagcctgtctcctcgaggctgcagaggcttccaggatgtggagctgtgcatgttagtgactcagccttgccttcatcagggcacccacctaacttggagcaagtgggagaggaccccagagtcatcctctgtgctgtttggtgagttttgcagcggagacttcnnnnnnnnnnnnnnnnnnnnnnnnnnnnnnnnnnnnnnnnnnnnnnnnnnngcccagcctccatttcaaagactttgtcttccatcctatccaatgacgtggtcagggatgggctctgaggtggcagtgaggccccaccttggtttgctcagctgtgatgtgtagtctccacacagcttaagggtttttaaggagttttctcacaggattacctccactccactcatctaccatcagcatcannnnngttaacatccctggg

SEQ ID NO: 6094 - DNA, 1350 bp, Macaca Fascicularis
atgagctctaagtacccgcggtctgtccggtgctgcctgcccctctgggccctaactctggaagcagctctcattctcctcttctttttttttacctactacgacgcttccttagaggatcaaaaggggctcgtggcgtcctatcaagtctgccaagatctgaccgtgatggcggtccttggcttgggcttcttcacctcgaatttgcggagaaacagctggagcagtgtggccttcaacctcttcctgctggcgcttggtgtgcagtgggcaatcctgctggacggcttcctgagccagttctctcctgggaaggtggtcatcaaactgttcagtattcggctggccaccaggagcactacgtcgatgctgatctcaatgaatgctgtcctggggaaggtcaacttggcgcagttggtggtgatggagctggtggagctgacagtctttggcaccatgaggatagtcatctataatatcttcaaaatagactacggcatgaacatgatgcacatccacgtgttcgcagcctattttgggctgactgtggcctggtgcctgccaaagcctctacccaagggaacagaggataaatatcagacaacaacgagccccagtttgtttgccatgctgggcaccctcttcttgtggatgttctggccaactttcaactctgctctgctgctaaatccaatcgaaaggaagaatgccgtgttcagcacctactatgctctagcagtcagcgcggttacagccatctcagtgtcatccttggctcacccccaaaggaagatcaacatgacttatatgcccaatgcagggttggcaggaggcgtggctgtaggtgcctcatgtcacgtgatccattctccttggattgccatggtgctgggtcttgtggctgggctgatctccttcgggggagccaagtgcctgccggtgtgttttaaccgagtgctggggattcacgagagccacagcatgcactacaccttcggcttgccggctctgcttggagagatcacctacattgtgctgatggcgcttcgtgtcttctgggccagcagtaacatgatcggcttccaggtccttctcagcactgggacactcagcttggccatggcgatgagtatcacatctggtctcctgacaggtttgcttctaaatctcaaaatatggaaaggacctcatgtggctaaatattttgatgaccaagccttctgggagtttcctcatttggctgttggattttaagaaaaagcatccaagaaaaacaaggcctgttcaaaaacaagacaacttcctttcactgttgcctgcatttgtacgtgagaaacgctcatgacagca

SEQ ID NO: 6095 - DNA, 739 bp, Macaca Fascicularis
  misc_feature (1)...(739): n = A,T,C or G
ggaacaccccatttctctgaagttatctcggaccaggaggctgnnnnnnnnnntgagaagttcgtggatgatgagaagatcctggtggagcccgcctgcggggcagccctggctgccgtctannnnnnnnnnntccagaagctccaacgggaggggaatctccaagcccccctgccatccctcgtggtcatcgtctgtgggggcagcaacatcagcctggcccagctgcgnnnnnnnnnnnnnnnnntgggnnnnnnnnnnnnnnnnnccaagtgatgacggaccctttccgatctgtcctctcctagcccaggagacccctggagggnnnnnnnnnnnnnnnnnnnnctcgatgtatgtttggttgagcgcctgtggcccaggtgcaggttaacttcttgttatcaggagcccactatacagannnnnnnnnnnnnnnntcaatgannnnnnnnnnnnnnnnnnnnnnnnnnnnnnnnnnnnnctctgtgcccatcctnnnnnnnnnnnnnnnnnnnacannnnnnnnnnnnnnnnncaccgggtccccagaggagggtggatgggagagacctgaannnnnnnnnnnnnnnnnnnnnnnnagctgtgaccctgcccaagaacttgttcccagggaannnnnnnnnnnncaccatccagggttgaggaaccatctcagccatcctcccaggaagcccacccctgacccttacaaatttttctaatatgcaaacttttt

SEQ ID NO: 6096 - DNA, 2945 bp, Macaca Fascicularis
atgtggaggaagaggctgggtgaagcaggctgccctgcactgcttaatgaagacgaaagacatttgaacttactgagaaggaagagtgtgaggactgggaacataggccggctggctgtagggctgtagagggtaaaggaaggtccagagtggcagtgagtgggaagacagggtgtggaggccaactctaccgatgacggctcaggacctgggagcgcccgctgcgcccagtctccagagatgtcatcgtccgctggtttaaggaggagcagctgcctcgcggagctggcttcgagaggaacaccaagttcatcgccccctggttccatggaggaaattatcactgtttcaggaggagagttacttcaggaaccctgtggacagagggacagcccaccagactaccatccattgtttgaataatattttttttccttatcagttggattcctttgggcatcctgtttttgaactgagcttaagaacttctcaactcgaattctatggccttctggaagatccaccactatccagaggaaaaagtagattagtatgtctcaagggatatgacatctatggcatagggctactggtctcatcccagtaatcaggacagaaattgctaatagctcatgcaactctttcatgaagagcttagctatatgaccttagaagacaaagcctgtttgttatggcttccagaaactgagcttttacagtgtgtggaccatgttttaataatccaaaataattccagtgccgaaccctaaatttaacatatggtagacattcagtaaatgtttgttaatgaatgcacatcttctaaacgttttccaacacaaattagcagtggtttctcgtaaattatttcctacttgccgctctataaaatcatggtgataatggaagattatgaaggatttctatggagaacataaatgctgcatctttcataatctccattattacccttattgatgttatcattggaattatctaaggcgagccccagtttccagggcagctgattgacactgtcctgacttccttatttggcctcttcttttgtcactctcctctatctttgaatcatatcttggccctggttttgcaatggttttatgtaatcctacagatgtcttcaagacctggggtgagttataaatgcaagaatggttttgagaaatctaatgtggctctgctgtctgggatatggccctctttatgcaggttactccaatgattagctctgtcctcattgtccttttaattcccttgtcaacttaatctcagtatgttccttatattaacaagaagactcacccaataactcctcagtaactctcagtgatggtgtctattggtgcatacttgtgttccacagttatagccatatacacagaggtagtatattatgaagagaagattacagtctttacagtcaagaaaactcgggttcagatcctcaccctggaacttattagcattataatgcttgcagcattgtgtttggtgagagggaacgaatgaagggaccctagggatgttaggggacaatttattttacttgatggctgtatcaaacatctcctatgcccctcttcttctcttgccccacctgttccttagattcttggtcacttctctaccacaagccaccagcactgaaaccagttttgcatgagttctgctcttcctccctatgttgatcagtgtcatgtgagcataagccagtggtagcttgccacatgtcctgtctcccgttgctgcagaggcataagacagaagagatgggaagtgaatgccccatgtggtgaatctgggatgaatgggagtcacaggctggtagatcgctttttccccgttcttcctcctggaggaactattctgagaggcatctgtttgaatggtcttttagaagacggtcctgcaagatcgggcaaccagtcacgatgaaaccaagtggtggctggatcagtatgacacccccctgctcctgtttgttccttcttctctgccttgccctgctctctcctgttgctctgggattgcacttctgaatgaagtagcagcttgtaggcttttgccactggctctaccttttggggaatccaggataagaacccatcatagagaagtgttcaataatatcaattttgcaactcagctccgtggctttcccaggtctgcctgtctcactgcatgcatacagtgaaatgatggaaggaacctcctttctgaactctaatgtgccttaattgattatcattaaaattatcattaaaattgccttatttctatggacgcagaggaatgatgttttagttttggctctctgatgatttaccaactatgtgactttgtccaagtcatttaacttcagtaaacctcagtatgactgaaaagggaattttctgtatggccgtcactaggtttttttgcaggtcagttaaatgataaacatgaaagctctgtccaaatgaaaaaggtatttctaacaacaaccacgataacaacaacaatttagtccttagccatgatgtgtcgggggatatgatgtgatgattttcaaggtgttggaagaaacttttgttccaagaactaacagcagctttgaaagcagaccaagatgggttgaggccctgaatccctgggctgttgttcctgtcacccctaattaatatgagagagacaacagctgggttttccatccctaacacatttatttcattttatttgggccctgcaatttctgcatgtctcatatattttaggttttacctttttacctggctttaaaataaatcccttgtaagttgtcctgcaaatgaaattactgtctggaaaactgcaatttcatcttgagagttttattatgctaataaatgtcaggattctcaaataaaaaaaaaaaaaaaaaaaaaaaaaaaaaaaaaaaaaaaaaa

SEQ ID NO: 6097 - DNA, 766 bp, Macaca Fascicularis
  misc_feature (1)...(766): n = A,T,C or G
cagcgcatggtttccatnnnnnactggaaaatgtagttctcggggccagaggagacggcacggaagacgcctgtgcgcaagagcagatgaggcctagcagaggcggcgggatccccaagtttggaaagctgtgttaaggacagtgactgtccctactgaaggccccagcagtactccagccaggtgtggaaagctggtcacgattctacgctacttggttcattttctacacagcaacagaagagccttcctgagactgctattaccatacccgcctgtcatcttgccaaggctgccaatgtgtgttttggcctaggctgtcatggaggccatggtggaggaaaaggaaagggggggcagatgttgaggccccaaaggccacagtgagaacagttcagttcctgagttgccaagactaagggggcactgccctgcccccaggattataatgagccacatgtccagcccaagagccaggaggccgggcgcgtnnnnnnnnnnnnnnnnnnnnnnnnnnnnnnnnnnnnnnnnnnnnnnnnnnnnnnnnnnnnnnnnnnnnnnnnnnnnnnnnnnnnnnnnnnnnnnnnnnnnnnnnnnnnnnnnnnnnnnnnnnnnnnnnnnnnnnnnnnnnnnnnnnnnnnnnnnnnnnnnnnnnnnnnnnnnnnnnnnnnnnnnnnnnnnnnnnnnnnnnnnnnnnnnnnnnnnnnnnnnnnnnnnnnnnnnnnnnnnnnnnnnnnnnnnnnnnnnnnnnnnnnnncaaaaaaat

SEQ ID NO: 6098 - DNA, 692 bp, Macaca Fascicularis
caacaaatgataacagaaattagacgacggggttccaaagatcccctggtgaaggctctccagctgcttgacagtccctgtgaacctgcagagggtggcctgaagtcagagaccttggccaaaagacggagttccaaggacctcctggggaagccgccacagctgtacgacactccctacgagcctgcagaaggggggcccagggcagaggggaaggcacggccccctgacagccggctgcccgagaatgacgagcggcccgcggctgagtatgagcagccgtgggagtggaagaaggagcagatcgtgcgggctctgtcagtccagtttgaaggagctgagcgaccttccgtcagggaggagacagtgaggcagcaccaccggcagaagagctggacccagaagatcctgaagccagccctctcggaccacagtgagggggagaaagtggacccgggcctgcccctggagaagcagccctggtatcatggtgccattagccgtgctgaggctgagagtcgactacagccctgcaaagaagctggttacctggttcgaaatagtgaatcagggaacagcaggtactccattgccctaaagactagtcaaggatgtgtccacatcatagtggctcagaccaaagacaacaaaaaaaaaaaaaaaaaaaaaaaaaaaaaaaaaaaaaaaaaatt

SEQ ID NO: 6099 - DNA, 736 bp, Macaca Fascicularis
gtgacaggccacagcgcctgcttatttggaaaccaggtgtgtgagccgaatgcctgcgaggccacacactcagcacaggagcccccctgtatctggctgccctgagaggagcaagggccacctcccatgtggctctagacaccccgcgggcccatcagccccagtgtctgagcaggctccaccccggtgccgagtgctggggcctctggggctggtcggcctcagcaggaaggaggcactactgagcaactatgcattgtcattgtcgggtttggggcttgcggtggttccttggtgactgggaattgcttgtgtgcatgtgttgggtgcatgcttccgggcctcagctgcctcaggcccgcacaggcaaccctttcccatccaaagccattggtggagcttctctggaatcgtttgccaaaagcccaaggcagaatccaagggtccaagaccatttccatggagctcatgtttttcttttctgtaggaacttttttttaaccagcacccaccataattctgaaggccatgtttcatcttcctggatcactacagtgaagtattacagttgtacagttcccagtctggccttggcttgctcggataaaactttgtatgtattttgtatggcatagattctatattgtaatgatgtcctatgcaaaaagaaaaattaacgaaattgtaaattttattgttttaacgtgtatgcatgtttagtgacgtttacatttga

SEQ ID NO: 6100 - DNA, 745 bp, Macaca Fascicularis
  misc_feature (1)...(745): n = A,T,C or G
ggttcaagcaccaggaagagctgtctatgcannnngctcttgggctagggatgagacacacaactcattggctcctagattttaacttttaagtagacatttgtaaacctatagctaactactgtctttaaagccattgtttcaattataaaatccaactctctgagagaaaaggatgttttaaattaaaaattaatattaaaattaaattaaaaaataaaaattaaaaagcttgattgggacaatgaagagccaatctttgaagaaggggaggcattaatagtttatcccaaaaataggagtgggaatgagtgcctgatagtgaaaaaggaggcttcactcaaaaggacgtcaagagtcaacagattttgggaggctgaggtaggaggatcacttgagcccaggagttcaagacctgcctgggcaacatggcaaaaccccatctctataaaaaatacaaaaatttggctgggcacgnnnnnnnnnnnnnnnnnnnnnnnnnnnnnnnnnnnnnnnnnnnnnnnnnnnnnnnnnnnnnnnnnnnnnnnnnnnnnnnnnnnnnnnnnnnnnnnnnnnnnnnnnnnnnnnnnnnnnnnnnnnnnnnnnnnnnnnnnnnnnnnnnnnnnnnnnnnnnnnnnnnnnnnnnnnnnnnnnnnnnnnnnnnnnnnnnnnnnnnnnnnnnnnnnnnnnnnnnnnnnnnnnnnnnnnnnnnnnnnnnnnnnnnnnncaacaagagtaaaactct

SEQ ID NO: 6101 - DNA, 753 bp, Macaca Fascicularis
  misc_feature (1)...(753): n = A,T,C or G
agcacaatgggactgccagttacccagatgggatgctgacacannnaggagctcagacccagagcaggcttggcagcccctcccctgggtggccactacccagcctgcctgcctcccccgaggggacactggtggccatctggcagctccctctgagctgtcacccagtctgttttgtcttttgtctggatgtgacatgacaacgtgttaattaaaaagtagttaagccaaaatgaaaaggcaatccaaaacctggggaaatattataatacatgtgagaaaaaagacaactcaataaagaaagaaagtacaatgaacacacatacgcggtgtgtggccaaaaatggccaatagcatatttttaagatagtcaacctcactaataatcaaagaaattcacactgaaacaagatcctcgggagtagaacagaagaggtaagtattgcaggagactgacagataacaatgacagaaaacacagagtgggcctgggtgtggcagccagtgtccaactaccgctggagataatggagaggcatgacttttctgaaaggaaatgtgcagcatgtttttaaaatgcagacacaatgggatccacaaattacacttctaggaatttatcttaaagaagcaactggacaagttgcaagcaacaacacaaccacgtgtgtctcagccttggttacaatgtggaaaggagaagaacacacatatccagtagtcgggaattggttaaataaatcatgttaaata

SEQ ID NO: 6102 - DNA, 727 bp, Macaca Fascicularis
  misc_feature (1)...(727): n = A,T,C or G
atnnnnnnnnnnnnnnnnnnactgaatggagcnnnnnnnnnnnnnnnnnnncaggctgcatcnctctggtcctggagnnnnatctacttactgcctggacccccaccttccacggcctttgcactgtcccatgtcccgtcccccatggggaggcagaagagattgcctcagagtggccttatttttttcgcaacttgtgaaatgnnnnnnnnnnnnnngtaatatggccgagtctccaagcgctccaatggaagtagaatcttctctttcaatcatatggcacagctgccaatatgactgnnnnnnnnnnnnnncagagtggtggaagtcactgggtccctttcctagtgacggagcccgtgatgtctaacactgtacnnnnnnnnnnnnnnnnnnnnnnnnnnnnnaatacgcagtgttgtctgatttgggaannnnnnnnnnnnnnntaatgagnnnnnnnnnnnnnnnnnnnntatacagttattcagttgtataaatagcacattgagtagtttttgaaaggttaagaaaaataagtgaaaagatatatgaaatggctccaaataataattattcaaacctctataaaatatgttttcatactcttatgctgccagaggtacttcttaaactcnnnnnnnnnnnnnnnnnnnnnnnnnnnnnnnnnnnnnnnnnnnnntgtttgcttcnnnnnnnnnnnnnnnnnnnnnnnnnnnnnnnnnta

SEQ ID NO: 6103 - DNA, 746 bp, Macaca Fascicularis
  misc_feature (1)...(746): n = A,T,C or G
actnnnnnnacaannnnnnnnnnnnnnnnnnnnnnnnnnnnnnnnnnnnnnnnnnnnnnnnnnnnnnnntcannnnnnnnnnnnnnnnnnnnnnnnnnnnnnnnnnnnnnnnnnnnnnnnnnnnnnnnnnnnnnnnnnnnnnnnnnnnnnnnnnnnnnnnnnnnnnnnnnnnnnnaaaaagtgctcttgctcagactgaagaaagtaattgggccggcccgnnnnnnnnnnnnnnnnnnnnnnnnnnnnnnnnnnnnnnnnnnnnnnnnnnnnnnnnnnnnnnnnnnnnnnnnnnnnnnnnnnnnnnnnnnnnnnnnnnnnnnnnnnnnnnnnnnnnnnnnnnnnnnnnnnnnnnnnnnnnnnnnnnnnnnnnnnnnnnnnnnnnnnnnnnnnnnnnnnnnnnnnnnnnnnnnnnnnnnnnnnnnnnnnnnnnnnnnnnnnnnnnnnnnnnnnnnnnnnnnnnnnnnnnnnnnnnagtgggacactgtcaaaaaaagaaaaaagaaaaagaaagtaactgatctgtgtttttgtctgatttcctacaggataccgaaggannnnnnnnnnnnnnnttctgtaactccaactgtaacttggttctaggaagacagaatccatatttggtcaacagaccttttcgccctcacttaagtttactgcttcgatatcttttccttactaattgattgttaattaagtagtgtccaagtgagttagcctttttagggtttataataaaagag

SEQ ID NO: 6104 - DNA, 698 bp, Macaca Fascicularis
  misc_feature (1)...(698): n = A,T,C or G
atctggagaagcggaggctggccaagaggcccaagagcctggacacagcccgcggcatgtccctctatgaggaggaggtggagacagaggtggcctgggaggaacatgggcgcgtcctgctgtcactgtgctacagctctcagcggggtggcttgctggtgggtgtgctgcgctgcgtccacctggcccccatggatgccaatggttactcggacccctttgtgcgcctnnnnnnnnnnnnnnnnnnnnnnnnnnnnnnnnnnntcaagaccagtgttcgcaggaagaccctgaaccccgagtnnnnnnnnnnnnnnnnnnnnncaggcccacgggaggagctggcccagaagacgctgctagtgtctgtgtgggactatgacctgggcacggctgatgacttcnnnnnnnnnnnnnnnnnnnnnnnnnnnnnnnnnnnnnnnnnnnnnnnnnnnnnnnntgagtgcctgggnnnnnnnccaccgcctggagctgtggcacccactggacagcaagcctgtccagctcagcaactagcccaggggccctgcctgccgcccctccactacagctgcctaaagtgtccccacaaaaatgatggaggttggggctgcctcacccatcacgccccccagtcccaagtcagagaggtgtttcctctctccccgctttcacattcacacccccccccccaaatc

SEQ ID NO: 6105 - DNA, 462 bp, Macaca Fascicularis
tttagaaaacagcagtagcgcatgttgacaaatgacaaagcggcagtcgtggtaaagcactttcggtcaaagccaagaggggggaaaatcgggttgctggggcggcactcgtgctggaatccctagcttccctaacctcctttttccagtccggagtgagcgggggccccatcgccccacccccctttcctggctctggttacggccttgcgagttgaacaaacttgctgcaggcggattggcggtcgggagctctcgggctggggcgttgtatttattaatttatattccgcggcgccccgcgcgggccactcctttgtgtccggccgccgccgcgggagctccggggcctcggcggggagcgcgttccctgtgtccgcccgacccccggggccggcacgtgcttcgcccggtccgccgagggggcggaggccccgatctccccgatcccccttctctgcc

SEQ ID NO: 6106 - DNA, 649 bp, Macaca Fascicularis
tggtcccagagagggaaaaatatgcttgagtgggtaatgaaccttttgttcccagaggcagaaagattgggactaggccaacgtagagattggtgatggttgtgagattcaaggagggtgtgtgcgtgtgcgtgcatgtgtgtgtgcatcttgacaatattagaggaggctgagcccaagcaggcacattctcttcaacccctccctcattcagtctgctcttgagtctactgaacatcaagcttgctatgagcaggatcttagagctgaggaattggcctccgaatctgaacaggcgtcgtaatcctttcttaataggttgtgctgtggacccaatgtgagggctatgctggcgtacatggtgacatattgagctgggggatgctctcagggtgggggactgcttccatcccaacaaaggctctcttgagagtctatccagggacccattgttttactttaacagaccagaaaagatgtttgttttccatgttattacttccaggggatgctgaatgtgtgggcagaagtttctctgtagattaaaaatcagatttttacttggattcagcaaaggagtgtcacctggatttttgttttcaccccatgaatgtagctgcttctgtgtaaaatacccataaaataccat

SEQ ID NO: 6107 - DNA, 1730 bp, Macaca Fascicularis
aaaagaaaatattccacgaggcagtgtccagtttgctcaggaaatagatcaagtatcttcttcagcagatgaaacagaggatgaaagatctgaagctgaaaatgttgcagaaaatttctctgtatctaacccagttcctcagcagtttcagggaataattaatttagcttttgaagatgcaactgaaaatgaaagtcgtgaattttctgcaaataaaaagtttaaaaggtcagttttactttcagttgatgaatgtgaagagctgggatcagatgaaggagaagtccatactccctttcagccttctgtagattctttttcaccttctgatgtttttgatggcatttctcatgaacatcatggaaggacttgctattccagattctcacgagaaagtgaaaataatattttagaatgtaaacaaaataaaggcaatagtgtatgtagaaatgaaagcactctcttggatcttagtagcattgactcttcaagaaaaaataaacagagtgtttcagccacaggaaaaaagaacacaatagatgtcctatccagtagaggcagacagcttcttccagaagataaaaaagtaaacaatggaagcagtgtagataatgacattcagcaacgcagcaaattcttggatagtgatgtaaaatctcaagaaagaccatgtcacttggagcttcatcaaagagaacccaattctgacataccaaagaacagctctacaaaatctctagactcctttcggagtcaagttctgcctcaggaaggtccagtgaaagagagccattctacagctactgaaaaagctaatattgctttatctgcaggagacatagatgattgtgacacactggcactaacctgcatgtatgaccatcggccttcaaaaaccctgtctccaatatatgagatggatgtaatagaagcatttgagcagaaagtggaatcagaaacacatgttacagatatggattttgaagatgaccaacactttgcaaaacaagattggacactactaaagcaactgctctctgaacaggattcaaacttagatgttacaaattccgttcctgaagacttaaatttagcacagtatctaatcaatcagacactacttttagcgcgagatagctcaaaacctcagggtatagcacatattgacactttgaacagatggagtgaactaacatctccacttgatgattcctcagcgagcatcaccatggctagtttttcctctgaagattgttcgcctcaaggggagtggacaattctggaactggaaactcagcattaagtgttaacattttggaaaaatttatgccactcctttattttttgatgcctatattatatccaaatgataattgcattagccagatataaactttccttaatattgagtctttccaatttaatgaggtaaacatagtttatttattaatatatcacatacagaaaaatgtttttctaaagtttttgagcatgttttctataattattagaaaaattagaagacttgtaaggaaacccttgcttcagttttcctttcctaactgatcatttgttcacttgttcattattcaagaatttaaaatgtgaatgcacaagtagatcagtccctttactttttgctctgcatatagtaacatagtaatttaacaataaaaaacttactgtgcttgtgtccaaaaaaaaaaaaaaaaaaaaaaaaaaaaaaaaaa

SEQ ID NO: 6108 - DNA, 781 bp, Macaca Fascicularis
gatgtgccaagtgctgtgctaagtgctttacgaacattcatcacatcaggatgaccttgagagctgaggctctagccacttaaaaccacgtgcccaaacccaccagttcatggtgtgtgttcggaggggtgaaagcattaagaagcccagtgccctcctggagtgagacaagggcttagccttaaggagctgaagagtctgggtagcttgtttagggtacaagaagcctgttctgtccagcttcagtgacacaacctgctttagctaaagcccgggagtcccggcatcgctgagctgagagcagggatctacctggcttctcagttctttagttggaaggagcaggaaatcagctcctactctccagtggagagatctggcctcagcctgggctggagatgccaaggactgtgccaggttccctgtgccctcctcgaggtgggcagccatcaccagccacagttaagccaagccccccaacacatattccatcatgcagatagaagagtctttgctgttgctcccgaaagccgtgctctccagcctggctgccagggagggtgggcctcttgattccaggctcttgaaatagtgcagccttttcttcctctctctgtgtctttcagctctgcttcgttggttattaggagaatagatgggtgatgtctttccttatgttgctttttcaacatagcagaattaatgtagggagctaaatgcagcggtatgtgtgaacgcagaagggtatgtgccccacattcccgtggggaagtctgcagac

SEQ ID NO: 6109 - DNA, 614 bp, Macaca Fascicularis
  misc_feature (1)...(614): n = A,T,C or G
taagctactgtaaatgaagaaaaagtgtcttctctgggctgtaggcctggctcattgtacacatgtatacatcctaagntctctctgttctctaatttgtggtgactgaatatgtgtctcaatccacggggcatttctacctnnntttcatgcacacccccactgccttgagatccccagnnnnnnctgttatttgcctaatacctgtagccatctgccacacagccagacatgaaacgctgggacagagaccatttatattaaatacaacagcttatcttgctgggtggggaaagtaaaaaatatgctggttcaaggtctaaagtaaaatgataaataatgtttgtagcattaatgaaatattttaaagaaatgtgtccgggggtagcattgactatgctgactaggcctttggtaactcaaaaagctcttggccccgatggctacttgcccttgcactttctttatcacgctctgagctcacacggagcctctgacatttccctgctgtcttgggagaaaggaaactggttgtggcggcagggtgtggaatctgctgctggannnnnnnnnnnnnnnnnnnnnnnnnnnnnnnnnnnnnnacggggcacgct

SEQ ID NO: 6110 - DNA, 620 bp, Macaca Fascicularis
  misc_feature (1)...(620): n = A,T,C or G
agcctgggagacagcaagactccgcctcaaaaaaaaaaaaaaaagtttggaatatacaaacaatttcaaaaagaaaggtccaaacctctttagagtagggtcaacttaagaattccttttatttctaaaatgtctggcttagaggcagcagcacttgctaaaagttttaatgtattggataaaaaaaaataagttatcattacttgatagagcatacgtgtgtttctgaagatttatatagccttacacttgtctctagtgaatatcatactttacatttcttaaatgtgcctagtcatatatgtgtgatacatataaaggccagttccctctgggagcaatgacagaatttattcagagctttaaaatagttatgtagnnnnnnnnnnnnnnnnnnnnnnnnnnnnnnnnnnnnnnnnnnnnnnnnnnnnnnnnnnnnnnnnnnnnnnnnnnnnnnnnnnnnnnnnnnnnnnnnnnnnnnnnnnnnnnnnnnnnnnnnnnnnnnnnnnnnnnnnnnnntctcaaaaaaaaagttacgtaattagtatactgcatgtattgagttttaaggagtagatttcaaaaccccttcttgtagtgcatgtatgaatttaaagttg

SEQ ID NO: 6111 - DNA, 700 bp, Macaca Fascicularis
  misc_feature (1)...(700): n = A,T,C or G
aacaaaaaattannnnnnnntggtggtgtgttcctgtaatcccagctactggagaggctgaggcaggagaatcgcttgaacccaggaggcagaggttggagtgagccgagatcacgcccctgcactccagtggccaccacatccagcaaggcagacgggaccatttccttcatccagaacgttctgtggacgtcactgctnnnnnnnnctcccttacggagtctcgcacgactgtctagccagcaagatctcttctccaagcaggccaggagcacctctccatccactgctgctgctctnnnnnnnnnnnnnnngtccctcttgagtcaggccctgaagttagaagctgggcagaggtgcccacagccttatcctttgccnnnnnnnnnnnnnnnnnnnnannnnnnnnnnnnnnntgaaccacnnnnnnnnnnnnnnnnnnnnnnnnnnnnnnaaaacatgcgatgggaactttcaccctgaggccgggcccttcccatgccagcccgacagtagacaggacaccctgtggtgctctgcaccggggtgctgggatctgtggatccctggagcctggaagccactcgcagcacatacagtcactgtgttccgaggtccagtcagccggccgggaaggaattcaacacagccaaggacagaagtccatatgatgacaggtggatgctcgtgtgactttgct

SEQ ID NO: 6112 - DNA, 430 bp, Macaca Fascicularis
agcctgtgtgtggggagaagatatatgtgggcgcgggggtttgatgcgtcacatgcagataagcactgagccgagctcccacatagctcgtttttacctcttgggcggggggtctgactccccacatgtgtaggagaggtttttctctctatcgcgccgtgggccggggccccggagggttgctctgcgttagtaagattgtcaggtttgcccccctcacatgttgccggtgtgcgggcagcattagccacccccctccatatgtctccagcactggagaaaggggtgctctgatggaggtgtgggatgtgcgcgtcagttcttgcgtcacgcgtgttgctccaccccaacaccaccacagcccggctgcccagagggctggatgcgtgttggtctccgagcgagccccggaaatcaggaaaattcacaa

SEQ ID NO: 6113 - DNA, 725 bp, Macaca Fascicularis
  misc_feature (1)...(725): n = A,T,C or G
tgttatggccctatttttgtgtgtgttgagacaagnnnnnnnnnnnnnnnnnnnnnnnnnnnnnnnnnnnnnnnnnnnnnnnnnnnnnnnnnnnnnngcctgggctcaaccagtcctcccannncagcctcccaagtaagctgggaccacagacacattactaccagacctggccaatttttttttattgtttatagagacagtcttactatgttgcccaggctatggccctattttttaaagtacaatatctaaaaagaattttattccttttgtttttggtccatggtgtgcatgggggactgtgctgtgctacaaaggtgatgagggtggaggagatgcagctcacgctattcatgtggttggagatgcaccagctaatttggaggttttcttgattctatacaaatatgacattgaaattagagttaagcttactcaggagagagcagattgccactgtttctaggactttaaagttgctgattcaacagcttcaggtttaaatttttagaatgtatcagttactatcaaactagtttttgtgatattccagtatgttcttacctatgttaatacttcagaatcctaaaaaacaattaagtagatataaaactatgtcaatctcggaattagcataaaatgtattgtgtgtttgcatatttatatatgtatatacacttacatatagaatacttttaaaataatagctttattgagatgta

SEQ ID NO: 6114 - DNA, 740 bp, Macaca Fascicularis
  misc_feature (1)...(740): n = A,T,C or G
tttgattcttttggaaaacaacttctattttattgtgagtagtagtgagcatataatagattgnnnnnnnnnnnnnnnnnnnnnnnnnnnnnnnngagtaccaagaattctgtatatcatgactattaggtgttcaacgaccttcttaaaattaccgtgaaaatactcaagcatacacaaaagtagaataatgcaattagcataccccaatattcctattactcagactcaagaattagaataacatgattcgttagtgactgaannnnnnnnnnnnnnnnnnnnnnnnnnnnnnnnaaagttggcaataagtacccagggattttttgnnnnnnnnnnnnnnnnnnnnnnnnnnnnnnnnnnnnnnnnnnnnnnnnnnnnnnnnnnnnnnnnnnnnnnnnnnnnnnnnnnnnnnnnnnnnnnnnnnnnnnnnnnnnnnnnnnnnnnnnnnnnnnnnnnnnnnnnnnnnnnnnnnnnnnnnnnnnnnnnnnnnnnnnnnnnnnnnnnnnnnnnnnnnnnnnnnnnnnnnnnnnnnnnnnnnnnnnnnnnnnnnnnnnnnnnnnnnnnnnnnnnnnnnnnnnnnnnnnnnnnnnnnnnnntgtgcctggccagnnnnnnnnnnnnnnnnnaagaaatgagatggtttggagaattcatttacttaatttaatggttatgtggctgtcctgacctattttctgttagatttttgcttaaagagaaacttaaagattcatcat

SEQ ID NO: 6115 - DNA, 736 bp, Macaca Fascicularis
ccatgagccaccacgcctggcctaaatacctttttatttattgccctgcttagctccaagagctgtgctactggttagtcttctggggaccacagttttccaaggaaagacagtgactctaagatattccatgccttaggacaaaacgaatattctggtactatggatggaactgatgtttaaaagtttccaaaaaaaaaaaaaaatttcagcagaaaaaaacttaagagattacagatattgaactaggaatcaccccttactaatccaaagcacttgtcattttcttctggtgaggaaagaaagaagttttgtcttagggaaagtataatatttttcaagaggcagaggctctgagggttggataaacaaatgtccacacaacccatatctattaggtgttgtgacatttctacgggctgctgcaaactggggagatgaggagagagcagagcacaactttatcatcttatcaccagaaaagagccccaggccaggagcggtggctcacccctgtacttagtactttgggaggccaaggcggtaggatcacttcagcccaggagtttgagactagcctgagcaacggaataagaccttgtctctaaaaaaaaaataaataaaatgagctgggcttggtggcgtgtgtctctagtcccagttacttgagaggctgaggtgagataactgcttgagcccaggaagttgaggttgcagtgagctgagacagcatcac

SEQ ID NO: 6116 - DNA, 680 bp, Macaca Fascicularis
  misc_feature (1)...(680): n = A,T,C or G
aaattttttaaatgaccaatgaacatctctacatccaccacaaaaaaagttgactaattttgtacatatttatttgaaaatatgctgccaacannnnnnnnnnnnnnnnnnnnnnnnnnnnnnnnnnnnnnnnnnnnnnnnnnnnnnnnnnnnnnnnnnnnnnnnnnnnntcacttctagaaaaatcaaacacaccacatttatctaatacccattccatcttcctatttccccaannnnnnnnnnnnnnnnnttttatatgttttttttttaatgaatcagaagctaataaaggatcacactttccattcgattatctctcttgccttaatctagaagagaccactttttgttttattacatttgctttttgaaaagtccagaccagggnnnnnnnnnnnnnnnnnnnnnnnnnnncctcacacccctgcatagggccacagtggaatgtgtgaaagatcagtttggcttcattaactatgaagtaagagatagnnnnnnnnnnnnnnnnnnnnnnnntgaagttgaggatggccttgagctccaggcaggagatgaggtggagttctcagtgactcttcatcagcgcactggcaagtgcaacacctggaatgtgnnnnnnnnnnnnnnnnnnnnnnnnnnnnnnnnnnnnnnnnnnnnnnnnngttggtcagtccctt

SEQ ID NO: 6117 - DNA, 2983 bp, Macaca Fascicularis
  misc_feature (1)...(2983): n = A,T,C or G
gcttaggcgctgcggcaggaaggcggagccgacaaactagaggactcgggaactacaactgcgaaagccgctccgcctccccgaggcctcggactccacggcggccaatgaggcgggaccacgcgggcctccaaaacacccggagctcagaagccggacacataacttcgagggacaaatgagatttttcttggcgagtgaaattggaaatagcaggggaagatgcctttcctgaattgaagctcactaaagtaaggagaaataggcagaacacatgaggcctctccaaagttataaagcttttgaagatcatatggcacaggaaccagtggaagacacagaccctagcactttgtcctttaacacgtcagacaaataccccgttcaagatacggaactccctaaagctgaagaatgtaatacgattactttgaactgcccaccaaattcagatatgaaaaatcagggagaagaaaatggctttccagatagcactggagatccccttccagagatcagcaaggacaactcctgcaaagaaaactgtacttgttcctcctgcttgctccgggcccccaccatcagtgacttgctcaatgatcaggacttactagatgtgatcaggataaagctggatccgtgtcacccaacggtgaaaaactggaggaattttgcaagcaaatgggggatgtcctatgatgaattgtgcttcctggagcagaggccacagagccccaccttggagttcctgctgcggaacagtcagaggacggtgggccagctgatggagctctgcaggctctaccacagggccgacgtggagaaggttctgcgcaggtgggtggacgaggagtggcccaagcgggagcgtggagacccctccaggcacttctagagctcttcttcttccttcattggcctccccggacgttgacacaaccacaggtgaagaaggaatgtgaatctgttcttttgtaggaatttagtataaggacgtggaacggtggacactggttttccccaaagctggtagttttgtggaggggtagcttgtttcggtggtggatctctgtttgtttatttttgcacatctgttttaatttaatattcaaatctggaattaggaaagcatattttctagtatccactaagggccaaagtcctgcagtcggaatggattcatgccatgatgaaaataaaattatcctctccctgaaatacggctaaagatttaaataggtcctgagactgctgataggcccagacatacccacagcactatatgtaacatctcttcctgatcagtgccattcccacggtttcaaagaaaacagcaatgaggagcgctcacctcagtgtctgcagcaccctccacgtctctcctaggcgacgagacccagtggctagaaattcaccacatctattctcaagatccatgccagggagatctttgactcttgtgggaatcccactattgaggttgatctcttgacctcaaaaagtctcttcagagctgctgtgcccagtggtgcttcaactggtatctgtgcggtcctagaactccaggacaataataagactcaccatatggggaagggtgtctcaaaggctgttgcgtacatcaataaaactattgcacctgccctggttagaaaaaaactgaacgtcacagaacaagagaagattgaccaactgatgatcaagatggatggaacagaaaataaatctcaatttgtgggaacgctattctggggtttccctcgccgcctgcaaagctggcgctgttgtgaagggggttcccctgtaccaccacattgccgacttgcctggcaaccccaaagtcgtcttgccagtcctggtgttcagtgtcatcaatggcatttctcatgctggcaacaagctggccatgcaggagttcatggtcctcccagtcggtgtggcaaacttcaggaagccatgcccagtggagcagaggtttaccacaacctgaagaatgtcatcaaggagaaataagggaaagatgccaccagcatgggggatcgaggcgcatttgctgccaacatcctggagaataaagaaggcctggagctgctgaagctgcgattgggaaggctggctacactgataaggtgatcatcggcatggacacagcggcctccgacttcttcaggtctgggaagtatgacctggaattcaggtctcccgatgaccccataaggtacctctcacctaaccatctggctgatctgtccaagtcctgcatcaaaaactacccagtggtgtctgtcaaagatccctttgaccaggatgactggggagcttggcagaagttcacggccagtgcaggaatccaggtagtgagggatggtctcacagtgaccagcccaaagaggacggccgaggcggtgagtgagaaggcgtgcagctgcctcctgctcaaagtgaaccagattcgctccatgactgagtccctccgggcgtgcaagctggcccaggccagtggttggggtgtcatggtgtctcatcgttctggggagactgaaaatactttcattgctgacctggtggtggggctgtgccctggcagctcaagactggtgccccttgctgatctgagcgcttggccaagtacaaccagctcctcagaactgaagaggagcttggcagcaaggctaagtttgctggcaggaacttcagaaaccccccggccaactaagctgtgggcaggcaagcccttcagtcacctggtggctaattagaccctcccctcgtgtcagctcgggcagccgaaggcccctgaccaacgtttgtaggggccgctgctagtgagctcccctcgcccaccgccgtggagtttgcaccgcttctttagaacttctacagaagcaggnnnnnnnnnnnnnnnnnnnnnnnnnnnnnnnnnnnnnnnnnnnnnnnnnnnnnnnnnnnnncaaaaaaaaaaaaaaaaaaaaaaaaaaaaaaa

SEQ ID NO: 6118 - DNA, 3123 bp, Macaca Fascicularis
ctagatgccaatagcattcctcccccagttgcagtaaccaaaactgctcaggcactgcaagttgccccttgaggggcaaaatcaacccctatttgagaacactatattcgtgtccaaagatcctatttagataaataacttgcttcttgtcacaccaatattgtaaagccctgacacaacctaatagacaggttgcaagactcactcagtttgcacacatattcacaccttgtgttttgcaggtacctcagtcaatgaccccaacagtgccccaccttagcaatgacagttatatgttgagtgtttattaagtgctaagcattaaatgatatcatctcattaaaatttacaacagcctatgaagtattactcctatcttgtagatgacaattttgagttacgaacagagtgaaaaaccttgcccatggtgacatagccagttagtggcagggcttgttgggtctccagagttcaggctcttaatgttctccattctactccagccttccccagagaacagaatggaaaatcaaaagacatgtcctgggtacctatagcatataggaactggtaaaatagctacagacccaggaaacttacctggaacctgttggccaagcccatcccctgatctcatggcaactagccagggagggcttctaaggaaaccctgtaacaatcccaggtcagggaaaaggtgaggtgtgagcgagggtatgggccatgtctaaggaaaaggatggtggccagcttggttctgccactttacaggcatccctctggctttagcccaagataagaggacattacagtggctatactcgctctgaggatgtctcccaacttggcccaaccaacctacatttcactgccatcccttcccattcggttttgaatctctcatttctccttgacttcacaaccactgttcagcctttcctagtaaaagccattctctccagtttcaaaatctcgtctagagtttaatgtcttctatcaaaagcttgttatctcactcatctctgaaaaccttctagccccaggcctgatacatggtacacttctttctgctctcagcaatgggtcccattttgctttgtaataagacccccccacacacacacatttgtgaattatcgatgaggcagccccagttgagcaatcagtcacctccattctgtctggagctacagaaagctcagcccagattctttgaatttcaccaacttggagtcctgctgaatataattgtattcagatttttgcacaatattttacaagtctaacttttttcaagctggttacttttagaggcagtgaggaggtagaaatattcagcctaactctagcctgtctgttgtcccatcatttggagacacattcccaaactagctgataaattggtgctgaacagttatatttggctctggaatgccctgaaaatgctccctagacccaggggacattaggagaaacaggaaggcaagctcatttcagcccctaaccttcactgtttttcccactacctaatgcaaatgtcactatgggaatgtaagctgtacttcggggcttacatcagctttggaggatttcaacacaccctcccactgcctccataagaatagggattatttttctcttcctatttgccagaaataaatatttataacaagaaaagattgccaagacttgaaaagtatttgaattatttaatccgcccttataaaaggatttgctctgattggtgtttgaactggctaatgaatttcaaccctggttttatcccaaatccattagacagccaccaaactgcagggaagaattctggaaactttcttctttgccagtctgaaaaggattacattgttccaaggtctacacctgtaaatatacacttatgagtgtatggttccagagcttggcttcatgctagttggcatgatcaaggcctctgaaaagacacctgaaccttttcatcaagctcttcatccctagccccctctcctggaaggcaagctcctgttggtatccagccttgcccattgaagatctggccatgtgcctccagagttgtcaatatgaagagcctcagctcctggtgtgcttccagctacattataagactagctgggcttaccttgggcaagctgtttcagcaaaacttgggtttgaattttggctctgacacaagtggtacagcaccaactcaattaactaacccttctgactttcaggttctcaaaatgtaaataatatctctctcagtggaagcatcaaacgagatcatgagtatatgatgttagaaaaaatcaacatgcatgcatgtgtatatacatgtgtatgtgtatatgtgtgtgtatctatatacacaaacaaattcactaaagcttttcatttccctattaattcctgatatctacaaagttgttaatttggtagaatgatataattaagcaatcaggcattttgaacattttaatgtttaatccctctgattttaaaccatacatccatgtagtctattttaaaggtgtggagacccatgtaataaagaagaatgacatttactgaatgcttaagcactaagtatcatgctttgtacttgaatacaatattatgtactccccacacaatgtcatcaccactgtttatagaaggagaatgtatgtccctagtcacacactagtaagagaagggcccagagttgactctgtgtgatctgaaatatcctctgcccctctctgtcccctcggtacacagcttgagggatgcctagttcccaagcctggggtgtttggcactctgagataatgacactcactggcctccaaatcctgataaatccccaaatcctgatcaaacttgtcaaactcctatagacagatgccttgcgtaaacctatgtcataggtacacacagaattctaaaatatctttggtaatggacaaaggaagtttatatttcaagattatctaaaaattacatttggctaggcccagtggctcacacctgtaatcccagcattttgggaggctgaagtgggcagatagattgagcccaggagttccagagcagcctgggcaacctaggagaccttggctctacaaaaaaaaaaaaaaaaaa

SEQ ID NO: 6119 - DNA, 756 bp, Macaca Fascicularis
  misc_feature (1)...(756): n = A,T,C or G
tgatagagtaagtagcataaatcagtattacctcaaaatacattattgaaacagaagatactatgttatgctcagtaaataattaagagatggcattgtatgagaaggagccctagactgaaagtcaagacatctgaatttcaggctggaaaactannnnnnnnnnnnnnnnnnnnnnnnnnnnnnnnntaaaatagaagaactggattaggcagtttgtaaaattcctcctaactttcacagttgatgacaagattgtcttttcatctgaaattttgaagggtatgttgctttgaagtaagtcttagtaaggcaatatattttagggcatctttcttcttatctctgacagtgttcttaaaattatttgaatatcataagaacttggtgtctgtcctaattcctttctcnnnnnnnnnnnnnnnnnnnnnnnnnnnnnnnnnctgtcaacctaccaaaaaagatactgtggcttatgggtattgctgtctcattcttggtatattcttgtgttaactgcccattggcctgaaaatactcattgtaagcctgaaaaaaaaaatttctttcccactgttttttctgcttgttgtaagaatcaaatgaaataatgtatgtgaaagcaccttgtaaactgtaacctatcaatgtaaaatgttaaggtgtgttgttatttcattaattacttctttgtttagaatggaatttcctatgcactactgtagctaggaaatgctgacaacaactgnnnntttt

SEQ ID NO: 6120 - DNA, 728 bp, Macaca Fascicularis
  misc_feature (1)...(728): n = A,T,C or G
gataggaattaggacaccaagccaattcagctgtgaaccttattcttgtacttttctttcttgctggtaattttatggagacggttaagaaacctgctctgtgttaggataaactgtataccaataattttgacaacctgtgatgagtgatgcattttacttcctgtatcttttccttcctactttgatgccagtaatttataagggatcttacagtttgaatgtgtttgaataacttcagtatactttagctctacttttttatttgactcacaactatccataggtctcaagcattcccatgtgttttaaaagcctgaagtcagtgagatgaaattcaacatcaagaatttgaagtaacttgcgaggaaataatataaagataccattggggcaannnnnnnnnnnnnnnnnnnnnnnnnnnnnnnnnnnnnnnnnnnnnnnnnnnnnnnnnnnnnnnnnnnnnnnnnnnnnnnnnnnnnnnnnnnnnnnnnnnnnnnnnnnnnnnnnnnnnnnnnnnnnnnnnnnnnnnnnntcacacatagttccagctactcgggaagctgaggcagtaagatcacttgagcccaggaggccgatacttaactgtgattgttctgctacagtccagcctgggtgacagagtaagaccctgtctcaagaagaaaagaaaacattacataatttggctacagcataataattaatttgattttctggttttttga

SEQ ID NO: 6121 - DNA, 751 bp, Macaca Fascicularis
  misc_feature (1)...(751): n = A,T,C or G
tgggccatatgaggggccaggaaatgacannnnnnnaggnnnnnnnnnnnnnnnnnnnnnnnnnnnnnnnnnnnnnnnnnnnnnnnnncctggggccaggactccgcnnnnnnnggagcaagtcacttaaacctcctgtgcctcaatttcccccttctacaaannnnnnnnnnnnnnncttgtgtgtcagcactcttactaccaagtgctgagtaannnnnnnnnnnnnnnnnnttctctatgtatctctgtatgcacacacactagannnnnnnnnnnnnnnnnnnnnnnnnnnnnnnnnnnnnnnnnnnnnnnnnnnnnnntnnnnnnnnnnnnnnnnnnnnnnnnnnnnnnngggctaacacatgggactttgctcagccatgtcccctgggatacaggggtacaccaggaccaagtggcagacctgtgggcttcagcctcggggccaggccatgcctgccaccccgtgacagaacaggttccacagtgctgcctttgcttcctgccccttgaggtgggccannnnnnnnnnnnnnnnnnnnnnngatcnnnnnnnnnnnnnnnnncttgggggccaggcaggtaaggatcaggggaggtaggggagagcaattacttnnnnnnnnnnnnnnncccatgggggcctgggagtccccatctgcaggtgggtggggtctccagcccacactaccnnnnnnnnnnnnnnnnnnnnnnnnnnnnnnnnnnnnnnnttgggggacaagaagtc

SEQ ID NO: 6122 - DNA, 737 bp, Macaca Fascicularis
  misc_feature (1)...(737): n = A,T,C or G
tcggtgctgtgatcatcacgtcagttctgttgcnnnnnnnnnnnnnnnnnnnntcccagccccggaggtggaagttaagattgtggatgactttttcattggccgctatgtcctgctggctnnnnnnnnnnnnnnnnnnnnnnnnnnnnnnnnnnnngttttaatccatcatgttctggagcccatctatgccaaaccactgcgctcctactgaccactcttcgcgaaaacgaaaacctgttctctccttcattgtgatgacatcgatgagcagaaagacactatnnnnnnnnnnnnnnnnnnnnnnnnnnnnnnnnnnnnnnnnnnnnnnnnnnnnnnnnagacaaatctcctgagtcctggcttccagaaacaggattgccnnnnnnnnnnnnnnnggctagattcttaccagcttaagaaggatattgctatcttcttagtacccggaccttaggatttccaactgttttgaaagggaaatagtaacagtgatctgcttagagtggattttcactcaagtccttagtgagtggattttggggaaaggagcnnnnnnnnnnnnnnnnnnnnnnnnnnatatataaaattcttcattatgaagttgcggtcgtttgcaaaggagaggcattcaaattcgaaaggttattttaatgtgataatttggaagacttactcaaatgtnnnnnnnnnnnnnnnnnnnncatgtatttctgcagagctctataaaggcaatg

SEQ ID NO: 6123 - DNA, 763 bp, Macaca Fascicularis
  misc_feature (1)...(763): n = A,T,C or G
taaattaatagcaatgcgtggcctcatatttctatgannnnnnnnntgatactcccgcttcctgcatgccacacactgtgctgggaattgctcatgggtcgtcctgtttcatctttnnnnnnnnnnnnnnnnnnnggcaatattagtccccctgcagccgaggaaactggccagagccacacagctcatgaggggcaaggagggcttgaacctgagtctgcccagctccagaannnnnnnnnnnnnnnnnnnnnnnnnnnnnnnnnnnnnnnnnnnnnnnnnnnnnnnnnnnnacacagcatcaccctgtgccatcccgtgcactgtgggactcagcnnnnnnnnnnnnnnnagagggggctcctgagttggatttaggcaaaaggggcagaattagtttnnnnnnnnnnnnnnnnnnnnnnngagtttcttttgattcatagtagaattccttttagatttctttccagcataccnnnnnnnnnnnnnnnnnnnnnnnnnnnnnnnnnnnnnnnnnnnnnnnnnnnnnnnnnnnnncttttcttctttaaaaaataattttttcttgcttatagttaattctagaaaggcaatactaaaggtatatatttttttcaaaatgctattttttactgcacttgataattatcctgaccctctcatctctgcgatannnnnnnnnnnnnnnnnnnnnnnnnnnnnnncggcagggttcacaccacaatttgtaaatacnnntatgtgggtctggtgtccaggaact

SEQ ID NO: 6124 - DNA, 341 bp, Macaca Fascicularis
  misc_feature (1)...(341): n = A,T,C or G
caggataggagtttagaaaaagcaccaaagctttcacnnnggtnnngcacnnnnntctaaccnnctgttttttctacccnngctatcttttattggtaaaatataaatgtataattnnnnnnnnnnnnnnnnnnnnaggattttccctcctattttgtttgttgattagcaaaaaaactacatggcccttttatgtcttggggctggaaagggagggatgaattggggtgatagaaccctggtgaattcagagttatctttctttagaaaaatattgaaaaactacttcaggataggagtttagaaaaagcaccaaagctttcactttggtttggcaccag

SEQ ID NO: 6125 - DNA, 3467 bp, Macaca Fascicularis
aaaaaaaaaaaaaacattttactacgctgactatgaccaggtgcattcaagaaagacacaattgacctaacaaacacaagctgaggcccttttgggaaggtatggccactggtctcagcagccaagtatttgctaagaactctctgcgaatccaaaattatgtggaatatgaaaatagaaaatacattctctgcattgaaaggccttactcttgttgggaaatgggtcaagtggaaggtagggactaaaagtgttgaaagtgctaaggcagaagggatcgctgtgggaaatgcatggctggctgtgattaaggacgatgcaattgggaaaggggactccaggtgaggagtgcagcattagcaaagactagcaagaagacaagtgggagagtcagaagagaagcacccaggacagaggaaggagaaggaaatcaagccaggcagtacaatggtggctctggattcaggactgaagaggccacttcgttcttcctcctcctcatgcccaccactctgctcactctttgcaaaacatgcgtgagacactgcagtcttttctcatttccatgttccatttctcatgtttaaaatgcctttcctctcttatgtctgcctccatagttctacagactataatgccccagtcatgtaaccttatgtatgattaatcataccttgaaattgatgatagaaagtagttaatgaaggacttccatattcactacctcatgtcaggagacttcccagagcctttcacattccaaactagtaatctctccctcctctgagtcccatgtaggagtagcagcagaaataataataatagtgataataccaccatttaataagtactaagcactttacctgtattgtctaatttaatatttgtaccaacttcatgaacatttctggcattcccattgtgtagataagaaaactgagactcatagggagcaagtaaattgcccaagatcacaaaactaataagtggcagagcaaaggttggaactccaaagcctaggttcctaatccattgtactatcagacaaatttgttcctctctagtggcatggattacatcttgtctttgatagttgcagtactcaccatttatccatggggaatatattccaagacccccagtggatgcctgaaactacggataggacaaaaacctatatatactatgcattttttcccctgtacatacatacatatgataaagtttaatttataaattaggcacagtacaagattgaccataataactcataataaaatagaacaattagggacaataaaggctacttgaacacaagcactgcgatactgcgatagtcaatctgaccactgagatggccactaagtgactagtggatgtgtggcagctacagcatgaatacgctgggcaaacggaggattcatgacccaggcaagatggagctggacagtgtgaaacttcatcatgctactcagaacagtgcacaatttaaagcttatgaattgtttatttctgaaattctccatttaagatttttgaactgtgattgacctttggtaacgaaaactgtggaaggtgaaaccaaggataagggagaactgctgtatttatttatgtttatgtcttcattctataagacttcaagctccttggtggtgtagagcatgtgttattcacctatattaataataaataacatttgtctagcaaattagtaatttacaaacccctttaacacactagtgcatggaattcttaccacaatcttgtgaagcaatattcttgttttcactttgttcttaagaaaatgaaattcaaggacttaagtgatataatcaaggacctattgctggtaagttgcaaaacatccccaccagcatttctcaaacaaaatctgatggttttggagttgttttataaatgccccagctctctcactcctccagggagagagcatggagctgtgtgttctacactagttcccagagttctccagcaggaatgagcttcagttatccacagtggtaatttgtttaatcagaaaggctttattgactccttctgtttttctcttccccacatctagactgctgtttcctgggatcaccttccaaatcaactacttgtactcaatttcttttctcagagtttgcttccagagaaaccaaaattaagacattcttctaaaagcactgtttctcccaattggttggacaagtgaggttaaggaggaacctaaataaatcaggattttttgactatgtgatttccatttttaatttttcaaacaaaagggagagggagctgttataaagaaaacagtcatttaataacctgcagcctgttaaatttattgcaagtcaaaacttctgcttaaagggacccaggtatcaaactgacagttgccttggaatctaaaatagaattggtgagaattgactagagaaaaatattttgcatttctctggttatttccattacagacagaaatattctgacacttgctcctttgctctgattacagcttaaggcaatttcagaaattctcaaattgaagtggaacctccacttataccaagtagcatagctccttcttagtgtctcaaagccttagcatgaaatcaaggatttggatgtggtcaaggggtattaacagaaaaaaatgagaacaattaaatttgatgaaggagtgtccagggaaacagagataaaaatgcatatgcataaatgcatgcacagcaacccacgaagtccacagaataactaacattattttgagttcacaggacattttcattttttgtccaggaaattgtccgaatccagtggtggcttcattattctcataacatttctggcctctccccagaggggaaagctgttaacacaggaattttaagtccagtggcaaagctaggctgatgccttaagatagctggtttgtgaagattacttcaggttttgagaaagcatattcctcaaaatcttggcctaattttctgttaatgaatgaggaagtacttttacatctaaaaaggtgctatatagctataaatatttttgttttatatggtttgttaaatcatctgtccaggtagagtcctattctaaattggaggtcaggaaccggttaggagcactggttaagatgtcaaagatgggccaggcaaggtggtgcatgcctgtaatcccagcactttgagaggccaaggcaggcaaatcaggaggtcaaaagatcaagaccatcctgaccaacatggtgaaatcatgtttctactaaacatacaaaattagttgggcatggtggtgcacgcctgtagtcccagctacttgggaggctgaggcaagagaatcacttgaacccaggaggtggaggctgcagtgagccaagatcatgccactgcacttcagcctggcaacagagtgagactttgtctcaattaaaaaaaaaaaaaaaaaaaaaaaaa

SEQ ID NO: 6126 - DNA, 972 bp, Macaca Fascicularis
  misc_feature (1)...(972): n = A,T,C or G
tgagtttgttttggtttttaagtcccatctatataattgactctgatagcaagaggtggnnnnnnnnnnnnnnnnctgaggctgagctgagtagccctggannnnnnnnnnnnnnnnnnnnnnnnnnnnnnnnnnnnnnnnnnnnnntcttcaattccttgtannnnnnnnnnnnnnnnnagaactgtgggccacagaatgagcataacaaagatgggcagaaaaagaagtattatttttgtagttttctttcataatggaagccttatgctattacagactgtggttttccagtcttttgattaagccttgccagttgtgtgccgctgcagcaccaaagaaactgttttgcagcctgtcacctcctccggcaggcagccatcctggtctcggagagtggggtcagcaccagactggagcaccacctctacaatatccacaaactcacaggcataggcataatgtatagctgtttggccttcattgtcctgacagttaatgtcagctctatgttgcagcaagactgtgactagctccttatgtcctcgatcacaggcccagtgaagtagagccctaccctcttcatcttttacattcacatccacatttttcgatttgatggctttggttatatggtcaatgttgttttccctgcagtaatcaaatatatttttgtcttcttccctgatggtttcttcatgatatagagaactaataactggcccaccaaaaccagtatttgcttcttttcctttcttctctggtatctgaggattccaacctggatctagttttttaactactgcaatatattcccgcattgcttggctggggcttgaatcaccaagtgctttccatgcttcccatttttgctttccttcaaaatcaaagaagcttggtttaggagtattgcaatttccaacnnngacctgtttgtacctggcatacagatacagaagctgctccctgctg

SEQ ID NO: 6127 - DNA, 682 bp, Macaca Fascicularis
  misc_feature (1)...(682): n = A,T,C or G
tctcacgaagccacctcgagcagcagcggcggcagcacgtcggccactgggcgcctgggccgcagtaagcggaagaggctggaggtggaggagcccttgggcagcggccccagcgtcctgggcacgggcacgggtggtggtggcggcttccacctggcccagcaggcctcggcctcgggcagtgtcagcatcgaggagatcgacctggagggcaagttcgtgcagctcaagaacaannnagacaaggatcagtctctggggaactggagaattaagaggcagatcttggagggggaggagatcgcctacaagttcacgcccaagtacgtcctgcgcgctggccagatggtcacagtgttggccgatgatgtnncagtggcccacagccccccctcgacgctggtgtggaagggccagagcagctggggnnnnnnnnnnnnnnnnnnnnnngtcctggttaacgcggatggcgaggaagtggccatgaggactgtgaagcagtcctcagtggtgcgagagaatgagaatggggaggaagaggaggaggaagccgagttcggcgaggaggatcttttccaccaacagggggacccgaggaccacctcgagaggctgctacgtgatgtgaacccacactcctcatccacacacctttcttacccagagccactgaaaactatttt

SEQ ID NO: 6128 - DNA, 750 bp, Macaca Fascicularis
  misc_feature (1)...(750): n = A,T,C or G
gaaaaccatgaatnnnnnnnnnnnnngtgacccgggcnnnnagcggaccaagacgctcatggagagaactgtttccttgtctcagatgttaagggaagctaaggagaaggagaagcagnnnnnnnnnnnnnnnntcacaatggagagnnnnnnnnnnnnnnnnnnnnnnnnnnnnnnnnnnnnnnnnnnnnnnnnnnnnnnnnnnnnnnnnnnnnnnnnnnatgaaagcgagagcaaggttcagtcatttttagcatcacttgatggagagaagctggaactcttaaaaaannnnnnnnnnnnnnnnnnnnnnnnnnnnnnnnnnnnnnnnnnagagaatgaagaaagtcaagaagaacaaggcttagaagaaaagggagaagaatnnnnnnnnnnnnnnnnnnnnnnnnnnnnnnnnnnnnnnnnnnnnnnnnnnnnnnnnnnnnnnnnnnnnnnnnnnnnnnnnnnnnnnnnnnnnnnnnnnnnnnnnnnnnnnnnnnnnnnnnnnnnnnnnnnnnnnnnnnnnnaggaggaaacaaagaagaaagaaaaggaagagaaacctcaagaccctcaagaagacaaaaaggaggaaaagagaactaagaccatagaggaagtatacnnnnnnnnnnnnnnnnnnnnnnnnnnnnnnnnnnnnnnnnnnnnnnnnnnnnnnnnnnnnnnnnnnnnnnnnnnnnnnnnnnnnnnnnnnnnnnnnnnnnnnnntcaggaccaagcaaaagttct

SEQ ID NO: 6129 - DNA, 101 bp, Macaca Fascicularis
ttcctgagccctcctgctgctttggtgtctgacggtgatgctggggtggcatctctgcccgtgaatttctgtatgtgtgtgctgttacctcacctgcagat

SEQ ID NO: 6130 - DNA, 673 bp, Macaca Fascicularis
  misc_feature (1)...(673): n = A,T,C or G
gtatacagcacatctgcaatcattcaggaggtcctgtgaagtgtggtgatgcatctaacaccttttgctnnnnnnnnnnnnnnnnnnnnnnnncttacaagattatactaaccatttttaaagtgcacaaaaatattattattagtcttaactaaaattacagattttataatgccctgcaactctaaaccatccttttgtttacacatttttgtatggtattttaagattatcacttcaaaatttctataaccttcagtttgtatagcactttcnnnnnnnnnnnnnnncccacatacaaaatcatttcttttacaaaatgatttaacatggaatcatgtgtcagagcataaattttgtcacttgggacagtagctttccagctaagataattgcgtgaactctgtgaaaacnnnnnnnnactnnnnnnnnnnnnnnnttttaacctataaataacccctttcaatatacctggtttttacagcatttcaaaatatgtaaaaataacttttcttggaaaatgtgtcatgaagtcatttttcattatttgtactaaaaaatgttttacgtacgcctttcgtgtttctcttgttttttgttttnnnnnnnnnnnnnnnnnactctccnnnnnnnnnnnnnnnnnnagaaatcaaatttcctgggtgtgtccatg

SEQ ID NO: 6131 - DNA, 713 bp, Macaca Fascicularis
  misc_feature (1)...(713): n = A,T,C or G
gaaccccctgcagagggcgggcannntggcatggcccagagaggccagggggannnncagtgccctcactgcctggagtgcttcagtgacgagcaaggtgaagagctcctcaggnnnnnnnnnnnnnnnnnnnnnnnnnnnnnactcacccgtgcccttacggccccctggcccggtgcagctgccctcagggacagggtgggtactctcagatgccatgggttgagctctcctgagatccaaggcccctaaataggtgcggggcactgtgatcattccctttggnnnnnnnnnnnnnnnnnnnnnnnnnnnnnnnnnnnnnnnnnnnnnnnaggctggaggcggagatggggttaggaacatctggcagagggaggtcctggtctgtnnnnnnnnnnnnnnnnnnnnngagcaatctagtgctagcgtaccagcccctcccctagcctgcacctgggcatgccgcannnnnnnnnnnnnnnnnnnntgcctatgggggtcacttgtatggtccttagggtggaagccccatcctgttctgtagcataaggtgtctcctctctgccttgaaccaggaggtttgtccaatggagcattgcggctgtgcatcacactaggggggccgcccccgccattgcagagccgcatgtctgccctnnnnnnnnncatcgcagtagcactgtcatctgtccggaagttaaagcacacttact

SEQ ID NO: 6132 - DNA, 730 bp, Macaca Fascicularis
  misc_feature (1)...(730): n = A,T,C or G
ccacgnnnnnnnnnaggtggctgagctcagattgcagctgctaagacactagccacttactgagagaaagccaggctgcttcaaacccagggcctgaagcaaaaaagcatcacttctggtcagggagtcnnnnnnnnnnngccttgtgggaggtcacactggcatctaggcctttgcctgcattgcagaaggagagccgggtcccctcctggagaacgctgcgttccccagcccctcaccagctttgccaccacacaggctttcgaggcaggaggccggtaagacacagctctagacccaaagcaaccatcagctctggggccctgtgggagaggagcacttttagaacatggaaaagtgtggtcatcccatcattagacagcacacatcctacataaataaagtcatatggggaaggaggttggggagggaacaaaaaattggcacagacattgatannnnnnnnnnnnnnnnnntcaaggcgacagatgcacatcatgagaccagaggagacagagacaaaggctggatttggcttttctaagcaacatgtgttcctgcgcagggctggatggtcgctgagacagagatggaagccaggacaggggagcccacagggcccagataggtacagagggcagaggttcctgttctgtcctcaccacccacgagagtgannnnnnnnnnnnnnnnnnnnnnnnntcaccctagcaagaaaaaagcaaaacaa

SEQ ID NO: 6133 - DNA, 758 bp, Macaca Fascicularis
  misc_feature (1)...(758): n = A,T,C or G
tatagtactcancnnncatnntnntccatgtccttgctgatgctgtgatgctcctccaagttctccacctatgtccatctgagcacttggtatttctactctagtgtaagaaggtcctggtcccaagtctcctcccaaacatttattccaattgatcatccagatgcccctcctttgccatctctctttgttccagcaaagaacaccacccgtcagggagatacagtggactccttgtcctcatcccgactccccttttctctggtactcacaggcctcagtgagtctcttggtctctggatgcagcacaggtcctggacttgagcgcatctctccatccccacctccactactcccctggtccaactgtcgccattctcaccctcgaatcactgtcacagcctcccagcttgtatccctgctttaccatgatccctgcaggctgcctctgaactcttacattgaaatgaaactcttattgtggggagaacccctccatcctcagacccctggtaccctttactcacttcccactctggccatcgttcaatgagttcaggccactctggcctctgcatggtcctcacgcccaccagacttgtgcccccttcagggctattgtcagttccacccccttttcctacagagttctccatgtcttcattcttcaggtgctgcctcctgacagaggccttgctgaccacccctgccaagattgccccactctcccacgtgtcactcccctccctgccctcttg

SEQ ID NO: 6134 - DNA, 672 bp, Macaca Fascicularis
  misc_feature (1)...(672): n = A,T,C or G
tttatgcacctagacctagctgcttnnnnntagagccctactgtacagaatagcttttgtctgctcttttctattctgctccctgctctgtgaggtagattcccttgctctcttgcttttggttgggttcaacaaatgggaagcaccagtgggagactagaagttgagaggaaaatgaaatgatgttatttatttccctggctcctttcctgccatgtcatcatcagttgactgtgttcctctacaaaatagtaccctatcaggaatcctatcccttctgttcccaagcagttatcccagttacctcactaggtttagttcctgctccctccctttaccccttttcacttagggctggtaatagcttacagttatgactagccccagggtagttcactaccacttgttgctttccctaaaccctgctaatacatttgtaatactgaagttgttttattacagtcttcttaaatgtccccatttgaagttgccttctatttcttttggggactctgataaattcactcgtttgggtgaaataatagcacatttcctgaagtctatacagtgggacacatcatgtattatggggggaagagttcttggtgaaattagtttgctgtacattactttgtttccctcccagggattcagaaggcaaaacatattaaa

SEQ ID NO: 6135 - DNA, 676 bp, Macaca Fascicularis
  misc_feature (1)...(676): n = A,T,C or G
gacacggacctgcnnngagatttcctgacggggaaaagatttctgtccatttttttnnngtgnnnnnnnnnnnnnnnccttttcctatgtaaatattatgatgatggatcaagacataagtaaatgaacctttctgcctnnnnnnnnnnnnnnnnnnnnnnnnnnnnnnnnnnnnnnnnnnnnnnnnnnnnnnnactcactttaaaacctctcttnnnnnnnnnnnnnnnnnnnnnnnnnnnnnnnnnnnnnnnnnnnnnnnnnnnnnnnnntatcttgtatgtatgtgcgcccctcctgcccccaaagtgctgactatgggaaaatcttnnnnnnnnnnnntttagacannnnnnnnnnnnnnnnnnnnnnnnnaagcaaacctgatacaatttgcccaaggtaaacagtttgaaaagacaaatgggcctgnnnnnnnnnnnnnnnnnnnccccaagagctgttaggnnnnnnnnnnnnnnnctttcccccctccctgcttttctggttgagatnnnnnnnnnnnnnnnnnnnnnnnnncaggggaggagggcggnnnnnnnnnnnnnnnnnnnnnntttctacatgnnnnnnnnnnnnnnnatttaaggcctgcactcttatttcactaaagaaaaactaatgtcagcacatgttgctaatgacagtgnatttt

SEQ ID NO: 6136 - DNA, 1903 bp, Macaca Fascicularis
actgtatagctgccccagtgagggcgcagactgtactggcctgcgcggagcaaggcggtgtttctgcccgcacagagaggaatgcgcagctgaagagagaggtgggcagcaggctcggtcacctgccaggtgaccacatggccaggtgccgccaccactcgggctacgtggctgacgatgaggccagccactccatgtgcagtgcacgagtgcagctacccaagaagccactggttccagagatggggccagcctccaagctgggccatgtgccacacccaccatccacatgtggcagctcagcgctccagaaccaacgccgaaacaagaggcaccctcagccctttagccactttctggatttcctgactgagagccatgtcctggacagcctggagacagtggtggagaaggcgactgagcgcatggctgccatgaagaccgaggctggggtgccgcttgtggaggtgcaggacccagtggaggtgccaagtggtgggcggcgggcacatgcccggcccagcctcagcactgtacaccggcaccgtgtacggccgaccctctgcactggacaccccaacaactacccatccagctccagctccatgtccgactcccatagcagcctcatggctggctggctgggctcccacagccgggacagtgacctaggtgcccaaggtttaggctcactgccacctgtgaaggacaggctcctgctggagaagaatctcaagcggctgctacagctggagaggaaagggaaaggcctcagtcagtcctgctccaagagggactccctgctgtgggatttgctgggcagccagaccagctttcagtggacccaggagcagcccctgtcctggttctcggagctgctgggctcaagctctggtgtgcctgaagcatcagagccgaggcctggagaacaggagccgatctgcaaacgagagttcaataaagagatcaagtcgttactgagccagctggagtccctcgacctgcctggctactgtccgctccgtgagccccatcgcacactgaacttcctggctgaccaccgcctcttccctgccctgcagagcgtcgtcaaccaggctgtggacaagctccgcggtgcccgctgccgcgacggccgtcctctgttccccaccagcttggagcccccctcagagctgcaggttcaacgcaatctgccgccgctgggctctgagccggctaaacccaccaacagcgggcagccccaccccacagtctccagccccaagacgcctcagagaaaacacaaggacagaggaggctccccctccatgtctagtgcccaggtggccaccagattcaagctcaaggtgacacccatggagaagcccgatatccccagcccctcactccactccagggagaaggagcctgactcagatcccaaattacaaaacccacctgtttccctgagctccagacagagggcccagccctggcggggcctgcacctcaccctgcccgcgcccgggatagtggtggaggtggcctgcggccagggccacctcagggttgtcacacctccacttgcctgcccctacccccactcttcctgctaccttctccctgagctctccccagttacttcctcatctccctcctcactgtgtccagaggtgacctcctcaaaggtaggaccggacatgagtttgcaggagaaaggctccttgacccaccactcctagcagccactatcactggcaggtgctcaaggtcaaggtttcttgccctgcactgtggaaacctcctgggcaggggtcaagctgatgggggcccgtgaatcctggcctagctactaccaggtgttgtcacagataaataaaggctatttatttatgctgggaaaaaaaaaaaaaaaaaaaaa

SEQ ID NO: 6137 - DNA, 709 bp, Macaca Fascicularis
  misc_feature (1)...(709): n = A,T,C or G
cagcatccacacaggggctaacccagcctgggaccctgtgtgctgcccttattcttttgtgtagcacatgtgacaaggacggatgtatcaagttgatgattatggtactggggtcctgattccagcattcatgagtcagggtaaggtccctactaaggacagaccttaggagggcaattggttcaggacacacacctgctttcctcctgtttcctgatcctgtcctgggtctgtagtcataattctggaaattacttttgggtccaagactaggaggttcatctaagatcttatggccctgcatcctcccagccccctcacaggacattttcttcccacaggtggaaaaggagggagctactctcaggctgcgtccagcgacagtgcccagggctctgatgtgtctctcacggcttgaaaagcctgagataactgtcttgtgnnnnnnnnnnnnnnnnnnnnnnnnnnnacctcccttttgtgacttcaagagcctctggcacctctttctgcaaagatatctgaatgtgtctgcatccctgttagcataatgtgaggaggtggagagacaactcacccccgtgtccaccatgacccgtgttcgcacgctgacctgtgtttcctccccagtcatcttttcctgttccagagaggtggggctggatgtctccatctcagtctcaactttatgtgggctgagctgcaactt

SEQ ID NO: 6138 - DNA, 2108 bp, Macaca Fascicularis
aaaaatgatcaaaggccaggatgagaatgaatgaggccagttctgtgaacacccagtgactaacacatggctaggagaaaaggagtatcgattgctgttataaagcattaccatgagttcataatttctagccatgaactcagatacgtttatgaagtaatgagatattttagcatatttttctcatgtgctaaatgttactcctaaaacaacaaggttgaaaaatatgtttaatatatggcaaaatagacatagatttaaaaatgcactttagtatcttgctatttgattgtgtggtcctcagatgagcagcattggcatcgcctgtaagttgttagaaatgaagctaatgcaagatcttggcccccaccccaaacctcacgaatcaaagtctgcattttaataagatctttgtatacacactaaagtctgagaagcactactttagcgtcttaattattatttcattattagctgtaattaattgagaagagtagagaagtacatttcaacaaattaaatttctacctatgactgtgaacgataaatagtgttgatatgcaataatcttctcttttactcgtatctttttatgtctgtcaccctatatatccccatataataatgtacctatgtgtgattaatacatttaaatatatgtggctttaaataggtgttctctccagttccagtctttatgtctaaaaagataacatcttttcattttagaccttggtaatgttttctgtgcttttcaaaaggatgtcctcaacatcacctctgaaaatgcattacgacctcctgtgcctctgccatctcgttgcacactggtttcggtggcatgtagcagatggaatagaaagacgtggggttgggaaactcatagattccagaggaaatctgaggcacacaggaagctcgtttagcttgggcatacaagcattatttacctctttaatctgaattaaacaagtagcagtaagtaatgattcagagttttgttaagtggcagaatattttatggatgggtattttcttacaatgcttctgacctaagaaacggcagcctatcaacaaataattattaaaacattccttttcccaaatagtattggatctagttatctgtttaaatacccttaggttgataattagcaacaagagcttagtgtactttagttacaaaatcatctgctgttctcaaactttagtgtgcgatagaatatcagtggatgttgctcaaaatagatactccagaccccactgagattgtgatttggtaatttggggtgaggtccaggaatcttttgaaacaagcattccaggagattttgttgttggtactaagaatactacattttgagaaaacaaaaatgaacaaaaaagacattgctttaagataggggtgtccaatcttttggcttcccggagccacattagaaaaataaatgtcttgggccacacataaaatatagtaacactaatgatagctgatgagcttgaaaatcacacaaaaaaatctcataatgttttaagaaagtttacaaacttgtgttgggctgcattcaaatccatccttggctgcgtgcggcctgcgggccaagggttggacgaacatgctaaggcattatattcttagcaatttactgttttcttttggtatcaatattatcgaaactgaagccatgcaccaggctaatacctaagcttagtaaaccatagattgatccaccaagcttcttaaagaagataatattagaaaatgattttgtgtccattgtaggatttcctattctaagcattgacatatgtaatctatttggccaggcacagtgtaatgctagcactctgtggggctgaggtgagaggattacttgagcccaggagttcgagaccagcctgggaaacatatcgaaaccccatctttataaaaaatacaaaacttagccaggcctggtggtgcacacctatggtcttagctactcaggcagctgaggcaggaggatcacttgagtctgggaggttgaggctgcagtaaactgtgatactaccattgcactccagcctgggcaacagagtgataccctgtctcaaaaaaaaaaaaaaaa

SEQ ID NO: 6139 - DNA, 2702 bp, Macaca Fascicularis
tactcaccaggtgcacgctgtcagctctgtagaagattccatcttcatggagtcatctcatggtccactttttcttgaagccaggtaacatttccaatgggttggtctagttggaatttttccaacttgaaaaacctaagcgttttcttctctgactttttttttaatgaaacactgcctgttggaaaaactaacttgcaagctggaatgaatctgtgatatcactttgctttgtaagaaataattatgtgaggagtgatttttttaaaaatagaaactggtgagggtgagaattggagtgttgtgtcttgctttgttgtggtgttaagcatggagcactctagcttgtgttgtagacttttgtcctagggatgtacagactctattttgtgataactaatctgttcactttgactgttactgaggcaaagtagttttgtgcagtttgagttcttggctcttaactcttttgcatatgtcagtaccttggtcttttaatgatatctgacttttgcctcaaatctgtttaacttagttataaaataatctaaactagacagtctctctaagctcttaattttgtaagttttctttctttttttttttttgagatggagtctcactctgtcacctaggctagagtgcagtggcatcatgtcggctcactgcagcctctgtctcctaggttcaagcaattttcctgcctcagcctcccaagtagctgggattacaggcacccaccaccatgcccggctaatttttatatttctagtggagacagggtttcaccatgttggccaggccggtctcgaactcctgacctcaggtggtccacccgtcttggcctcccagagtgctgggattacaggcatgagccactgcacccggccaattttttaagttttctacatcatctcaattgtgttcacttagtaactaagacttcagtgacatttaaataaaacgttctgaccttttctttagagctttatcctcttcatggtaagctgtcatacttgagactcttgagggtacttactaagcatgctcacaactcagtttgtggtacaggctgtcccttgtcatgcatactatggcttcctttatgtcattgcctttcaatccatcacgttacattatgtccgttagttggtaccattatcactgcctgtctgactaacaccagggattgtttttttttctctttaattagcagtaaccaaattaatgcaaactgataaatcttcccctccccctttcggttttttggggtggtgttttttgtaaatttttatgaggctcagtgtttccaaagttgactttaatcatttctcttagaaaagtattgtcacttgtcacttaactgcttacaaaatagctttcagttcctggggataggagattgcacattatttaaccatgaatatgatcctcaaaattgtgggaacaccaccttaattttcattttgaaggaccatatggtattacaaaatgctagattgatttgtctaacttctttttttcccgtgtgaaaaaaacgtttacaaatttggatgtctactcccacaaagtagctaattgtctttattagtgtctacattatgtcattttcttaaagtaatgattaagtaattatatacatggctatattgatcaatgtttttgataaacattactgtatgcaattagcttgacaagtgtactaatacttacttaaaagtagactgctaaataactggtataggttttcatactaatcatgttttaagtaataattatattttctgactacaggcacgtgacacaagctgacctcaagagctccacgttttggcttcgagcaagttttggtgctactgtttttgcagttttgggctttgctatgtacaaagcattactgaaacagcgatgatataaaaagaaatactggccctaccaaaaacaaatacttttatgtacattctgaatgctttaagttctgctagaaatattgagatatttatacatgcagagttactttattaatatttgtaattcatgcataagagtattttaatgatagttataactgcagtattggctagcatatggaaagaaaagagctaacagccaaactaaaatggctaaattccagaggccaaaagggaatattttgtaaatatatgtacatattcaggtaagatacggtctcccaagctgagttctagaaatggtgtttctagacatttctaaatggtattgttagtgctcacttggctcactctcctaggtttaagttagcccagagattgtatttactcatggaacactttatttatttcacatttactcagaatgatcctttggattctataaggacatgaggcacaatttgccattctctctccgtttttaaaaacataagcagtgtcagcttaccaacatgactttttttcagtcagttgtggtaggccagccttgaagccatcgcacagtctagaaaattgtgtagctgagtgtgcagctcacctttaagggtgaagtaaggtaaaagcaattagcagagacgttatctatgtgattatgttgcttcttttgtcagtatgttgaattttatagccctttcaatgaaatgaaaaaaaaaaccaatttgtatattaccaatgtttttagtttaaataaagagtcacccttactactgttgaaaaaaaaaaaaaaaaaaa

SEQ ID NO: 6140 - DNA, 557 bp, Macaca Fascicularis
  misc_feature (1)...(557): n = A,T,C or G
cccggcggtcatcgaagtgaccaacgggggtccctggggcgactgggcctcccctgagatgtgtcnnnnnnnnnnnnnnnnnnnnnnnnnnncgctcaaggtggagcctccccannnnnnnnnnggcgatgacactgcactgaatgggatcaggctgcactgcgtgcgcgggagcgtcctaggcaacacgcaagtggtggactcnnnnnnnnnnnnnnnnnnnnnnnnnnnnnnnnnnnnnnnnnntcgcggcggcgcctacctagtggctttctcgcttcgcgtggaagcacccacgaccctcggtgacaannnnnnnnnnnnnnnnnnnnnnnnnnnnnnnnnnnnnnnnnnnnnnnnncaggggcctgggctgagctggggagactttggagactggagtgacccttgccccaagggcgtgtgcggcctgcagaccaagatccagggacctagaggcttaagcgacgacactgcgctgaacgacgtgcgcttattctgctgcctcaattgaacggggccgccgccgccgccgctctctcccgggccaggaggct

SEQ ID NO: 6141 - DNA, 702 bp, Macaca Fascicularis
  misc_feature (1)...(702): n = A,T,C or G
cgcccatattcagttttgtnntacttcttccccttnnntccagatgataacatcacttctctacagtaagtgnnnctgccagcccaacccgggagcgcnnnnnnnnnnnnnnntctggtctatagtacagtgcgcggcgttaggccacaactcaaaagcattatcttttttagggttagtagaaattgttttatgttgatgggaggtttgtttgattatcaagatgtacagccacagccttttaatttgggagcccctgttgtcattcagtgtgtacctctacagttgcaaaaagtatcagattctactatctgtgggttgnnnnnnnnnnnnnnntcttaaattgtatattttttggaaaagtttatatactctcttggaaatcattgtgaaaagatcaagaaatcaggttggccatttctttaatatccattcatttcatgttagtgggactattaacttgtcaccaagcaggactctatttcaaacaaaattnnnnnnnnnnnntggcctatatgtgtttaatcctggttaaagataaagcttcataatgctgtttttattcaacacattaaccagctgtaaaannnnnnnnnnnnnnnnnnnnnngcaaagattttcaggattcatatacagatagactataaagtcatgtaatttgaaaagcagtgtttcattatgaaagagctctcaagttgctga

SEQ ID NO: 6142 - DNA, 527 bp, Macaca Fascicularis
cgggggcaagaaggtgaagaaggcggccaagcccagcgtccccaaagtgcccaagggccgcaagtgagcgtgccggctggtcagagcggccggcgtgggcttttcaatgtttttgtttttctaccccaagtgacgtagattttgtacggctcgccctgtccgggtccgcggggcctggtatgagcctcagggaggggccccgggtcctctctgtctttcccctcccccaacgatgtagcgtttttcgttgtttgctttaggtttttgaaacagccctggcgacgcctccattggctctcggccttggcaacggtcgtcgtcatggttactggcccctaggcgctggtggccgaggccgcgcctgcccaccaggcgggggccgctggttggccgggcccaggcgcgcggggacgcggaggccgcgcatcccttcccggctccccaccctccctgcctttgggtgcgcgacaaacaatcgcttagggctcagggctgcgcggcgcttcccttcattccatgggcctatt

SEQ ID NO: 6143 - DNA, 763 bp, Macaca Fascicularis
  misc_feature (1)...(763): n = A,T,C or G
aggtcattnnnntgagtaagctcaatgcgnngnnnnngagcacacagaaagagaccacatggcgcacggggctccggnnnnnnnnnnnnnnnnnnnnnnnnnnnnnnnnnnnngtgctgtacgctgtggacagctacaaccagcggaacgccaacatctcctacgccttcgacacccacaccaacacacagatnnnnnnnnnnnnnnnnnnnnngaatgagtattcctatacaacccagatagactacaaccccaaggaccgtctgctctatgcctgggacaatggccaccaggtcacctaccacgtcatctttgcctactgatacccttgtccccacaagcagaagcacagaggggtcactagcaccttgtgtgtatgtgtgtgtgcgcacgtgtgtgtaggtgggtatgtgttgttttaaaaatatatattattttgtataatattgcaaatgtaaaatgacaatttcggtatatttttttatatggattgtagatcaatccatacgtgtatgtgctggtctcatcctccccagtttatatttttgtgcaagtgaacttctccttttgaccagtaaccaccttccttcaggccttcagcccctccagctccaagtctcnnnnnnnnnnnnnnnaaaaggtttcatctgggtcttgcaggaggcagacaacactaggagcagaagtgaaagaggcaagaaagaagtgctgtgtggcggtaaaaaagttttaatgtatnnnnnnnnnnttaaaaacccagaaa

SEQ ID NO: 6144 - DNA, 758 bp, Macaca Fascicularis
  misc_feature (1)...(758): n = A,T,C or G
tttccactgtgtnggtcancccnntgtgtgntcttcaagggtcannnnnnnnnnnnnnnttaaacatgggcccaaactttccagatttaaagttaacaggctaatgttagttaagctcagagggaaggcttttcaatgaagtgagtttaagagaccagannnnnnnnnnnnnnnnnnnnnnnncctttcctgtttcatgttgttaatacgtcnnnnnnnnnnnnnnnnnnnnnnnnnnnnnnnttnnnnnnnnnnnnnnnnnnnnnnnnnnntgaatagtatctccgaagtctgtacttagagaatagcatctctgaaatcctatgtattgttaactaaaattagaaatcatttgtatttcttttgacttgcagcttgttagaggcttcttagtcattagctagaaatgtattttttctcttcnnnnnnnnnnnnnnnnnnatttatgtaaccatgtggttgtcactggggaggcactgagtgttaaatatcataggatgccagaagcccacaagaagataagaacactccggtgaggacctctgaagagaaacagcaaaagcatcccnnnnnnnnnnnnnnnnntgggttattattgtcatggaggtgaatgaaggttgatttaggagagcgtattataatgtggaggaannnnnnnnnnnnnnnnnnnnnnnnnnnnnnngtttactcctttgagcttggttggnnnnnnnnnnnnnnnnncctgctctcataatgctggaaggataaagagatca

SEQ ID NO: 6145 - DNA, 2440 bp, Macaca Fascicularis
  misc_feature (1)...(2440): n = A,T,C or G
aaatgaaaattcagaaataaaccagctgacgagaaaatctttacaagattattattggcaaataagtaatacaaaacagatgtatgacttagaaaggggaaaggacctctccctactacgcagtatattacgaacttggaaacagattaaatctcttcgacagcgacaagggtttacaagcaccccaataaagttacaggttcagaggataaaaatgaataaatgtgatgaacaagagcaaatctcagaaatgtctgaaattgagaagaaaaatgaaggaaaagaacttaatgggaaaaaacaggagagcctctcatatctagcttcagatgaaacagaaattgaaagaataaagccaattaccttgaggccacaactttctttcactgcagaattaacaagcttatccaagtgttcattatgtgccttttcttcttgagggaaatggaactgaagaactctgtcttttgacatcaggaaaacttagctattctctatcatggagcttagatgaaaatggtcttcctctgatacctatgtcacagtcattgagatcttcttactgcagtatgttaaggaatgtagatgcgagaagtgttcctggaattccatggctcattaatgaacagaagctttttgaatgggcaaatgaagtcagaattgatccaaataatccagaatattctgatttaatggaatttgttatgtacatgagacttaaggggcaggatattccaaagtattttcgtcttgaacagttgcaagatgaatttaactttgtttctgaagaggaaatggcaaagagtaaacgtttccagctattgcaacttagaaatgcaggtcaattagataatttccttctacagcaaatgcccctccatgacacagagattccagatttactcttccaggtatttggtttctatttgaatatggcttattgtatgataaagttaacagtttgctgctttaaccctatcttaatttatttctttttttttaagctaataatctgtagacagatttcctcccttctctataggcattaaaaatgtacgtatctcccaaattccataaattcttcagcttgactttacaatttagtgttgtctagtctattcagtatttagcagccaaaatcctttaggcatattctaaatttatgtaactattgtatttttgttattgtaaaatgtatcacagatttaaaagcggctttgggagtaagggggagagacactaccgcaataaacattacttataaggcccatctcaatgttagaatctttaaaatatttctaaaagaaaacaaaagctggaatgcacgataggttctcaccagctggtgccagccagctctagcacactatcaaataaagctagcttttcatattagttgctttaagtttgctacttggtgaaatttggatatggatcaaatattagataatactggagaattgctggtggtgcttatggcattgtggttatgtagaagcacgtccttagtctttggagattcatactgaagtatttatctagagatgcttaaagtgtcatgatggctataatttacttgagaatatgttagccgaaaataaaataaataaaaacaggtaaaacacatatgataaaatattaattatttaatcaatggggtagggatatgaattttaatatttctttttttcagtcaggtgcagtgactcatgcctgtaatctcggcactctgggaagccgaggcagaaggatagtttgagtccagcagtttgacaccaacccgggcaaaataatgagatctcatctctacaaaaacataaacaaaattggctgggcatggtggagcacacctgtggtgccagctgcttggaggctgaggtgggaggatcacttgaggtcaaggcnnnnnnnnnnnnnnnnnnnnnnnnnnnnnnnnnnnnnnnnnnnnnnnnnnnnnnnnnnnnntaaaaaaaaaaattatacacacacccacatacacgtgtgtgtatatatatttttacttttctacatgtttgaaaatatgaaaaaaattaaacaaaaataaatagcatctaatataccagtaaaaccccactaaaaatgtaatttaacaaatatataggccgggcgcggtggctcaagcctgtaatcccagcactttgggaggccaagacgggcggatcacgaggtcagnnnnnnnnnnnnnnnnnnnnnnnnnnnnnnnnnnnnnnnnnnnnnnnnnnnnnnnnnnnnnnnnnnnnnnnnnnnnnnnnnnnnnnnnnnnnnnnnnnnnnnnnnnnnnnnnnnnnnnnnnnnnnnnnnnnnnnnnnnnnnnnnnnnnnnnnnnnnnnnnnnnnnnnnnnnnnnnnnnnnnnnnnnnnnnnnnnnnnnnnnnnnnnnnnnncaaaaaaaaaaaaaaaaaaaaaaaaaaaaaaaaaaa

SEQ ID NO: 6146 - DNA, 751 bp, Macaca Fascicularis
  misc_feature (1)...(751): n = A,T,C or G
tccttcnnnnnnnnnnnnnnnnnnnnnnnnnnnnnnnnnnagnnnnnaagagcaataaaaactannnnnngaatgtttggggttttttttttttttttggaggagggtggattttgcttttcatccacttcagaaggaaaaggggaggagagctcnnnnnnatttttaaattaaattcataaatcccagagtagtattttttttttctttttcctttacactctacttctgagctgaattcagttaatgttnnnnnnnnnnnnnnnnnnnnnnnnnnnnnnnnnnnnnnnnnnnnnnnnnnnnnnnnnnnnnnnnnnnnnnnnnnnnnnnnnnnnnnnnnnnnnnnnnnnnnnnnnnnnnnnnnnnnnnnnnnnnnnnnnnnnnnngaggacaggaagggcgttgctggcctgtagctcctgttgcccacccggagccaggctccccactggaggctcccagccgagaggacccaggcccacccatgggcgtctggcaggccaagctcccagcccgggccgtggtctcctggggatgccgctggcctgactctccgcttnnnnnnnnnnnnnngggggtgtcctgcccgtcttcccannnnnnnnnnnnnnnncttcatcatcttcccccgtgagagacactggttgtccggtactcagtgacagcgtgccagacgcacactnnannnnnnnnnnnnnnnnnnnnnnntcctcaggaagcgcagagtccnnnggaaaaggagctctcctcc

SEQ ID NO: 6147 - DNA, 788 bp, Macaca Fascicularis
  misc_feature (1)...(788): n = A,T,C or G
atgaacatcatctgtaaaatggggtgaattctgcccgcttcacagagtggtgacattgacataatgtttatgtttataagacacctagtgcagtgtcgggcagagtctcttctctctgtcctgttgttcaggttgtttttgatcttgcccctcctccttcccatggattccatcacccacnnnnnnnnnnnnnnnnnnnnnnnnnnnnnnnnnnnngttttcccccttactcccctgcttttggtcctcttcatttcttgcctgagcttttggtctcttcctgaaaattctccccatttctaccagcattttctttctaaagaccttcctggctcctcgcctacaggaaannnnnnnnnnnnnnnnnnatgtcatgcaagctctttcaccatcgtgcccccgcccacctccttagcttcatctcccgttgttccccatgatgggacctagtttttgccacatcttgaatatgttatgcccatttaaactttgagacctccatgtgccctacacattgtgcctgcctggtacttccctcactggctgcctggtaactggtaaactcctagttacactataggatttagcatgcagggccacatgcagttttcccaagcacagattgtcattcctgctctgcttctctagccctgtgttcgttctactgtaagaatgtcgttacaaggcactgggattggtgtgtgtctgtatcccccctagactgtgagttccttgagggcagggaccaattcttactcctctgccccttgcagagtgcctcacaaatg

SEQ ID NO: 6148 - DNA, 1106 bp, Macaca Fascicularis
  misc_feature (1)...(1106): n = A,T,C or G
acaaggccagcacccannnnnnttaatatttaacctctctttaaggacattggggtttgtttttggaaatgttctttagatggtggcacattcctttgggtatgttaacctaggcagtgggaggtaaatgggatgggatgtgagctgggagaagggctgaaccctcagcctcaactgtgtctagagcctcttgggaaaggggcacctctcttgaaccccaaatgctctctcttcttatcccccaaacccatggctctatttcttcttcacatccattgtctcttcatgtccattccattcccttccctttggccacacagacaggtggaaaaactgagacaggcagtttcagagatggacagagaactttattttggattgtggatgtggatttttttgtacataaataagaaaaaccaaaatactccaaagatgacttcccctgcctcctactccagtatgacagaggaggatgtaaggccttagccatgatcccccagtggtttgggagtcaggcccggcctattgcttgggtctctctctatttatatatttaagttcacagtgtttcttattctgccctaagcttctagaggctcatggccctgtggttaggcctggctcattctgcacctttccagggaggtgggaggaccctgtgccctccttcccagtcctctttttcaggctcgtccaaggcctgagacctgtgttgtaattttactttttattcctaaagttgtagtgaagctctcacccataataaaggttgtgaatgttctgtgagtgtcacggaaatgggctagggaggggatgnnnnnnnnnnnnnnnnnnnnccctggtttgggggaagagggtccatgttccattcttcctttgctggccctgggtccaggtgagctgcacttttacacggtgggggtgttccatggaggaattcccagagaggttgtccttccttcctttcccccatgcctgtaaaaccagaccattccagcccagtgctgtggagctctccagtcccttttcacttttccnnnnnnnnnnnnnnnnnnnnnnnnnnnnnnnnnnnnnnnnnnnnnnnnnnnnnnntctctttgccctct

SEQ ID NO: 6149 - DNA, 761 bp, Macaca Fascicularis
  misc_feature (1)...(761): n = A,T,C or G
tatgggaacgctactgattttnctgtaaatctaaacttaaaaaaaaaaaagctgtcnnngaaaaaaatcacctataatcctaccagagataactattggcattnnntnnnnnnnnnnnnnnnnctatattttgaaatgtactcttgtttatgaaacaatgtttaatttcactagtctgttagagccgactgaaaaggtagtcttaagttgttgtttttactgtgggctagagatgtcttagctgtatattcaaggatcatgtgtgtattagaaaattttgcaggaactaatttatgtgctacaaagtttcattagagactttacagtttttctgatgatctagtactcctctatggacttacttttctgttcatgcttccccaccccctaccttaagctatttttctagaattagtttgcaattattattaccagcttccctacttgcgtatacgtcttctgaaaaccaccctgctttttcctttatagtagaatggcagctcagttacagaaacatgctgtaattaaggtatatatagcttccttttatgatataggcttgtattaattgctacttgtaatgtttcccattttggggccactatgcattaccattgttaatactgctgtgatatacttgtagaaatcaaagccatcagatcatattgaattagtgatacctgacacttttgctcctcggaatcctataattactaaatttctgttgttcctagcaggaaagcatcatactccttcagttt

SEQ ID NO: 6150 - DNA, 754 bp, Macaca Fascicularis
  misc_feature (1)...(754): n = A,T,C or G
cacataagcnngggnnagagcaaatannatggaaaataactccaaaactttgacctgaatcatgtggatttatcccaagatgatgctagatgcaccaagcatggcccaaattggttctttttttaaatcccttgggggaagtgcaggcttcttcctgtggtgcctctttctagccccaccaccatgttgacagtgagcctggtgaggaggagaaagctttggctagctaaacatgtttaataaggccataaaaactgagaaagaaaaacattcaactttagctggagctcctttgatacaaaagtctcattctgtcagaaataagccatagtacagactcagagatagagnnnnnnnnnnnnnnnnttggtcttatcgtgggttctggagcatacctctcagactagtcaggaacaccggggaggtgacagcaggtccccagggacctgcaggggacatttcaactgcatggatcgggatttccctccaaaccaactatcctttaaggggcagcctcctctttnnnnnnnnnnnnnnnnnnnnnnnnnnnnnnnnnnnnnnnnnnctggagaggccaacggccacagctacctttgtagtcttcaaaatattgaactgcaggtcccaagatgcattnnnnnnnnnnnnnnnnnnnnnnnnntgataatcattccttcaccaaatagcaacattcttgccagagttcttgggaacctgttttcttctctactctccatctctgctactctcatgc

SEQ ID NO: 6151 - DNA, 693 bp, Macaca Fascicularis
  misc_feature (1)...(693): n = A,T,C or G
acacgctgcagagccgcagggatnnnnnnnnnnnncagtcaccagtcagcaaggatgaacctttgccacctcctggaatgtttagcagcaacataatgtaccaagcgaaacgcctgggtgcctgcaccgtgtgcgagtgaggcgcgcactgtgaggactgggaagaggcttctgcaatgggcaggcttttgggcgcgtcacgtgatccgttcaggccggctcctgcctgctctgcagtgatgaagcctccgcacaggaacagnnnnnnnnnnnnnnnnnnnnnnnnntggggtgtcgctggggactgagaatccttttgtgtatcaaaagctggaatgcttcaaatttttcataagtgccttgttttccttttaacacnnnnnnnnnnacagtgctgtctgcaaagctgaggcccactcctctctgctggggatcaggggttttagaaggcaggggccacgctggaccaccgtcctgtccnnnnnnnnnngtctccttcacgctgctggggnnnnnnnnnnnnnnnncgctctctcgttcatagtctgctttgaaagtcttagttttaggagaggttcaggtttgccttgctggcatcttcacctaagataggggctggcagacaggcccatgcgctgcatcccgcccgcagcctgatagatggcctgggaatggcttttttacgttttaaaa

SEQ ID NO: 6152 - DNA, 697 bp, Macaca Fascicularis
aaaatttaaaaattagctgagcatgatggcacatgcctgtagttccagctactcgggagactgaggcaggagaatcgcttgagcccagcaggtcgaggctgaaatgaaaatgtcatttaataccacaaaaatgtcctttaatgtagtatggttgtttaacatagtggcctacacctgtaatcccagtactttgggaggccaaggggaggattgcttgagctcatgagtttgaaaccagcctgggcaacatggcaagaccccatctctacaaaaaataaaaagaagtggctggatatggtggcatgcacctgtggttccaggtgcctgggaggctgaggcgagaggactgcttgaacctgggaggctgagtctgcagtgagccgtgtttgcactactgtattctaccctgggtgacagagtgagactttgtctcaaaaaaagaaaaaaaaaattgtttaaaaagatgatggtcattcatcatattggactatgacaaatatccactaccattcttttgcaggtttggttgtaaaggtaatcagtagaaagttatgaatgaaaatttaatttttcaaaagcttgagtacttataaattcagctgctattttgtagactcttaactgtctctggcattcatttattctttcagtttttcatcaattgaataaatatatattaaatacatactggtgccag

SEQ ID NO: 6153 - DNA, 746 bp, Macaca Fascicularis
  misc_feature (1)...(746): n = A,T,C or G
agcccatggggacccagacccnnnactcagcagaaggagactnnggactgctgaaggcacgggagctgcccccagtggacagcaatgaacctcagtcagcctggacctctgggaactttgggaatcgcttgattctgcagtctaaataactaatatccctatatttttttaattaaagcaacagacttctcaataatcaatgagttaactgagaaaactaaaatcagaagtaagaatgtgcttgaaactgaatcacaatataaatattacacaccacacaatgaaatggaaaaactgcaaaccacaaaaaaaaccactaggaaatgaatgacgttggctttcgtatcaagaatttagaaagagaataacaaattatcccaaatgaaggtgtgagaaagggaataataagaaaaagcacagttgctcatgaggaaaaaccaaaacttgaaaattcaacaaagccagtgaagctcattcttgaaaatattaattacactcaaatcctaactacattgagcaagaaaaagaaagcaggcacgcatttccatgtgggcgtgaagaagcagacagcccagcagatcttacgtacattttcaaaaacgaacctcagaacagggtgcaaacctatgccaatataccagaaaatgcagattaaatagatgaaatattccaaactggagtttacttaatgaacgtaagagtaatcagagaatctgactcattttagatgtgtgtgtgtgtgtgtg

SEQ ID NO: 6154 - DNA, 776 bp, Macaca Fascicularis
  misc_feature (1)...(776): n = A,T,C or G
tttagagatgacttcttnnnnnnnnnnnnnnnacagaaggaaactgannnncagaaggagaaattgcctttctcaaagctccctggatgggtaataacacagatatgagtaggtcacacaaagtatatcttttttaaaaaaaagaaattcaattatgtcttatttggggggtgtgtttcccagaagttatttttctggcatgtggtctgtaaaaacagcatgattcatattttttatatttcatgctactcattttgtttaattaccaacaaacatggggactttggcttnnnnnnnnnnnnnnnnnnnncatgaaattgttaaatttaccttttatcaattgtaatcatcctatgccaacatattgttatcataaattcatagaaatatttttccaataaataacagacattgaaatttgattcttagataatactgccagaacagtcaatggtaaatgccctatacttgagtcttacttagatacagtggcaatgcaccattttagaagatgaatgatactgctatttctcttcagggaaacaataatggataaagaaatgtaactgccgggcagcaaagcttctaagtgaaacctgtagtagcagtagtagtagggagaaaatgtgtagtcatcaagtgaaaataggaaaggatctataattcatgatgtcttaatagaccctaaattgttctnnnnnnnnnnnnnnnnnnnnnnnnnnnntcatttgtgagcttgtatgacttttgtatttagccnatgttgcatgctcaca

SEQ ID NO: 6155 - DNA, 987 bp, Macaca Fascicularis
  misc_feature (1)...(987): n = A,T,C or G
gaaagagcgagctgccatgaacaactccttcatctacataaagattccacaggttccacnnnnnnnnnnnnnnnnnnnnnngaagaacagtgtggactggnnnnnnnnnnnnnnnnnnnnnnnnnnnctggagtaccacaacaacacatggacatggctagactttgccatggctgtcaaaaggnnnnnnnnnnnnnnnnnnnnnncccaggtgatcaaagagaagctaagacnnnnnnnnnnnnnnngctctgaggtccggggaaagctagaaannnnnnnnnnnntgaacatgcaacagcaggaagaggaggagaaagcccggctcctcattggtttaagtgtgggcgacaagaaccctggcaagaagtccatctttggcaggcgcaaatgatttggcgattcgagtggctacagtacaggatctgactctggctcaggctccagggacttgtgggtgggaggggcttccctttatccaccaggatttgtgggtgtcagagcccctaggcattgctattcaccacctgccctgttcactgcagggcatggtggacagtaatgctgagttccatctcacgctgatcaggttcagggccagagagacaacaagagagcaagacccagggaacgggcccagggcaggaccctattccttggggtcaagtgaaagggtagggggatagtcctgatcaagtgtgataaatttttataaacatatataaatatatatatattatatatatttctaagtgtaactgtcctccctctgtgccaggaaacgggagggggctgatcctctgatcctcactccactgccatgtatgaaagaggtattggtgttctgagcggtgatcaacccctccccagtctctgtgctaagttcacttgggaggatggcagtaggagccagggctggccatgggtcccctacccttccccctaggatatgccctggaaaatggcaaaatgattaaagagaaaaaa

SEQ ID NO: 6156 - DNA, 153 bp, Macaca Fascicularis
ttgagtgaaaaatggatggctaagatcagacatttatataaatgcaaacctgacgaaacgtataagcctatgtgtttaaaagattgacagtgaagtatgttttatggagttaattgccacaaacagttaagtccgttggtttggagaggacaa

SEQ ID NO: 6157 - DNA, 767 bp, Macaca Fascicularis
  misc_feature (1)...(767): n = A,T,C or G
actgtaaaattacctaacacggaaatatgactgtgttgctttttcccatttacacgtggtgagtcaacaactctactgagattccactcccctccaagcacctgctctgattgggttgccttctgtgtccatgtttttttattttctgtcaactaaaaggatagcaaattctgatcggagaagtctttaaaactcttgacttaattgagtcaaaactcttcatgccatgtacatcattttcattatgttaaaagtaaaatgtgctttgtgaactcagatctatctaaatatatagccaggaagccagggtgtgtaaatacannnnnnnnnnnnnnnntgcagagaacannnnnnnnnnnncttgaaatcctaagtagtattgaatttctttgacttgaatctcactcatcagtaaaagagaactcttgatgtccgtcaggttttatgtggtctgtaaagttaggggttctgttttgtttccttatttaggaaagggtactgctggtgtcgaggagttatatnnnnnnnnnnnnnnnnnnnttttaaaggatgtaagtagggaatcagagtcctttgcagagtttgacagaagactcagtaacctcatttatttctaaacatttttcnnnnnnnnnnnnnnnaaatctgtgcttttgtatggagttaatgtctgattttgccgttcatatgttagagcctactcagaataagagttagaacatttatatacagatgtcatttctaagaactaaaattctttggaaaaa

SEQ ID NO: 6158 - DNA, 1728 bp, Macaca Fascicularis
gcagacaggccccagaagatggagagatggagccaccccaagatacaaataggcctttcagcacacttgataaccgcagcgggcgggtccaagccagggcccccaccccgctattgcagaggaatccctacagcagcccggatgtcatgcacatgaaagggtcagacgcttcttccgtcccttacaccctggaccagggcacgatggccctgcctaaggacaagaacaaggagggcaccgggcaccggctgctgaacatgctgaaaaaaactcttaaagggtctgatagtgaagaactggaaataacacaggagacaccaaatttggtgccgtttggggatgtggttggctgcctgggcattcatgtaaagaactgcagacattttacgcctaacatttacaacattatgctaatttatttattcgcatctctataaacaaagctgtgaaatgtacaaaaatgtgtagcttgctatccaaagacagtgagaggaacactgtaattaagttcgatgaagtgaagtatttttctgtacaggttcccagacgttatgatgatgagcggaataatattttattggaactcatacaatatgacaatatgaatcctacaccacctccagaaagaacggatcccgtgacaaaagttattacaccacagacagtagaatatccagcattcctatccccagacctgaatgttactgttgggactccagctgtgcaatcctccgaccagacatcttctgtagtgcgacttgaaaaacttcagcaacaaccccgggaaaggctggaaaagatgaaaaaagaatatagaaatctgaatacatggatagacaaagctaactatttagaaagcattctaatgccaaaattggaacataaggattctaaggaaactaatgtggatgaggcatctgaaaacccgaaaagtaatcaatctaaagagaagcttgaaaatgttgcagaagtagatatccctcttgtaaatgaggaagctgaaaccactccaaatgagttactggataatgattctgagaaaggcctgactgtaccaactttgaaccaattggaccaagataattcaactgctgatacttctaaaagtgatgaatcaacaccttcacccacagaagtacactcattgtgcactatttctaaccaggaaataataaaagcaggcagagtaccacctttaggtgaacatcaatcagaaagcatgccagacagaaaaatgaaaaatgttttttttccatcagaagtaaaattaaaagataactatccaagcattttaaaaacagactcatctctatcagaggtaaatttcaggagtatctgtataaatccaaagagaaggaacttagtttcatctccaacagaaattagctggcaaaacaacagtcttaacttagctgaaaggaagaacacaggcttagtttccaccagattaaaaattaaaaggtagctttcaaagccaagacccaaaagaaggccttgagctcaaggtgtctgcccttatattagaagtgtaagactagggacacaaaataatctatttaaaaaaattaaatacaaataaattgaaaatgccttcaaatgtcaaaaaaaaaaaaaaaaaaaaaaaaaaaaaaaaaaaaaaaaaaaaaaaaaaaaaaaaaaaaaaaaaaaaaaaaaaaaaaaaaaaaaaaaaaaaaaaaaaaaaaaaaaaaaaaaaaaaaaaaaaaaaaa

SEQ ID NO: 6159 - DNA, 1224 bp, Macaca Fascicularis
aaccttaacagccctgcaatgtagtgagcactgggcagtgctgctggttcactaagccgtcttgagttcttcagctatttaggagattcaactacgtttattcatactgaatctttttaatgaatttcctgagagccaagaagggccaatctacagaaaaaagcgggaggtggaccttaagcatcttctagaaactcttctagctgataccatgaaacgacgacaaaagaggaaacatttggaaaatgaagagtcccaggaaaccgctgagaagggaggaggaatccagagactacatcgagacagcccccagcctcagtcacccctggcccaggttcaggaacgaggagagactcctccctgctcacaacatgtctccttgtcatcccattcgtcctataagacttgtgtgtcctctctgtgtgtaaacaaagaggaaaggggcatgaaaatatactacatgcaggtacaaatgaaaaaaggtgtggctgtctcctgggagacagaggaaacttcggagtccttagaaaagcagccaaggatggaagaagtgacccttcctgaggttgtgagggtaggtactcccccctctgatgtgtccaccagaaacctcctgtctgacagtgagcccggcggggaggagaaagagcatgaggaaaggacagaatcagacagcctgccaggctcacccactgttgaggagacacccagggccaagactcctgattggctggtgaccatggagaacggcttcaggtgcatggcctgctgccgggtttttgccaccgtggaaatcctccaggagcatgtgcaatatgggatcagagagggcttcagctgccccaagacgagcaggaggaggaaaatggaaatgaggaggaggaggaagagaaaccagcagcaaagaaggaggaggaggggcagcccacaggggaagaccttggcctgaggagatcctggagccaatgtccaggctgtgtgtttcattctccaaaggaccttccaaaggacaggaacagctgagacttatgggccagaagatactggaagatggtgtggccttctcttgcaagagggagaagaaagagccatggagatagtagcagacagactgcccaaggtatgaaggagatgagggaccagcactcagtctaacatgtaaacatcatatgtaataaaggttatgtttcaaaccttaaaaaaaaaaaaaaaaaaaaaaaaaaa

SEQ ID NO: 6160 - DNA, 781 bp, Macaca Fascicularis
  misc_feature (1)...(781): n = A,T,C or G
atggccacagaagcaggcngnaacctacacatccaggaacagaatccacagcccaccctggatcaggtccctcctaggaacaactgcccctgctgctgagcacagacgccactgctcacacctctgacacctggtgctggacactggaccctgaggccaggacagatgtcactgctgcacctggaaactggacatcactactgtcactcagccatctttactaaaatgtgttctgcacagtcccagcctctctgtcaccgcattctgcctcagagtctggcagtgatataggagtgaaagagggtacagaaggcttttaatgaaaagcaggctccaaattattttcttttctaacaaggagcagcctgtaatatcaagcttcagacatagacaagtaagctggaagcttgcacgggtgaatgccggcagctgtgccaataggaatcggacacctgggactgggcatgttcacaatggtgactctatcttcccttctctttgccagtctcttccttacagtaaggagcagacaacatggcactggtcaagtggcaagtccatttgcataataggattagagtggggcgaacaaccttccaattgcactatggaaatatcacacctggtccaaccaacctgtgggccctacataaatcagacaccatctcctcaagcctgcnnnnaaaatccgatgcactcccattccaggccggaattcccttttgggtgcccctctctctcacaagaagagagctgttccccttttgtctttcttttgcct

SEQ ID NO: 6161 - DNA, 703 bp, Macaca Fascicularis
  misc_feature (1)...(703): n = A,T,C or G
caggaggcagagacaggagaaccgctnnnacccgggaggcagaggttgcagtgagcnnnnnnnnnnnnnnnnnnnnnnnnnnnnnnnnnnnnnnnnnaactccgtctcagaaaacaaacaaacaannnnnnnnnnnnnnnnnnnnnnnnnnnnnnnnnnnnnnnnnnnnnnnnnnnnnnnnnnnnnnnnnnnnnnnnnnggcagaagggtgccttttcccggtttattgtccaggaggttgaacgggaaatactcaaatcgccgaggtgtnnnnnnnnnnnnnnnnnnnnnnnnnnnnnnnnntccccatgtctttctaccaagcctcttatgtttgttctgtgcaaggaagacaaagagtagaccatgttctctgtgtnnnnnnnnnnnnnnnnnnnnnnnnnnnnnnnnnnnnnnnnnnnnnnnnnnnnnnnnnnnnnnngaatagttgactctnnnnnnnnnnnnnnnnnnnnnnnnnnnnnnnnnntccaggaccctcctcctcctgccagtttcttttttggttcatgtggcatagtcatctttcaaaattaannnnnnnnnnnnnnnnnnnnnnnnnnnactaaaatattnnnnnnnnnnnnnnnnnnngtaacagaaaagataggtaagagatttttcccccaaaaagtaagaattgattgtgttgaatgttcaaagtctggaaactgttcacagt

SEQ ID NO: 6162 - DNA, 721 bp, Macaca Fascicularis
  misc_feature (1)...(721): n = A,T,C or G
agtacagaacagaagtagctttncannctgggatgacaacagcaaaaaacaaagagctacaagatgccaggaaactgaaagagggaattcagtaggatcaggaaaatggataaatgaaagaactggagaaattcaatgctcataagaagtccttggatgcatttgggaagacgcaatccctgcagggtccaagaaggggnnnnnnnnnnnnnnntgagagaactgttgacctggaggannnnnnnnnnnagggcctgagttactaaaaaatgaaagttgttaagtgtactgaaggttctccctgctcctttcatccagtcctcatgttgcttctgctacttcaatctaatcctgtatccgcaaccttagnnnnnnnnnnnnnnnnnnnnnnnnnnnnnnnnnncattaaatcaacatgaggatcatttcctaatttgggaaagccagtgattggaaatcnnnnnnnnnnntttcatccccaaaatatcacattctactccatcctnnnnnnnnnnnnnnncccttgccttctgaggcacttgtccttgcaccatttctaatccagatattctcatatttctctcttctcccttttctttcctttctnnnnnnnnnnnnnnnnnnnnnnnnnnnnnnnnnnnnnnnnnnnnnacttcagtgtgtccnnnnnnnnnnnnnnnnnnttcaatgcaatttgattataaagactttcattgacatg

SEQ ID NO: 6163 - DNA, 756 bp, Macaca Fascicularis
agaagaatactcgttctttaagaaacttacttgatgatgctagaaaactttcgagaaaagtgagctccaaggtagtggaacccaggaggagtagcatagagaaactattcacagagtgtcttttgctggctgggctttcatttgtttcttctttctctccaaagtctctattttccagggcccctgatttccaaccggtccttcatctccttttggtgagtaaatggtgccactgcaaccttgttaaggatagaatgggcttcaagtttcctggggaggaactaggcatgtagaggaccccatactagatcaacattgatttgaccaacatcagggtagcagttgtagaagttaaagagccataattcagagttgcttcttcacccttcttgctccacaaagagaagcagtgagtaggtgtagaagtcagttgaagctaccagaaatgccagaatggagagggttggtgtggaaaagcccacttcaggcctgacataccactgggacatgcggaagcatgtgcctggcacactgagacctttgaagtgaccaactgtgagcaactggaacaggagagattaaactatggaactgacactggaagaaagaagtgatcaaatgatctcttagacatcttgtccttttccctgaacctagaataattaagcacataagtccaatctctctctctgcttctctctttctctctctctttctccttccctccctccctccatatggtgatccaaatgaaag

SEQ ID NO: 6164 - DNA, 1666 bp, Macaca Fascicularis
  misc_feature (1)...(1666): n = A,T,C or G
gtttggaaactctctcccctgtctggtgtccttgcagctgtgcatctgtgaatctgtgctgtcatcttcctcagggtaacctcacatgttccaggtcttacacatactcatcgtattcagggaactgagactccacacacctcactatgtggctggaatatgctgaaactgcctccacaaactcgttattctggaccaagacttatggcctaaagtgaaggacatttccaaagaaattttctcctctctgatgccgctcctgctgcaatgcaatgaccctggctatgtacaagacatactttggcttgctcctgggaaacctttagacaaagcctctactctaaagatcactgagctgttgctaccatcgccgactctgagcactttgtccccatttatttccaaggtcagacctaatgtcaagactttcttgaaggagaagtggggagtctcagctactgcctctagaaaggcagatgttttcattgtttgctgcaacctgtttgtcttatagtggtttctcaagatttgcaggagaaagaaaaacaaatacctcaactcgccctaggaaagtgacagactgatgacacttccatcacaaaacaggcctggactctgaggaaattgtctcctttaacacacccattttaaaaccagtctaagtttcgccttcccaggcatactcccactacgttgtgtttaaaatatttttttcgtattattattttatttatttatgtatttatttttatttatttatttattttgnnnnnnnnnnnnnnnnnnnnnnnnnnnnnnnnnnnnnnnnnnnnnnnnnnnnnnnnnnnnnnnnnnnnnnnnnnnnnnnnnnnnnnnnnnnnnnnnnnnnnnnnnnnnnnnnnnnnnnnnnnnnnnnnnnnnnnnnnnnnnnnnnnnnnnnnnnnnnnnnnnnnnnnnnnnnnnnnnnnnnnnnnnnnnnnnnnnnnnnnnnnnnnnnnnnnnnnnnnnnnnnnnnnnnnnnnnnnnnnnnnnnnnnnnnnnnnnnnnnnnnnnnnnncactcccggccctacaatattttaatacacattttcgttttttggagaaatgtgtcattgcttaagttgttctgtttaaacaatctgagacaggcctcatttaatttagaaagtttattttgccaaagttgaggatgcatgcctgtgacacagcctcaggagattctgacaacatgtgcccaaggtggtcagagcacagtttggttttatacatcttagggagatacgagatgtcaatcaacatatgtaagatgaacattggttcagtctggaaaggtgggacaactttaagcaaaggcaggaagacttgaagtcaggaggggccttccaggtcataggcagataagagaaaaatgattgcattcttctgagtttctgattagcctctccaaagaaggcaatcagatatgcatttatctcagtgagcggaggggtgactttgaatagaatgggaggcaggtttgccctaagcagtttccacttgacttttccttttagcttagtgatttaggggccccaagatttattttcctttcacactcctaggtacagtgcctagtcagaaaaaaaaaaaaaaaaaaaaaaaaaaaaaaaaaaaaaaaaaaaaaaaaaaaaaaaaaaaaggccaca

SEQ ID NO: 6165 - DNA, 4510 bp, Macaca Fascicularis
  misc_feature (1)...(4510): n = A,T,C or G
cagtacttgcctcattgcagctatcataagggttaaatgaaataaagtacataaagcccttattacagagttagatgctagatattcatattatgtattcatatttatcattaaaacaccattcaatgtatcctttccctgaaggagctcattgtacgtaaagtgaaaaggttttatgtatataatatttggggagcattcagggcataataatcagtgaatgtttgtggtatatatgacctggtgtgatcttagaggtctatacaaagtgctctgagagcctgccagaggaagaagttggtcctaactaggggagatataaaaactccatagaagaggcaacattcaagctgggtgttgatgggtgagtaggagtttgtccctcaaagaagaaagaaataaccaaagtgacaacatgtgcaaaggtgtaaagccttaaaagggaaagtcgtgtttagtgattagagagaaagatgatagaactggagcctaaaatacaaggtgaggagtaaggagatatctactagaaaaggtaagttggcttgaatttcttccattgtttatctaatcagaaaattttgattatttatctaatatgtgtcagacaatgtactgggcactagagatgcccacatgttctagcaaagcagagaatataaacacaacccaatgtgattatacatgtccacaaaggccatgaacaaaacaaagcagcgtgataggatgaaaggaaagtggagagcctcctgtgggttgggagatgagggaaggcctccaaggaaatggcatttgagaactgagactgaagttcaagaaggagccagccaagggaacagcacccacaaaggcagaaataaacttagcttgtttcagaaacagaaaaatcagtatggctggagagagagtggaaggaggaagcatggtagcgacaaagtcagagaggagggccaagcagagctgataggccttgtagatcatgatagggaagttgacttctgtctagggcagcaagaagccattggaagttagcagatgtgatttgcacttgtaaaagatccctggcgccatggtgtcttagaggttggatttgggggaaggagggtttatagcaatagtggagcaaagaggttgttgcaggcgttgagggaaagagctgatgatgacatgtattggtgtgatagatgtggaggagaggagaagtatgtggatcatgaaggacattgtgtgcactgccaaccagtctggacttcaccctctcgggagtggggaagtacagaagatttagagggagcagtggcagcatcagatttgttttatagaaagacaattatcttagaatggtcaagagggatccgaatagaaaaatactagacaaaggaaggcgaggtaagaacctgttagttctgggattggcacactgtggtccacgggccaaatctgacctgcagcctgtttctgtatgacccatgagacaagaatgggttttacatttctaaagcttttttttttttttttaaaaaggaagcaatagcagcatctgtgacagagaccatatggaccccaaagcctaaaatatttactatctggccctttacagaaaaagtttgcccatccttagtttcaaccatctgtcttaaaaaacagaaaaaaaaggaatgagaagctcttcatgtactgctatggaatgacctcccatacatgttgtttagtgaaaaaggcaatatgccaaattgtatccagtatattatatttgtacactgaaaaaaaagggggaggggaaatagcatataagcatttgcttggaatgctgtcaagtaactagtcatgctacttgcttccagaacagggccctgggcagtaggaaactgggatggaaaggaagctttttaaaatgcaccattttataacttttgaatgttgaaccaggcaattgtattaccttttccaaaaaatgcaacactactaaaaataataatgggttaaaggaatacaggagcagtgtactttggtcactataacacagactgaggatggaccacctgaattcaaatcctagctctgctgcttaccagctgtgtaaccctgaacaagtgacttaacctgttatccattttccctttctgtgaaacaggggtaataatggcgtctgtctcatagcaccgttgtgaggataaatgctcttagaacagttcttggcacattgtaagtactgcataggtgtgtgctactattagcagtactaagatttttttaatggctattgagtagcgctagtggcaaggcatctattggtagaccatgtatgagctgcagtatgaatggcaatggctggatttgagaaccatttctgagccagaattgggaagatttggtattgacttggtcatggaaagtgaagaaaaggaagctgcagatgctgctgaggtttccaggctggaaagtctgggtgatgggatgaattagggctgggcctccagagtcagaaggaaaatgtgaatgcaggatgatcaggccacctgaagcacagtttcatggacatgattcaatgccttttcattttgttagttttatttccttttgagttgtatttttagcaagctccatgaaaagtggggtgtgcgtcctgactttattaatggaaattatgagcgccatgcaccatactcattgctgttattctcctgagagtttagcccgccctgtgtaattaacctgcgttttaaaaaccctatttacaagtgaactaatttcacattgtgacctcatctccgagagggtgctgccatacagtctttatcgtggcaatggagagcatttttaaaatactgtctcacagaggaatgaagtttttgcttcatttgtatattctgtggaaccaagaaatagtatgactttttaaatggctgagtgataattatcttttcccagtaactgctgatccaatgttgttgattccaacactgagaaatctgatctgggatgccactgagaatttatcaaccttctcaaatttttgacgttgagaatttagccatgtttgaaagacaattcaaagcaatatgctctcccacccagaacccagcattttctaacatttcaattttgccaatctagatgggtgatttgcacttggcccacatacactgcaaaactgcctgcctgctgcatcataatccctgctgctgtgacacatcaaaaccctttaaatatgctcacaaacgagggtagaagggggagagacttgcaaattccttagttctaaaatctaaaacttcaacttttaataactgtgtcctatattttcacttagcatgagacagctttttttatgtgtttcggtttttatttcatttcacttctaagatttccctctgtccttagggaaatcagaattgtccctgctttggctaagagcttcccagatgcacctgtgggcaaacagatttatataagaaaatcacattcctaggaatgtgattgattgattgacagatacagagataggtagatagacaacacatggttagagatagagaacgtgtaaaatgcaagtgcttttattctcactttacaattcaaatattaccttgccatattaagctcttcctttctcgggaattcagctctgacttatttctccatactgttatctttacctaaactcagtggagtttttaagatctgcttttataaagcctcataatgctgataaaaatgtttgagttttatgtcacaaagtgaagaatgagtaggggaaacaggatgcaagtgactgtggtttttaatttctctttttaaaaaaagaaatgctcaaaaatatcttcctactcttaaatttagatttctgaggttgattttaaaaaacatgtcttggcnnnnnnnnnnnnnnnnnnnnnnnnnnnnnnnnnnnnnnnnnggctagtagttccattttatagttaaggaaactgaagctcagtgcaatgaaatagttaattgggattacctagtttgtagatggtagagctgagatttcatctcaggactgtccaactgtaccatttccaccactccctctagaacacagttgctcaaaacataggcagaaccacctttggtgcttgttagatttctggatgtaatcctgatcaggtgaatcagaatttctaagacctggagccccaaacttgcatgttaattaagcattttaaaacttgcattttacctagctcagtgtttctcaaattttaatgtacttacaaattctctggggaggtcatattaaaattcaggttctgaatttgtcaggtctgccatgaggcctagagtctgcagttctaatgagctccccagtgatgctgatgctgctggtccaaggaccatacttggagtagcactaccctaaaatctgaaagcactctctagacagaatttcccccaatgagctgaaaagtgatacagtgcctgcgaatagaaaccagactacagtcaatataacccagcagccactacttaaaaaaaaaaaaaaaaa

SEQ ID NO: 6166 - DNA, 624 bp, Macaca Fascicularis
  misc_feature (1)...(624): n = A,T,C or G
ggggactgacagttgtnnnnnnnnnnnnnntcaggggntgatgtcatcatgtgacaggagacacgagctaaaggnnaagtggtgttgggcccactgagtgggtggtgatgggaggtgggagtgtttccagcaaagggaatgaaaagggaacatccccctgacagccccctctttctgcnncttcctcagaatccggggcaccagctaccagagcccccacggcatccccnnnnnnnnnnnnnnnnnnnnnnnnnncgtctccaccacnnnnnnnnnnnnnnnngacacgaagcagatcctccgcatccggtgcgaggaggaagatgtggagnnnnnnnnnnnnnnnnnnnnnnnnnnnnnnnnnnnnnngcnnnnnnnnnnnnnnnnnnnnnnnnnnnnnnnnnnnnnnnnnncaagcctggtgtgccggaaacgcaagggtacagaagtgcaggtggatgacatcaagcgggtctactcactcnnnnnnnncgagtcccgctccannnnnnnnnnnnnnnnnnnncaggacgccttcctcttcaatnnnnnnnnnnnnnnnnnnnnnnnnnnnnnnnnnnnnnnnnnnnnnnnnnnnnnnnnnccctgttttctaccagagtc

SEQ ID NO: 6167 - DNA, 710 bp, Macaca Fascicularis
  misc_feature (1)...(710): n = A,T,C or G
gcatcatggtgnnngatgnncagaggaaagtnncntataagaannnnnnnnnnnnnnnnnnnnagnntcgggagttcaggccagagatcacagacagacnaatgtcctataaaatctatacagcagacataaacgcgacccaaaaaagcttcaattttgccaagaagttctccctgcccctgtattttgnnnnnnnnnnnnnnnntaccaacgttgtgaagctcttcaatgatgcaattcgattagctgtgtcttacaaacagaactcccaggacttcatggatgagatttttcaggagctcgagaacttcaagttggaacaggaagaggagaatgtgccagaccaggagcagaacagcagcatcgagaccccatcagaggaggcggcctctccccacagctgaggggctggggctaggggtgggtggagcctttttaaagtacccttcccttcaacagctctccagctctgaatggaggaactctctaggccatcccctcttctacctcctgcagcccatccatcctattagcctcccacattcaaggcccttaatgcaggnnnnnnnnnnnnnnnagcaaactcnnnactggtggaagaaggtcctcaccagatctccttgaagcagaattagggatcagtatcattaacaccttccccaccccctccccccaggcgggcagtgaagagaatcagaaaacatgattat

SEQ ID NO: 6168 - DNA, 1907 bp, Macaca Fascicularis
ataaagattattagcagaactgagaatggatcttgtgggtgctatatgccttcaaaaccagcatctccaggagattcactgagagccattattttcttgaagtttcaaagaaaccttccagtagtttaatagtagtttattgttagtgcttatgtactttgtccttgccacattcaatcctgagtcacaagcaagttctccaacatcaaaaatatcttactgatacctatattttgtccccaccacccctgtatcccagtctggtaactgcctttatatctaggttttgctattaatagtaattctgttactatcaagttgagttcagaaataagaaaatataactagtcatactttctcacactgaacacatagtttattatattcacacacagttttctccctttgccccacaaaacaatgttcaaagttcaatgaggcattcctcataaaatttagatagccagcatggcaattccacttgaaaccttatatacaatctgaaaattgtctccactttaaaaatgggaaaatacttgtaacatattacagccattgaagtttatagtacatgttagagaagactcaagaattctgggtgatggtcaaactaatgcccaacacattatttatggaaatctgtggtcctaacactcaccttggtgagtagatatttaccttttgttattatatctatttgctattatttctcctaaattatttttcaagtgacagagtcatccagggaagaacaaagctcatatatcaaggatttttttttatgtcttttcaatacaattctgtattgaataaacagagagtaaatttgtaaggaaatgagagaatgttggtgatatggtttggctctgtgtccccactcaaatctcagctcaaattgtaaacgccatgcacatgtcgaggaagaatcctggtgggaggtgattggctcatggaatccatttccttgatgctgttctcgtgatagtgagggagttctcacaagttctgatggtttaagcatggcagtttaccctgaggtctccttcctgctagtatattaggcgtgccttgcttccccttcacattccgccatgattatgcatttcctgaggcctcccaagccatgcagaactgagtcaattaaacctcttttctttataaattaaccagtctctggtattctttatagcagtgtgaaaatgaacttatacagttgggttaactcatgtagagtccgtgtgctgtacaaaaatacacttcttatacagtcactgaatatgttttgcacagccaaggccaacttaaataggaatactaatagtaaacgttactttttttaaaaaaagtatagttttctgataatttaggtctgtaaaacaggaaaaaggatcaaataaatgaaaatatagatgtaaagataaataattgatagatgatagatgtggatagacaaagagctagtaaataatcatatgttggaatttaataccttatttgtctagcatttactaagtaccgtcctatccatgtttatgaaataaaggttttaactttacttaggaaacttatgtattactttaaaaaaaaagaaacatgttcttactctttcacctaggctggagtgtagtgatgtgatcatagctcaccgcttctgccttcctaatagctgagactacaggcatacgactcaggattcataactacatatacatggatagaagtgcatgaacagaaaatctgctcttctggaataccaaatgcaaaattaaagtcactacaagcagaatttggagaaaacaaataaaagacgcaatatagtttttaaaatcattgttaaaatacaatgagcctgtactttgcttaaacaataaaaagtctttgatttatactgaaaaaaaaaaaaaaaa

SEQ ID NO: 6169 - DNA, 725 bp, Macaca Fascicularis
  misc_feature (1)...(725): n = A,T,C or G
aggtaaagttcaatgagatactgggacattcatgnnnnnnnnnnnnnnnnnnngtgagcagagatatgtgcaatatgtgtacctgcagttcttgctgccccatttacagataacatttacaatggcccatgagcacagaatttcagtggccccatatgcatgagattcagagtacaaagtaagcgtgtcccttctacaactgaataaactgggggcagagcaggaactggagagggtactgacagcccagagaagtcacacttttcatttgaaccagaactttccttgaactcaaaaatgaagcattctaaaaaaacatgaaccaccaaagaagcctatcatactctttctaacttgtgtattagcactgcttacactcaaagaaggaaagggaaagctaaggcaacgtatggttcctcgccctgtcagtatttccttaaccatcagtgaatgaatggaagcgaaattttctggcatgtgtccacatcaaggagtgaaacaaaaatagcagagtcagttttatgccgcagctctactcttccagtaagaatggaatacatctgtatgtacgagctattaaagatgaattgtacactttcagtgactcctcagacaagttaaatgctctttaaaattggtgttgtataatctacagatgaataatatgattcttgttaataatttgctatttttttcttaggatgttaaacaaaaaaaaaaaacaa

SEQ ID NO: 6170 - DNA, 679 bp, Macaca Fascicularis
  misc_feature (1)...(679): n = A,T,C or G
cgagctcaccaccaacgagtacgtnnaccgnnnctgccccttcaagcttgtctcgcagaaacccnnnnnnnnnnnnnnncccaccagcctcggcacctggggctcctgggctggccccgagnnnnnnnnnnnnnnnnnnnnnnngtatgagcannnnnnnnnnnnnnnnnnagggccccaaccgctccaccaccgtgcgcctcctatgcgggaaagannnnnnnnnnnnnnnnnnnnnnnnnnnnnnncgctgtgagtacnnnnnnnnnnnnnnnnnnnnngccgcctgcctggagccnnnnnnnnnnncacccaccgaagacgaccatgacgagctctagctggatnnnnnnnnnnnnnnnnnnnnnnnctcctcccctgccatgtggggctcagtcctgaagataccagatggatgaaccctggaccacctccgtctgagcatccatccgggcccgtgtcccaccctccctgggtctcatctgtgctctnnnnnnnnnnnnnnnnnnnnnnnnnnnnnnnnnnnnnnnntgcagacagacccaggcccagagaaggacaggggcctgggcaccaccacacaggacgcccctgcatgctccccgcgcagctgtgcagagatgacccaaggccttaagattctgaacttttattttctggcatgaaaagtacaaataat

SEQ ID NO: 6171 - DNA, 760 bp, Macaca Fascicularis
  misc_feature (1)...(760): n = A,T,C or G
agctaccatactgttgctacagggactttgtggactgtggcccctgtccagaggttggcannnnnagttcagcacagcctgaacagtgagaaggtctgaaaggagagtatatagttaagatccttgagaaagggctgcctgaggaactgacctcttaaagatctcaggagtcagacaatttannnnnnnnnnnnnnntacctgccagaatggcctcttaattaactcaggtaactaagaactaactgtgttataatcatctcacttttccctgaatttggagaaagtattataattaagttcccagtatcagaaattgtccttacataagattaaaatatcttgatgaccaataccattctatgagaaagagtagttatatgcccagactgtattaattcacttcagaaactaatgtttgaagtaatggaaaaaattttaagttataaaactaaggtgcaatgacatttgctatttatttgtagaattatttgaagaattttgtttttgaagtaatgctttaaggagtataagatgttcaagataaattatactataaaatgattttattgaaagttgaaggttacacatattgttttaggtatgagcagaagaggttaaggtatttctaaaggtaacttatagtcaagagtttcctcaaaatagttatttggagaagaatcagaatgtttatgtatttcttgtctgtttctatgttgtcttatagctctgactaaatgtgtttacctagcaaaagattt

SEQ ID NO: 6172 - DNA, 698 bp, Macaca Fascicularis
  misc_feature (1)...(698): n = A,T,C or G
cacgngggagagcggccagtgnnnnntcctcatcaggcacaggnnnaatgagggtgtccaccctgcctttgccctggagaaacctggaaaatgtactttgcacctggggatagagcccccagattctgtaaggcacaagtgatccttggctttcaggatttacaagagcagtgatttaaatttgggggtggggggtctgctgttcattcctttgggtgctatacattattcaaaaagcctcccacacatttgcactaatgatggctgcacgcgtagcaatcagcacgtgagcaaaatccacaagaaaaccttgactttacagagcagtgtgtgagtaaacagaatgaaaacaacaacctccactccttagtttatataagtttcagttctttcctaaattaaaaggtctgcacttgagttgggaaccaaaaaagagaagtggacttgcatctgttttactggtaaaggaagttctctgatggacgggtcagagtgaaggaaggttgtgctggtaagacatctcctctgacgaagacacatggacgccttccacaaaatgtcgcctcgctgcgctaaaggatgataatcctaatcattagagaaagtgttttagctgatttaaatgtataatgaactcttttgtaataatgtatactgtagaacatgagtctctcctccctaaaattttaaatgtagaa

SEQ ID NO: 6173 - DNA, 705 bp, Macaca Fascicularis
actactgggccccactgtttagaatgttagatggaaatgtacacaaggcactggcacacgcctgccagagtgacccagtgcttctctcccatgggactcagggtcagcatgggaaggctgctggcagggacaggagccccacccacaaggtggaccgagcctcacttccacacaaaaccagaatcccatctgccccagagcactcgctctcctccccttccttccgctcaatacggtttgacatgcctttgaccagaactgcaaaatttcaaacataaacccagatctgttgggaaatcctaattaaaaacgttccattcccaggtggcacaatcacatcctgcctaaaacttctggcccacatcccaccacccagatgttgaaaagaaaccttcctatgcgtaacaccaaaacttgcacttcaaggtttctttaggggacaaagaaaaaaaaaagtacacacatgcagagtgcagcctacatgttcattaaggaaaaagagcgtggcttattcatctttcgatctttgttggcattatgattatgattatgattaattactctgacctgacaggaattgaagaagatgaatatatgctggtgctctgaaatgatctacccaactctgtcatctgtaacaaccagtgataactctcttgtcttgtaaaaatgggtttgtacataacttgtacatggtttcatttt

SEQ ID NO: 6174 - DNA, 701 bp, Macaca Fascicularis
  misc_feature (1)...(701): n = A,T,C or G
gagtttcacactactgttgtgnnnnntatnnnnnatnnnnnnnataagccccagtgttcaagtagcttaagttttatatttactaagatgactatccaaattaaggaacctgagactcctatttggtggtttgctaagcattttctttgataagtttctcttgggtaatactaatacccacatatcaaagactaggtagatatggcatggcgttttgttagtggaatgcctggataaaacannnnnnnnnnnnnnnnnnataatttccatacatccaacctatgttctgagcaactacttacttttagggggaaattaaatatcttttcaattcctcttctattatgaaagaagtttatttgtcaaacaaattttctaacaaggtttggccatagaattctcttgtatgatcgttgaccttttataatcttctgtaggctatctttcaaacactggcatcagaatattttttacaagtttcagtttaaacagcttagttggttccccgcctactccccccacccccgcccccaagagacttgggtttagttgtagctttaagtaaaatttaaaaataaaatgtatttcaggaaacttagtatctaatggtttgtaaattcaaggtgcaaaaagttgatttaaaccatttgcagagttgaactcttatgaaaataaatttgctacgatatgaggaagaagta

SEQ ID NO: 6175 - DNA, 144 bp, Macaca Fascicularis
ctccccagtccccccctccacccatttccctcctgacctgcccttgactcccacagtttagacccttggaacaggcccagatcccgatctgggcatgagatccctgaccggcagccccggagtcccctggacctggccaggccc

SEQ ID NO: 6176 - DNA, 758 bp, Macaca Fascicularis
  misc_feature (1)...(758): n = A,T,C or G
ctagtatcagtgtgttaacaaatttaactttgtatannngttacctatcaggctaatttttttatgagaagaattttaatctcctggctcatttctttgtcctatagtcctccctctttgcaccttcttctcttccttcagtgcctggagctggtactgggcccctggccccatgagcagtttgccttcttgagtcacnnnnnnnnnnnnnnnnnnnnnnnnnngagtccaaaccaccttggtgctctgaagtccactgactcatcacacctttcttagcctggctcctctcaagggcattctgagcttctaaacagacataggaagcctgtgtttaccctgaagcaccactgtctagccccattggttcccactgggagcatgatagagctgagagagacaggctctcagggtacctgacttgaggggaattgtttcaggaagctaacttcaagcatatttccagtacattctttcagagtctgtttttccctccaaatataagccccaggccattacacttagtgtcttttcaatgataggcaagaatgatatctgagttgaacttcggtgcttctgttggttgagtttactgtgcctggtagtatattgggcactctttggattgagtgctctgaggtgagagagtcttcctcagaggcatcctgcctgtgcttccaaccctgaacaagacctcacataagagatggactgatcaactgtggcaaccccgggctgtcaggtggatagatagctaa

SEQ ID NO: 6177 - DNA, 611 bp, Macaca Fascicularis
  misc_feature (1)...(611): n = A,T,C or G
tccccaccccaccaaccacctcttctatctctaggaagcagcttctagagctaacattcttctggaatacatgcattctttgggcaaaatacaaagaaatatataagcctaannnnnnnnngagaatgcctcccacccttgctattttctctaaatagagaggccgagtacagacnnnnnnnnnnnnnnnnnnnnnnnnnnnnnnnnnnnnnnnnnnnnnnnnnnnnnnnnnnnnnnnnnnnnnnnnnnnnnnnnnnnnnnnnnnnnnnnnnnnnnnnnnnnnnnnnnttcctcatannnnnnnnnnnnnnnnnnnnnnnnnnnnnnnnnnnnnnnnnnnnnnnnnnnnnnnnnnttgcagacggttagaaaggacaaagccacactgatgtgagttttcatggtccctgggaccacatcctcagaagggtccctcccacttctccctaggggttcctgtagtcctaagacaggggcagtccctgcagaccagatgcaaatgaagccacttagccagcagcttgtgaannnnnnnnnnnnnnncctgagccacttacacatgtgttttttctccctagggtctacgaagaatagggtgaaaaatctctgat

SEQ ID NO: 6178 - DNA, 1962 bp, Macaca Fascicularis
gcggtcctgtctctgcccattagcaaagtctgcctggcaactgctctctattggatagaaacatgacctcatcacaaaagggaaagagttcacatagtgtgttcttccttctgagatgtgaattcttttacaggaaagacataaggaaatcaactctaatctgatattttgttttcaaataaatatgtatttcagaaaattttaaattgagctataatttcatcatagagagggatacgggatattgatgagattatatattggctatgttgaccttgagttgcttcagcagtggaagagcaagccttaagtttcaaacatgttttttgttccctcttacatagactggctcttaaattttaagcaacaaatagcagaagaagcactattcatgaaattaccttatctaacaagtggcacctgataaagttgaagaaaaaaacatattttgctgtctaatatttcctccaaaatgattaatttgctagacttagttctccgttatatccatgctattctaaatgctgttgagactttcacaaatatagtattcatgtatgtataacacattctcacctattttgaaggaaataaataaaaatacattcactaccattttaaagagtctgaaacagagaattgtttttccattttcataaagccagagacagtatggtagctggttataaaatctgtatttccccttggattaaggatggacccaccataccattctacttcatgagccccagataacttcatcttttataaaccattgccaatttaaatagaaaccaactatgaattggctgcaatgctggaagagctcagaatatatatgaaaaacatgtgaaaagtcattgtgttttgtatgtgtgtgttgggttttagggtttttccttttactactgtcataaattcaaaaaaatctggcaaagaaaaacaattataatatcttgctttctctaaacttctcatatatttacatttcacataaaaatattgttttaaattcatgcagattgaaataagatagtaacaatgccttcaatctggaaatcaatggaatagcagactaatggtttctactctattattcaactcacagatatatggatgtcaggcaattaatatgaacgttctctctttccagagagttcaaggttatcattatctgtttaaaaagaagagacttacatagacttgaattatgtaagctgagttgcttattttcagataattttcaagacaggattatatagttgcttcccataatggaaggctctccacactttgctctttttctgttccatctcatttttatcccttctgctttataccccagtctaattatgctactctagagatatatgacagaatcagaaatgacatgaagaaagccatgtgataaatgtgggatataagaaaggataggagggacacattttgaaacctaacatgaacatttttgtaaccccattttataccccatcattttttagaagtgtttgttgtttttagagacgtaatttattctggagtaatgagtaatgtctatgatgaatttggctgataaacctttaacttatttcaactattatatatatgtattcttatagtgtatcaaccactgtaaacaacttattaaatgagatcttaaaatatataatagactaattggaccattttctttaaactttgagggtctagacatagggccattatgattaacatttaaatactcttttagggaacaacagacagtgaggcctacttgagggtggagggtgagaggagggagagaatagaaaaactacctattgggtactctacttattatcttatataccccatcatttttgagaagtgtttgttgtttttagagatgtagtttattctgggtctatgcttattacctgtgagaccaaaaaaaaaaaaaaaaaaaaaaaaaaaaaggccaca

SEQ ID NO: 6179 - DNA, 707 bp, Macaca Fascicularis
  misc_feature (1)...(707): n = A,T,C or G
gcaggccacaggannnnnnntgcccaatggtgctatnncatccagtgaccgcccagcacgggtgagcactggccagcctggagctcgcagtccaggtggaacagaccgtattccatgtcagttccttctggcttcgggcctcaattctttccctttgagcttttttagaccccagatctcctaggcccaggctgtctctgttggccccnnnnnnnnnnnnnnnnnnnnnnnnnnnnaaccctactgaagccagagaatccaccccggccaaagcaagccctctgggtccagcccctctttccacaccatgccagtattgcatccatctactgcagctacacatcctgagggcagcaccacccactctggcctgctggcccatggcaggactagcccgggcaccnnnnnnnnnntgcaggatgtccagtggggcctgtgacttgctccctgtggcatcggaaggaagtgttgcactttactggaggagcacctgcccccttgtagcttgagttccttttggtaacagtagcagcctccatggtggtgtctgatgcaaacgcacccgctgccttcaactgtatgtgtgtgttcctgctggagttgtgttactgannnnnnnnnnnnnnnnnnnnnnnnnnnnnnnntattnnnnnnnnnnnnnnnaattattgtaaacactttgttcattttttcttttttattcacaa

SEQ ID NO: 6180 - DNA, 2382 bp, Macaca Fascicularis
tgacttacttatagaattctttataaaaaaattcggcaatgaatttttaaattgttctactgagcagggagcacttcagcaatagccatgcagttttgtcctaatgataatcctaaatgtgctctgaagacttcgtgctgtagttcaaagttcgatactttttcacttgctctcacttctttcttagacgtagacattgtagaaaaaggtattaggaatatttccctgctttcagcattttagaagtgcaaaactgaaaaatatataaagtgtgaagttcagtgtgaactcaaaagactatagttctgaaagccacatggtgtgttttgtcttatttaatcatctaggcagggggaaaaaatctacactgtttccgtactgccatagaattttaagaagtgtcaggttctctcatttgtatacatccctgtgcacatatattggctcatctaaatattaagaatccaaaaaacattttctaaaaccgtttgaaccagcactaacgtactatatatgtaccctacataaccagctgtggaatttccaacacatgccctgaagatctgtacatgattggactcttttttttttttctttctttctttctttcctttttaaacttaaaaacaatgaagtgtgcaagttagatttcttaatggaagtaactgaagatatagaacaatattcctgaaaattccacatattttaattcttggactgctaaatttttcatatgtggccatatatctatacaggtgtttgggtgtttatgtaaatttgccaggcttggtgtgtatgtgggtatgcttctgtaagtatctgtgtatgtgtataaaccgtcaatagtaaagtatagtatttgtgatacagccttataagtgactggctcttgtggaattatatataaaatcttcatgtcataaagtgttactctgtgacatactagttgggacatgtttaagttaaaaaacagtttgctcaactagtatggcaaatggttccaaatattcagatgtactgatttatcaaaaaaattgaaattcagccaaatccaacactgtgttaactattaaatgtaagtaacattaacgtttatattgatttatctttgtgttcaattattaacaagattgaatactatgactgacttttttttattgggtgtttatggatgacttgtagtgattgtcagtcactatacactaaaaaaatgtaaccctgatacagttgcagattgtcaagtataatgttggaacataaatagaagagaatccagagtatatttgatatgaagtaagtttaataacaaagccagataacctgtaaggcgatcctgtatgttctttcaaaactctaacctgttgacaaattatgaatatacttgctgtatgtgtgtatatatctacataaatatatacacacttgaaaatgttaattggatgaatttactatatatgcatacatttgctcatttatgcatatttgcattagccttgctagcatcgctatttgtgcatgttagtgataactgtctttgattgaaatatcccacagaggcatagtgtgaaaattagagatatattgaattcaatataccaattgcctgatatagtgtgttgtactgtcagttgaaaaatatttgtaattttgtgcctgttacgcatgtggaaaaaagaggaaatcagaggtcctcactataatttttaagggtgcatgacatatgatgtctttaaaatacggttcattttagtaaagatgatggataaattccaagatagtataaatgatgcatgtaatacatgaatgtttgtattatatatggccacaaaatgtttttgaagccagggtagtagatatctaaaggttataggcaaagaagtatgaaagttaactttcttgtgatgtgtttttgaggagttgatactcatcagtaagcaaggaattgagtttattttttctaagaactctttactttgaaatatattatgaatgttgtaaatttggataacatttttataaagaagttagatactttctgctcacagtttcagttgattggatgtgtattctcttaaaaaaagcatttggtgttaaaacatttgacacagcaatatattttttaaatccatcaactgaggccatcagcagagctttatagagcgaagcattgacaaaatgtttcattgaactacccaattttgaaagttcaattactttgtgctgtggtttcattgcaaaatgttgtaccttgtgtttcacactggaccatgttattcctcttgaagttaactttgtgacacttaccaccttagaataactatataataaacaggaaaaagtgtttttaaatccaaaaaaaaaaaaaaaaaaaaaaaaaaaaaa

SEQ ID NO: 6181 - DNA, 1165 bp, Macaca Fascicularis
  misc_feature (1)...(1165): n = A,T,C or G
atttgacctgaaaacaatgaaacacnnnnnnnnnnnnnnnnttttctcctagctgattagtttcctgcctgctgtcagtgctggacaaagtgctgttactactttatataacattacaaaacagctagaggtcctggggtaagagaaaaaaagcacattatgacaaatgcgaaagccttcattattacacattccagtttctcactgtgtagtcataagcgaatggtttactttcagaaagctgcctgaaatgtccctttgtattctaggaagaactttaattcctcctgaggaactctactttctgagcccaactgctaagttnnnnnnnnnnnnnnnnnnnnnnnnnnnnnnnnnnnnnnnnnnnnnnnnnnncttgtaaaagttaaaaaaacaaacaaaaaggtttttcccggcttttgaacattttgcctatattatgagagttttgcatatattttatacttgagtagacaactttaataatccagatttatactatcacagatgtannnnnnnnnnnnnnnnnnnnnnnnnnnnactcatttaacnnnnnnnnnnnnnnncttttgaaaaaggtgccagtccttatgtggtaaactaagaagcccattgaatataacagtgtgtaggactgaaacagtgaccttatattattgctaacggaatatgagattaacttcctacaggggccaaaaccagagaaaggcttccaacaactttggtgaaagtaatttggccacatgtcaagccaactgtttgtattcatttatgtacctttttcacaactggagaccttaacattgccaaatcagcatggaggcctcaattacgtgcttgttagtgtgtcattcatgttgattgtaagggattactttcactcagtactgatgtccttggaaatcttacctggaaacatgtttgcaaaaaacattattggatcttttttttcttggtattacatatttgttaaataaaaattaaacaccctccctttttgagtgagggcaggggaggacctgaaataagacgatgtttactaaggcaaataattgaaaattaaatctgcactttatggaaatgaaaaatactaatatctttttcctcatttttttgtattactatattagctaatgatcaaagttgttaaaattataaatttatg

SEQ ID NO: 6182 - DNA, 716 bp, Macaca Fascicularis
  misc_feature (1)...(716): n = A,T,C or G
aaataaaagaannntcnnggagtggtgttgagaatgaannntatttacatacatatacataaaaaacacttttgtactagaattattatctttacatgattacagatagaagtcttttttatgttcagacatcagtagatcaaagggattttttggtttgtctttctctttttttgataatgaatagggtaaaagcaggcaaggtaatgaggaataagtataagatttggagtcagaccacagttcaagatttgacttagtcctgtaaccggctaagggatcttgggcaggtaaccaaacttcttcacatttacttatttatttattttgcttattagtaggaaacttcacctgcattcttcacttttataatagagttaagaatttctacattgcagaaaagcaaaaattaaatgaacagaagtgaaagttttgtgaaaattttgtaaaggtgccattgttactgaaaaactgcttcatttttgcnnnnnnnnnnnnnnnnnnnnnnnnnnnnnnnnnnnnnnnnnnnnnnnnnnnnnnnnnnnnnnnnnnnnnnnnnnnnnnnnnnnnnnnnnnnnnnnnnnnnnnnnnnnnnnnnnnnnnnnnnnnnnnnnnnnnnnnnnnnnnnnnnnnnnnnnnnnnnnnnnnnnnnnnnnnnnnnnnnnnnnnnnnnnnnnnnnnnnnnnnnnnnnnaggcagaggtctcaataagccaa

SEQ ID NO: 6183 - DNA, 646 bp, Macaca Fascicularis
ccccccctcccataataggccccggtgtgtgatgttccccttcccgggtccaagtgatctcattgttcagttcccacctatgagtgagaacatgcggtgttcggttttctgttcttgtgatagtttgctaagaatgatggtttccagctgcatccatgtccctgcaaagtaatgaagtaaggcgaggccatcctgcatttacaatgggcccaatccagtgtccctgtgagagacggaagaggagacacagacacagaggaggaggccacgtggagacggaggcagagattggagtgatgcggccacaagcccagggacgcctggagccgtcaggagctgggagaggcaggaaggatcctcccctagagctttccaggcagtgtgaccctgacacacctggatctcaaacttctggtctccaggaccggaggaggataagctcgtgttaagcccccagttgctaggaattctgggatttcatttcagcagctcccgccaatgcacacacgcattgaatccactctgacatcctgaaactgtgatgtggaccagtgcaacgcgctggttcctgggtgggtcatttcgggaggcccgctgtgccccaggctggatcccagggagtgctgtgtgtgtgtgtgtgtgtgtg

SEQ ID NO: 6184 - DNA, 684 bp, Macaca Fascicularis
  misc_feature (1)...(684): n = A,T,C or G
ttcagccttgctcaagtcacaagtggtnnngaacaatgcatatgtaaatgaacccaacgccacaaaaccccactctctgtgcttctccctctgagtaacagtaaatgacaggaaaaatcaggatgtaaaaaagcttattctcaagcaagagaccctgagctttgccctcccaagcctactgcaggatgttatatgtaaaatgctttcttctaagcaatactcacaaaattgattaccagcagcagcacctttacagccattgctgaatattaagctcaccaggcaaatgtggtagaaatgtggacatanntattggtaattaattcatttgcttntgaagttccttggtagggggtcagagggcagatgtccggagatacctgtaaggaaaacccaaaacgtttttgtaatctccacggctcagctctaaagtagcagaggtacatgtaccttgcttttagcaataaaattgataagcatttcattattttctagagactannnnnnnnnnnnnnnnncagtgaatccttttagaaatcaagttatcaacttttaatgaatttactttgtaagtnnnnnnnnnnnnnnnatatctgttgtatatcacaagcaagatataactataacacaatttggtcgctctagaagcctctcatttctctcctacccttttaccgataagaa

SEQ ID NO: 6185 - DNA, 753 bp, Macaca Fascicularis
  misc_feature (1)...(753): n = A,T,C or G
gaggaggccnnngnncncggaggggcgggcannnntgagggcagcaccnnnnnnnnnngcnntcccagtgaggctgccgaggacgnnnnnnnnnnnnnnnnnnnnctgtcacaggccacctcaggtacctgcttcccccggaagaggatnagnnnnnnnnnnnnnnnnnnnnnnnnnnnnnnnnnnnnnnnnnnnnnnnnnnnnnnnnnnnnnnnnnnnnnnnnnnnnnnnnnnnnnnnnnnnnnngacaggcctcggggtcgtcccatgtccaaaaagaagaaacccaaggacttggacttcgcccagcagaagctgaccgataagaacctgggcttccagatgctgcagaagatgggctggaaggagggccatggcctgggctccctcggaaagggcatccgggagccggtcagcgtgggaaccccctcagaaggggaagggttgggtgctgacgggcaggagcacaaagaagacacattcgatnnnnnnnnnnnnnnnnnnnnnnnnatgtacagacacaagcgggccaacaaatagttccagggtcacccccgagaggacaacaggcatnnnnnnnnnnnnnnnnnnnnnnctgggtgcttactgtctctggcttgtttccatcactggaaatcacttagagaattgtagtgtttttggtccttgataaagcctagaagcggaggtttcgctggcaaaatgaaagttttcttttgtttctgttttttaagatctaagaagttgtgaatg

SEQ ID NO: 6186 - DNA, 755 bp, Macaca Fascicularis
  misc_feature (1)...(755): n = A,T,C or G
gacagtgagagacccactctcatgctgggatccttacnnnaggaatagcacacactttaaaacaacataccacagtgtaaaagcatcatttggaaatgtaacaagcactttattgcaattactcattttgataaagtttattcttaggtgttaaccaattctaaaggatccccaaatcatcacttaggtgaaattatataaaatgacacatttctgagaaatgtttagatccagtgaaccgtagttggtttatgggagcgatttcaagatagccaaatgaactttgacttttgttttgaatgtggtggagtcaagagattgtagatgcctagtttgatttaaacactattgtaaacctatcttgcctattgtgtggacaccaaaagagaccaatgagcctgtttatttttcagaggtctaggaaaattgcatccgtgtgagtagatgtacagaactaatctaaaagtgattgctagtaatattttagaatataataatttcaagaattattctgagtgttttaaatgtgccctgaaatgttggcatgtcatttcagcgtttccatttgaattgctcttgtaatatttttgcacaaaaaggactgagaaaaagactactttggttgaaggaaaaaaagtataatttgatctctaattttaatgtctcctgtggaaacactggggatgaattttgttgacacagttattcaggatatttaaaacagtgttgaacagctcacaagaaattaagcaaac

SEQ ID NO: 6187 - DNA, 599 bp, Macaca Fascicularis
gcctcccaaagtactggtattacacacctggccaagagcctcactcctgtgtacatctttagtgtttgcactgaagttggccttattttttgcagtcatgctaacgacaagttagtcaacattctctaactgacattcattaaaataggtctccaaggtgaggcataaccttggggtgtaatctggatttcacaatctttggggaaactgaaagtaccatctcctgtgcatgaagtgactccacactggcccctgtacgttgactttggtaaaatgtgagtgtaatacagaggaaattggtaagacccccttatctagaactctgaacagcagcggggggggttacaaaggactagctattccgatatcttttgcactgtattggttcccctattgaacataaatatttaaagtataataactgtatattgtaggtgggcttttgagtgttctaaatatctaataggtaaattgaaataagtagaaatataaagaatttagcagctttttgtaatacatttacactcaaattataagcagctaattctaaaaagatgtcattataaactattgaaaactatagtattttatatataatt

SEQ ID NO: 6188 - DNA, 746 bp, Macaca Fascicularis
  misc_feature (1)...(746): n = A,T,C or G
ctagcaattcacagnnnannnnnnnnnnnnnnnnnnnnnnnnnnnnnnntnnnnnnnnnncccagaagctacgtattcttgagcaagtcataaccctactgtgcctcagtttctggatgtgcaaggagtgttgcctgtataaatgtttgtttaggaacttagtaaaatgagagaccactctctccgctccaagaannnnnnnnnnnnnnnnnnnnnnnnnnnnnnnnnnnnnnnnctgaccagagtcccttcctcatccaagagaaagcaaggaaaagcagcaagcaagcaggcataccaggtcaacgggagtgannnnnnnnnnnnnncgaggcctcaaacaaactgaaaatgctctggctccagcaccttatccccaaatgccacaacccagacatggaagccatgcaagagtgactatcacacacacacaggcacagacaagagtaccaccaagcaaaaagggggctaatactgnnnnnnnnnnnnnnnnnnnnnnnnnnnnnnnnnnnnnnnnnnnnnnnnnnnnnnnnnnntagctgccatggaaacagnnnnnnnnnnnnnnnnnnnnnnngtcttctgaaataaaaacattaataaggaagannnnnnnnnnnnnnnngcaaacactattagcagggatgcaatgtgtctcctgggctgcaggactccatctgcctcagctgaactctnnnaaactacagatgaaagatatatgcatacgcacacacatatatgcatat

SEQ ID NO: 6189 - DNA, 750 bp, Macaca Fascicularis
  misc_feature (1)...(750): n = A,T,C or G
ttttgtcttgtaatatgaagttagagtgcctttttatatttgtatattctggaaatgttccgtggaatgttttgtattttnnnatttgagtgttatcagagcaatatgataccagtgagttttcatttcaacctttctttgaatgtataaagtgtcttttttcctatttccccttgtacttgcattgaaatgaatatgaaaatgctaaagttttctataggaattgtttgattttgcagtgctaaaatgctttcttcttacaaaactgtaaaccataggtcagtattataggagaaaagcattttaagatagtgacaatctgagtgtttgtataaaatgtaattctatgcgtttcttatgtgatctaaaaattcaatgcaaatatcttttatttggtagttttgtctacatattttatgctctagcatgtgcaatatatcnnnnnnnnnnnnnnnnnnnnnnnnnnnnnnnnnnnnnnnnnnnnnncataacatatttgtaacagcataaaatattgtttgatgatttcagtgggattttgtctataatgttttcatatgtaaattggagttgaatgactggtaaatgtcatgactgtaaaaatggggaaaatgacttttagttcagtgaatgactttgaaccaatctgaatcttctcaagcacagtttaatacttttgcaactactgaatgctctaataacataacgaagtacttaactgtaatatactatggaaatgcattcagatgg

SEQ ID NO: 6190 - DNA, 1610 bp, Macaca Fascicularis
  misc_feature (1)...(1610): n = A,T,C or G
ttcatcataacttataaagaggctggtgcaggaacaggtggttaggcagctgccctggctgagactgggggtctcctctgccctagcagcccaggtgtagaccactcagactcttatgtaggcagctctcagtggacggggatgatttggggcagggagagtagaggtggccctgggagccctgcatggtcattaaaacagaaccacagcttttctcagtgatcagagataactgtctgaagttaagctgggcttaactacatggctgggagtctcacttatgattctgagctctgtccgcatattggtcgtcccgtgcacacctcccccatgtgagtggtcggtggtcctggagggcagtatccagtcccttcaaaagtgggaaatcaggcagcagcagtgggtcagaatggctgtttttttttgagagcgggaggagggggcgcagagaaagtcaggaggtgttagaggctcacagtccaggcgaaaagtaacaagggccagctcctggtgtggcagtggccactcaggaataaagtggatggtgcccatgatgtgctgcctagcacactgttggtgcttaataagtgtttgctgcatgaagaagggtaagaggggctgcctttactgctaagtttgccacaccctgccgcagctggtcttctctatgatctgacccccttgcagccacactccctttttggccatatttgctcttaaatttagttggcagcaaaaatggcggcgtggttagagatgctagagataaatgagctaaatccgtggcctcttttgcccatttctgcccacagggatgccagaagggccgttggtgaggaaatttcaccatttgatctccccctttgtgggccagcaggtggtcaagacagggggcagcagtaagaagctacagcctgccggcctgcagtctctgtggctccaggacacccaggtgaggcagtcctcctctgaagagctggctctgtcgcacatcctgcgcctcccctaggatctatccccacatgtctcagggtgtcacttccctgagtccggaaccaccaagctcggactccatgcagctccgtctttcaatctcatgtgtctcagccagaagtagatcttgctgtggactgtagaactgtaaagaacatgtgtacatgagctggagaccctgattccagagggtctggaatgcttctgttctctccagccacagctgatgggcacctttggctgggaactgtgttcgattcccctgagccagcggagaattaaggaaagagcagaaccggctaggtgtgnnnnnnnnnnnnnnnnnnnnnnnnnnnnnnnnnnnnnnnnnnnnnnnnnnnnnnnnnnnnnnnnnnnnnnnnnnnnnnnnnnnnnnnnnnnnnnnnnnnnnnnnnnnnnnnnnnnnnnnnnnnnnnnnnnnnnnnnnnnnnnnnnnnnnnnnnnnnnnnnnnnnnnnnnnnnnnnnnnnnnnnnnnnnnnnnnnnnnnnnnnnnnnnnnnnnnnnnnnnnnnnnnnnnnnnnnnnnnnnnnnnnnnnnnnnnnnnnnnnnnnnnnnnaaaaaaaaaaaaaaaaaaaaaaaaaaaaaaaaaaaggccaca

SEQ ID NO: 6191 - DNA, 764 bp, Macaca Fascicularis
  misc_feature (1)...(764): n = A,T,C or G
cagagctgggcatagacnctggttcctcatgaggaatgctatannngctctgtnnnnnnnnnnnnnnnnnnnnnnnnnnnnnnnnnnncatgatgttatgtttcctgacctaggcaagtgcccatgctcagtacagaaccataagttggtagcagcttctcctttcnnnnnnnnnnnnnnnnnnnntccctctgatgagtgcatttcatgttgtgtttccaattttcnnnnnnnnnnnnnnnnnnnccctggtcctttgaaagactgtgtagcccgtggttatggagctgggatgaatnnnnnnnnnnnnnnnttctccaataaccannnnnnnnnnnnnnnnnnnnnnnnnnnnnnnnacatagtgagaactaatggcaataaacgtccagctgcatggtgcacctcttttttatgggggtgctctgctgtctttgtaaaccctctctggcctctgaacatctattataattgtgtagaaagtacatctctatattgtaaataagagtgtcaagtgttgcgtgtcatgcctcatttgaaaaggcttttttatgtctctttctattgaaatatagatatctaatatataaatatatatacataaaatatatataaatatatattatgtaaaacagggacattctattattgattgtaaaaattataaacaaaatgcctgccaagataatggtctagtatgtcttcattctctgcgtaatttttgtttttgtttttatgatttgtnnntcccaaaatgagtagaa

SEQ ID NO: 6192 - DNA, 723 bp, Macaca Fascicularis
  misc_feature (1)...(723): n = A,T,C or G
caggcatgtatcccgtgccggccgaaaacatttattaatgacttcttaagcatttgtctctccttcctcncaagacttcaataaactgatgccaagaatttatggagaaaattataaaaactttactgaaagatagatatgagtaactgaatgaagcaagcaattacgttcatggattggaagaggcaatacaagggaaagatatcatttcttctcaaacgaatctgcaaaatcaaagtgaacaatttgttgttgttgttgttaagagactcacactgttatgtaggctggagtgcagtaacacggtaagagtctcaacctcctgggctcaagtgatcctcctgcttcagcctctcaagtagctgaggcacgcacaaccatccttggctaatgcttttttatttattttttgtagagacgagatctcaccaccttgcctgggctggtcttgaactcctgggctcaagtgatttttctgccttggcttcccaaagtgttggcattataggcgtgagcgtgtacccagcctgcataaatcttgtgcataacttgataaaattttgtttgaatacactgctgtgattaccagccagatcaagatatgtaacatttcctgcatccaagaagatttcttcatgctccttttccccaccctccctgacaaccaggaggttcccttatgatacctctcatctaagtggaatcaatcatgatgtactctgt

SEQ ID NO: 6193 - DNA, 1221 bp, Macaca Fascicularis
  misc_feature (1)...(1221): n = A,T,C or G
cgaggcagagcagaagagagcctacctggagggcgagtgcgtggagtgnnnncgcagacacctggagaacgggaaggagacgctgcagcgcgcggatcctccaaagacacacgtgacccaccaccccatctctgaccatgaggccaccctgaggtgctgggccctgggcttctaccctgcggagatcacactgacctggcagcgggatgaggaggaccaaactcaggacaccgagcttgtggagaccaggccaggaggagatggaacnnnnnnnnnnnnnnnnnnnntgtggtggtgccttctggagaagagcagagatacatgtgccatgtgcaccatgaggggctgccggagcccctcaccctgagatggggtggaaaaggagggagctactctcaggctgcgtccaacgacagtgcccagggctctgatgtgtctctcacggcttgaaaagcctgagacaactatcttgtgtggaactgagaagcaggattccttcacgcctcccttttgaagacactctggcatctctttctgcaaaggcatctgaacgtgtctgtgtccctgttagcataatgtgaggaggtggagagacagcccatccctgtgtccaccgtgacccctgttcccacgctgaccagtgtttcctccccagtcatctttnnnnnnnnnnnnnnnntagggctggatgtctccatctcagtctcaactttatgtgcactgagctgcaacttcttacttccctactgaaaataagaatctgaatataaatttgtattctcaaatatctgctatgagaggttgatggattaattaaataagtcaattcctagaatttgagagagcaaataaagacctgagaaccttccagaatccacatgttcactgtgctgtgtctattgcaggtgggggtggagaaggctgtgaggagcccagtgtggactgggcctgtgcctagtnnnnnnnnnnnnnnnnnntgggctttatgtggtcagtcctcagctgggtcaccactgccccatcgtccttgtcccttcagtggaaacttgtccagcgggagctctgaccacagaggctcagacatcgcccaaggcagcccctgcacatgggggcctctgtgcactttgagacaaatgttcagagccattcacctcctgccctgcttctagagcttctcttctgcactgctctcctgccctctctccctgcccttgttctagt

SEQ ID NO: 6194 - DNA, 690 bp, Macaca Fascicularis
  misc_feature (1)...(690): n = A,T,C or G
caaaaggtttcgannnngcacctaaccagaatgtgggcagaaggcagaggagagggagccttctttctatctttatatccttatacttatcctcattgaccacgggctgagttctttctctgggtctagcctcaaggatttcccctaatgtgggaatcgagtggttcttgccccctgagcttacagactaagaagacagaaaagctttacaactacagagtacatgtgtatacacacaaccaacctaaacacatcggaaaatacatacttaaatcaattcccttcatatacacatctcattagaagaccaggctaacctccacttagagggcaggcaaaggactagaaaagaatttttcttttaaaaaaaaatgaataatagaacaaaattacaaatgtctaagtatctttgtcatacttcataagatctgactggggtaagagataaagaggtaaatagggcctggtatgnnnnnnnnnnnnnnnnnnnnnnnnnnnnnnnnnnnnnnnnnnnnnnnnnnnnnnnnnnnnnnnnnnnnnnnnnnnnnnnnnnnnnnnnnnnnnnnnnnnnnnnnnnnnnnnnnnnnnnnnnnnnnnnnnnnnnnnnnnnnnnnnnnnnnnnnnnnnnnnnnnnnnnnnnnnnnnnnnnnnnnnnnnnnnnnnnnnnnaggcagaggatgcagtgagccg

SEQ ID NO: 6195 - DNA, 2543 bp, Macaca Fascicularis
atctcataatcagaggctctgggtgaggaggtgaagagaaaggactgggtcacccagtaaataactggggggaatgtaggaaggggggggtgtcgcccagatgctgcctttgttttctttcagatgggtttgcttggtttgttgtttgtttggggtttggggagcggggtaaactcgcgtgagaattagatgcctacaagtttcgtgacctaattatttaactcctttggagagacccctttgaatgcgtgtctcggcaaacatcagatgttgttggtagtgaggtcacacatgggaaaaggtgtggaggaatgggtccgtctggagggcggattttcactttgttgtgagcaactgtgcacgggagggttggccgccgggtggggagaccgtccctctcccccggccccccgccgctggctgtttttgtcgttggaactggtttggatctggggctggccgtcccctttcgcccccacccccacctcggccgcccgaggcttttcttccctctcctgcctcttccgcggcggggctcgaggttctctaggtgtttctatgactacattgtgtgtgtgggagggtcagacgtgggggttgcccgcgagagggccgttcctgggcgatcatttatcaatgtcacccacataatgatcctctctgcagcctcctattgatgaggataattacattagctcagagtgactgatcaatgaaaacccaccacacaaaaacttctttactcctctataataccaaaaaccgatacggaaataacatagaaagcctgattttctttcccttccctgtccaccaatggattctgccccctctgacacccccccgccacccccccccaaaaaggacggaggagtaaagtaagaaactagacccaggtttgtttcgtttaaaggaggatgcaattctgttcgtgaatgcattttctctaaatgttggcttcatccctcctttggtagagactatcaacggatttgctaatgtgagttgctttcagactagtctgtggttttgctttttatttctttcctcccctttgggcatttttttttttctgcttcaaaaaaggagataattctttctacaaatatctagtaaaagaaattcctctaggtcctctttttaaaaagcgtttgcctaagtcgggttatcttttgtctttatcacttcataaagtagagcaattaaagatgtgatgttgcatgggcagaaagggtggatccattatacggcgacataatacgccatattctagcatgaaagtttgaagctaaattacgatttcgctttttctagactaaaaaatcaatattttctcaattaaagcgaattttaatgctttacttgctagttgttaaaggcgctgtaaattttattgtaatgcttcttgacttcggagtagatgcaggagatgggatgattctcgtggtctttttcctctcggggaacctagcccaggaacatcccatggtttcatatcaaattgaagcaacaaaggtaagaagggttctgagagggacggggcaaaaggtggagagcccgccaaggaagcccaccagcgccagaggccattgtcttgtatattttcacctctctgtgtcctgcctcctgaaagtgacagaggtgtccattttactctaatctttctcaaaggggagcacgttcgactcacatctgctctttaatggtcagaaaaggagttgcatttggggagcattctaaacccttcccagggtccccctgttctcttccttctccttatttaaccaaatgctaactcggaactggctctttcaccaatttggccatattttatgtgttctggcttctataccagaaatcattcgccaccctcaggagcattccctgtttacagacgttttctcctttcacaagtcccacctagtaaaagttcccgcagagaattaactgtggtgtgttaatagcccaggtctgctactgctctcttctgcaaagctgaaatctggtaacgaggaatatggcattgaactaatgctgggagctgttcaaggtcagcagaagcccaaagactggagaattctaaggcccagtgacttgatgggaagcaaggtagtgaaacttgcagaaagtaaggcagagaggaggagaagaaaatgaggccaggagggaacataatgagagaagaataggacaaggcagaaaaatgagcctttgggacctctttataatttaaaaagaaataataatgaagggaaattgaatatctaaggcttgctattacattttttttttgaggccaatatccgtttaagaacaaaccctcagagatgacaggaagggcctgggtttccaaatggaactactcacaaagttccttttgcagttccttcttctgttaatttgctgggaatgagaagactagggaaaaggcgatgtgtgtggtgtaccaaaggcttaagtaagagtatgatgggaaggggcacctagatataatgaggctgctgttttaagctgaatagaaaaaaaaaaaaaaaaaaaaaaaa

SEQ ID NO: 6196 - DNA, 1640 bp, Macaca Fascicularis
ggttgttctagctgtatacacaaacccagaagatcctcagacaatttcagaatgttaccaattcaaattcaaatacaccaataatggaccactcatggacttcataagtaaaaaccaaagcaatgaatctagcatgtcatctaccgacaccaagaaagcaagcattctcctcattcgcaagatttatatcctaatgcagaatctggggcctttacctaatgatgtttgtttgaccatgaaacttttttactacgatgaagttacacccccagattaccagcctcctggttttaaggatggtgattgtgaaggagttatatttgaaggggagcctatgtatttaaatgtgggagaagtctcaacaccttttcacatcttcaaagtaaaagtgaccactgagagagaacgaatggaaaatattgattcaactatactatcaccaaaacaaataaaaacaccatttcaaaaaatcctgagggacaaagatgtagaagatgaacaggagcattatacaagtgatgatttggacatggaaactaaaatggaagaacaggaaaaagaccctgcatcttctgaacttggagaaccaagtttagtttgtgaggaagatgaaattatgaggtctaaagaaagtccagatctttccatttctcattctcaggttgagcagttagtcaacaaaacatctgaacttgatatgtctgaaagcaaaacaagaagtggaaaagtctttcagaataaaatggcaaatggaaatcaaccagtaaaatcttccaaagaaaatcggaagagaagtcaacatgaatctgggagaagagtcctccatcactttgattcttctagtcaagagtcagtgccaaaaaggagaaagtttagtgaaccaaaggaacatatataaaaattatttttcttctgcaggtttgtggagttcttctcaacatttaaactgaaggaccctgtattatatttcactaactctgaagatgtgtatgtagtttaaagcagtttgtacactaaaattaagttcttggctggccgtcatattgtggtccttaatcttgagataaatccaacagaactttcgaataaaagcaaaagtacaaatgtcataattgattctgtaataagtaaaatttgaaaattgattttgttcattatctacttgatatttccattaaatacatactgttaaggccctctaatgtcatttttctaaacagtaatgtttgctttggtattaaaatttgatatggattcactttttacttatgttaaaattataccatttaactggctcttttgtcgttgtgctgttattaaaacaatgttcttcaatattttgatataatgtattaatattttaatatataatgtacaatttaaaaattagtgctttacctttactatactttttttacaggacaaaaagactgatttttaaagtatggcattttttgcagcataaataaaatattgttcagtacgtaaaaaaaaaaaaaaaaaaaaaaaaaaaaaaaaaaaaaaaaaaaaaaaaaaaaaaaaaaaaaaaaaaaaaaaaaaaaaaaaaaaaaaaaaaaaaaatttaaaaaaaaaaaaaaaaaaaaaaaaaaaaaaaaaaaaaaaaaaaaaaaaaaaaaaaa

SEQ ID NO: 6197 - DNA, 760 bp, Macaca Fascicularis
  misc_feature (1)...(760): n = A,T,C or G
gctggaaatggcctttgaagaccaaggataccagagtgtgtgtgctctgtcatattctgtgatgaatgggaaacaggcttccagaaagccagctctcttctgaaatgtgacggacctaagcaggaagtcatccaggacaggagtggcttggtgttggagatggacgctgttgccctgccatgctccaccagggccaccagtgtatnnnnnnnnnnnnnnnntcgggcacgtgagacctgctcttcactgtctctaccccagttggtggcctccaggatggtagtggcacccccagagcccccatcttcagcatgttccggagcctcggagtggaannnnnnnnnnnngctctgtgtggacgcctttctcccatgatctaaaggggacactgtactcttaagcttttgacctcatgccttgtgtagtaaaaaaaggatttgggggtttttgtttggttcctgagagggctgtgttttttgttttgtttccttttgtttatgttttggcctttcctctttgtctttccatgtagacnnnnnnnnnnnnnnnnnnnnngatggctagaggtgtaagtgcagcttgtttagacgttatttcgggaaacttaccttggatgggaaatggaatcgtggattcaccaggccggtgctggcacactcaaaccctcgccctttccctccggttcagtacctattgtttctcctttcaaatatgtgattgtactagctctttccatatgaaagaatannnaaagagaaag

SEQ ID NO: 6198 - DNA, 718 bp, Macaca Fascicularis
  misc_feature (1)...(718): n = A,T,C or G
aaccaggacttgtacgttcaggctgaaatcctccattctgatgctgcactgaccttgtttgtggacacctgcgtggcatcaccatactccaatgacttcacgtctttgaattatgatctaatccggagtggatgcgtgagggatgacacctacggatcctactcccagccgtctcctcgcattgcccgcttccggttcagggccttccacttcctgaaccgcttcccctccgtgtacctgcgttgtaaaatggtggtgtgcagggcgtatgacccctcttcccgctgcaaccgaggttgtgtgatgaggtccaagagggatgtgggctcctaccaggaaaaggtggacgtcgtcctgggtcccatccagctgcagacccccccacgcctagaagaggagcctcagtaggtggtcgctctcagaccccactgcccaccggggcacagacccctgactctcggggacttgggatgtttctcttggtgtcatactccaactcaaattgagctctacactgtgctgcacctggtcatacagagttgaatcagacctggttcctgccttccccaaggctcatggtccttagaggacccattgcagggcgaggtcaagagagttctgacctggatggcccatagacctgacgtcctagaatccatgcttctcacctgtgaaatgaaaatgtcaatacttacttcttagcannnnnngagggtac

SEQ ID NO: 6199 - DNA, 1759 bp, Macaca Fascicularis
agaaggaaaatgctccctcctagggtgtcccggacgctactcacagtacctcttggcaaggacgagatgagaaggagctgaagaaaagtgagccccaactgcgtccagcaacccagctccatccttgccgcgactggtgcccgagcgtctgctggggagggagaggagggacctagggacgccaggggcaggcggcttttacagggacctccccgagccccagctgagcgggagctcgggtttcagctcgccaggctctcccatcttcatctgaggggaaccaccttcagccagagcgacgtcagcccaaacctctcctctctgctgccttaacccttgcggggccccgggaggtgtggccattcctgaagcccgaggacggcggctgcgaaggaaggtgcggagcagggaggccagcccaggtccaggtgatcacagtttggaaggcttatctataggctactggaaaaagttttcctcttcctgtgatccatggtgaattcagcaacatgaacagcccctgcacacacgccaggcaggaacggagaagaacacataagaaccctcactgcctccaccgagagggctcagcttaggtacaagatagcaagtgacatctcgaagtgaggaagaaggatgttttataagataataggttacattttttataaacttctccgtgccaggtaccttacatgtattaactcaactattcgtcacaataaacctagcctctgtattttccaattagagaaatggaaccattgaggattcaataactcatccaaggccacacagttagtgaggggcagagccagagtttgaacccggttagcttaggtatctctattatctgtcctgagactgcccccaagaacatcgcatgggatgagtcttgttcctacactcaacttccatattgaggtgaaatcagtttaaaataagcaccaagagtagccttaaacaggagcagaataccagagggcagcatatacctaagaggtagagggtagaggttagaagaagggaagttcaccttgttgctggccaaccaatactggtcctttggtgatgggatggggaagaagatgacttagtttccaaataactgtaggcataagagcctctcgggcgggcgcctgtttcaactccagctgacagcaccacttcctttttcctttcatctcccgggtccccatctcccatcccccaccacacacaccttcctgagttaatatcaagcagcctcatccctacatgaattgcatccccctgacaggatggggctgtaggtgatgaacctgaagggtaccagtatataccacccccaaatatgcccctttggcataaggattattttgagctgaaagcagttaagaagaagtagatacaagaagaggtctccacctccccctctctaccaggacggacagaagttaatcactggagacaaccctagacccttatcagcccagaagaatctacatagcaaaacttactaagtagtcttatctcccattagtacccccatttatttatcttcccataatttgctacccgtagaagctcaaaggcctgtttcgttgtcttgccgtttctctgtgaatttattgttcttttttaaaatgcaatataaacccaaattctaaccatccctttgagttactcctcactaggtacctccacgtgtaagcaccatgcacaagttaataaacttttgtttgtttttctcttgctaaaaaaaaaaaaaaaaaaaaaa

SEQ ID NO: 6200 - DNA, 1034 bp, Macaca Fascicularis
  misc_feature (1)...(1034): n = A,T,C or G
tagttcgctcgtgggtctcatggttcagacagagtgaggtggacggctgggatcagggagcccggagtgcgnnncagactcgcagcaactgttgtaatttgggctgttcggaatatttaagttactgatcggaagatgaaagtagcttttctctgtgggaagccttgcagcccgtaggagcggtgtcaggagccacgcagagctcagcagcagtggagcccaggtgttccctgtttcctcagcgcgcgagccttcactgcctgctttgttcaggtgccagtgtagcagtaatacaagctgtaattgttctgttttgaagtttattctgaggcttttttgagcataaatgattatacgataaagttaccctttattttggaactcatttcagtggggatctcctttataaagagtgttgcgttcagaggtttaagtcccatttgggttccttgccgtgttgattgtagccttcaccttggcttgaatgaaggtctgtggtcagaatgtgtgaggagctgcctaggtgctcaggaggtactaactggaggtcggtttcttcctgggtgttacgggcacctgctcacacagttgttactctgtgaacatttccagtgtttcatccaaaatgaaaacccaccaatgcttttgctaacttcagtgccttttataaaaatcatttttaaatttcctgaacttgctttttgagaatatagtgttagtaagtagatacaagattgtttttgtttgtaaaaattctgaattgaaactttgtttaaaaaaaaaaggcttatttctttcatatgacggtatcggtgaggaatattggaatcaagatttaaatgttaaaatctgattttgttacacagggtgttttcgtttgttttgtagcagacaagacctagacaccagacagacaacacgtgctcttctaagcagcagcattttnnnnnnnnnnnnnnnnnncaaaagaaatcagaatatggatattcatagtgatgatctgttttctctaaaatcttaccatattgtctgta

SEQ ID NO: 6201 - DNA, 756 bp, Macaca Fascicularis
  misc_feature (1)...(756): n = A,T,C or G
gacaatgcacatctgtgaattttaaagtatatttgtgtgtgtgtatatacagcacatatttacatctatgaagacacagacactcatagagacccacatgagctaccacttgctgagcctttacagcctttaagacttggaggttgagaattagagacagaagagaggctgttgatggcctattaaaatgatcaaagatgnnnnnnnnnnnnnnnnnaaaaactgttcatacttatcaaatgattatctgcagctacattctttgttaacttatttaaagtcatgttgcaaaaaaggtcaannnnnnnnnnnnnnnnnnnnnnnnnnnnnnnnnnnnnnnnnnnnnnnnnnnnnnnnnnnnnnnnnnnnnnnnnnnnnnnnnnnnnnnnnnnnnatcataatttagactacctttgagtatactgtaaagtgctgtgtgatataatatcaataaagtacttattaaatggcactttaatcttttcttttaaaataacgcactgttctaaacttcagtattgactattgactggtgcatagaatccaatgctgtaattagaaagtaannnnnnnnnnnnnnnnnnnnnngtccctgttagtagccctgttgccatgttcaggcttttaaaaaatgtgnnnnnnnnnnnnnnnnnnnnnnnataaggaaaatacaatttctgttcagagcctctgaaacttggctttcttacatttggttggtttatgtgacaatccctatgaaatgagtggacgtgt

SEQ ID NO: 6202 - DNA, 726 bp, Macaca Fascicularis
  misc_feature (1)...(726): n = A,T,C or G
gannnnnagagaaacatggaagtnnnnnnnnnnnnnnntcttgagagagagtgacctggcaagggccgatgaaggggctgggcctgggcttggcttctcttccttctctcagttgctccctctgcttaggcccctggtactcagttgcggcagccgggagaccccaggtgagtttgtgagcacacatgtagttggttcttacccccgggtgtcacactgggccgggagctgaacaagagtttggaacggaagttatgaccaagggaatactctgattatgctgctcatttataatagtggacattatgaaaagctctgattcctacataatatgaataaggatgaataggccgggcgtgnnnnnnnnnnnnnnnnnnnnnnnnnnnnnnnnnnnnnnnnnnnnnnnnnnnnnnnnnnnnnnnnnnnnnnnnnnnnnnnnnnnnnnnnnnnnnnnnnnnnnnnnnnnnnnnnnnnnnnnnnnnnnnnnnnnnnnnnnnnnnnnnnnnnnnnnnnnnnnnnnnnnnnnnnnnnnnnnnnnnnnnnnnnnnnnnnnnnnnnnnnnnnnnnnnnnnnnnnnnnnnnnnnnnnnnnnnnnnnnnnnnnnnnnnnnnnnnnnnnnnncctgactcaataaataaataaggatggataaattatagctgtatgcatcattcattatgctaagacattttaaagtaattatgagaaatgctctactaatcatga

SEQ ID NO: 6203 - DNA, 702 bp, Macaca Fascicularis
  misc_feature (1)...(702): n = A,T,C or G
ccctccggtnnnnnnncctacccgcgcccgnctgctctttcttcatttctccgtagtgcttgtctttgttccaggaatagtgctccagttacctgctgctggggttggggctggagcctcactcactcggaagtgcttggaagtgtcatctaccctggccatcccggggatccctacccnnnnnnnnnnnnnnnnnnnnnnnnccccagctattggccaggcccctgttacaaactgcgcagaccacccatagccctgctnnnnnnnnnnnnnnnnnnnnnaggcttacatctgcccagagaactatgctgccacttcacatccactcaccacatcccacctacagactaccgcctttcgagatcaggaccaacctggaaaatgccagagttggctctgcctcttcggacattgatttggacagctcaccaacccctgaagaggccaatcattnnnnnnnnnnagttttctacctactccgagtgtcctcccnnnnnnnnnnnnnnnnnnnnnnnnnnnnnnnnnnnnnnnnnnnnnnnnngttgatatttcttttttcctatgcactggttttacacagctgtcatttttctttcaaaattgcagcagtcccacagatgtatgcatttggacaaatagtactaaaaacaaaacaaacaagcactcagcccagctcctcaatactacctggaaaaagcatgg

SEQ ID NO: 6204 - DNA, 475 bp, Macaca Fascicularis
  misc_feature (1)...(475): n = A,T,C or G
cccaagagcaaggccgaaaaaatcaagagaaggcccacggacaaggtgctgnnnnnnnnnnnnnnnnngccgcttctactggagaggcctgagggagcccatgcagccccccagccgtccctggagtgggacccggcccactggtccccagggaggggtgggctcccgcggaggccggccctggcctgggaggcacccgggcgctcctgttccgagtctaccctctaccccatgcctgtcctcgtccccgtggcggtggccccgcaggagggccaccagacctcagcccaagccctgttcccctttgaggcagcactgctcacctcggtggctaggaggaagcatcgccgctggcagtccaccatggagatctcagcccgggcccgcctggccagctgtcccgagtctaacctggggccccccaggccagtggccagaagagcaggtggcccacaggcccggggccggccctgct

SEQ ID NO: 6205 - DNA, 679 bp, Macaca Fascicularis
agctgctgatgacgcgtagtgggaaggatgaactggttttatgtcctaaagcactgtccacacaggagtggccctggtggtgagaagtggtctctgagggggctggaaggaggatgaacgggagaagaacctccctcacttatggctctccatcttctgccgtagcctcgtggactgaccctggcccccacagatggccccaccacagatgaggtgacactccaagtctcaggagagcgagagggctcacccagcactgctgttagatacccctcaggcagtgtggccctcccaagccagtggctgctcattggtgagatcctctggctaaagttgggagtagatgaagataaagaacctgtgagcccagcttctgagctggaaagctaaggtccccttcagcctgatgacttttgccccccaccttaggacaccacgagctacccccagtcctgcacactaccatgctgagggtccatcccaccccggggagtggaactgcagagacaagacccccagagaacacccagaccccagccttcttcttggaggtcagtgctggcagagagtggggggtagggaggccccagcagatgggggaatagcccctggaccttttcctcaggctgctaagaataacaatcagggtgggtcaattgacctcacacaattcccagaa

SEQ ID NO: 6206 - DNA, 714 bp, Macaca Fascicularis
  misc_feature (1)...(714): n = A,T,C or G
gaaccctagaaagcaaagctgatacaggagcctccaggactgaaaggcctcagtcagcaaaagaccccgtaggagatccaaccacaggtgctcagcgtgggccttgggtgtgtctcgtgggggtggggggcggaacccgtgaaaaacctcagagtaacaccttcagggcaatgcacagaagatccctaaactgccttgtaaacaaaactgagagcttgagtcagaggaagccgagacgagatccttcctcgacactgttgagaacgccgacatcctcccacaaatgaagacgttgcaagcaggcaaagtgcttcagttttgttttttgttttttttttttgcctttatgacgatttgtgcagccacttggctatggagagcgaccgacaccccctcttacttctgtgaatgtttcctgcaagctgactccgtgtgttcacttgccgagctttgagtaaaaagatagcacgtgtctgttgactcacacccgtgttttaagatggaaaactttacttctgtccttggcaggacatggagagagggaggcactccaaaagtctcagcctccatcaagacgtgnnnnnnnnnnnnnnnnnnnnnnnnnnnnnnnnnnnnnnnnnnnnnnnnnnnnnnnnnnnnnnnnnnnnnnngggccaatctaggcaacacggtgagaccctgtgtctataaaaattaaaaataaaacataaaaaa

SEQ ID NO: 6207 - DNA, 777 bp, Macaca Fascicularis
  misc_feature (1)...(777): n = A,T,C or G
gtaggcccatgggtnccctactagaaaggtgagtgaatttgccttcagttaacctgggaccttctgtttagcttccttctgcctcccaaagattttaagcattttgtaaatgtataaactcacctctggtaacagtggcccagacgctgcnnngtgctaaaagcatgggaagtgtaagggcagtctttccctgggaaatggatgttactctattctgctgcccctacctgttcctgaggcctcatttagaaagaaagtcccctcagaaggctatctggcacttagtgtcctagccaggtcaagtatatgagaaaggtaagttcattttccccttcaggtcctcagtggattacttaaccactgctgtccctcggtccctttttcctaaacaggggtttagttctgtctttttctccttttttctaaatgccggtaaatatctacattcaccnnngaaagaggaggccagaggtcaggccagctgcccccattcttttaacgttgtagggcctgcccctggagtggaccctcctctttgggcctcgtgagcttttttgcttatcatgttcaatctcgtgccgctttcccccttcaagacgccacttggagggtaggggatctgcttcccactgtaactgggctatgggatgctgactaccttgcttacagattcctggtttgataaatttgttgtattcaaaaacttgaaatgcaggacgccattaagtgtctgtttatatttttggaatatttgtattacttacaataataataaaa

SEQ ID NO: 6208 - DNA, 712 bp, Macaca Fascicularis
  misc_feature (1)...(712): n = A,T,C or G
atatattctttaaggcattccacttagcttgccagtttagacaatcaccacagttattacccaaatactaggaacatnnnnnnnnnnnnnnnnnnnnnnnaattatagtgatgagaatttaaatatatgcttttctagaatttgatgtttgaccatttatgacttaattacaagagagccagtaaattaagacagtgtctcaacaagcctaggctatcttttaagttgaaaaataccccactgtagtnnnnnnnnnnnnnnnnnnnnnnnnnntgacttacactggttccatttacaaattttcaactttatgatacatttatcagggtactaaatgcatttcaacttggtagtttcaacttgataggtttaccaggatgtnnnnnnnnnnnnnnnnnncatctgtatttgggggttactttagtaataaatggttagtaagatatnnnnnnnnntgtttgcctataaaattgtcagggtatttttatactgttggttcaagaatgtttaatgctactgaacataannnnnnnnnnnnntggtttttggaaggaattttggtattgaattagaagtctgccctagctattaaatttctgggtatttatcctaaggaattaaaagagttaattgtttcttcagtgggcttttgttttagatacttaagaaatccaacagtttgtatcataatgtaactgtaaaaatgtaaacg

SEQ ID NO: 6209 - DNA, 617 bp, Macaca Fascicularis
  misc_feature (1)...(617): n = A,T,C or G
agctagacaaatcaacctcgtgcctaatggaggaagagtggaacctttgtaaaatgtgtacataggacctggagacctcgtgtccgccctgctctttcttccgatcccacaggaagtgcccctgcannnnnnnnnnnnnnnnnaggacgtcacctgtgctaacctgggggaaggtggggtcctttcttctttcctttcgagaagcactgaaactcccaagtgtgttcttatcccatggatannnnnnnnnnnnnnnnnnnnnnnnnnacaccacgagctgtcaacgcggcacgggtcataacatatctgggtgtcatcggacacctcgcctcacccaccctgtaggagcgtaaggagcctccatcctcannnnnnnnnnnnnnnnnnnnnnnnnnnnntcggagggcttttctttcttttatgggtggcccagcttcttcaagaccttcactactcggcctcagtggacagtcgtttcctttctgagatgtgaccttttgttttcatgccttccccttgaagtcatcctgtgttttgtaatcagctgtcaggccaaatgtctgacccgaaagagaatgtatttacactcgtgctgcgttcagcagcccctctgtgtt

SEQ ID NO: 6210 - DNA, 1306 bp, Macaca Fascicularis
ctcttctaaagtatatagcaattttttactggaaggattggcagggccccaagggctgggagggccccagggtctctgagacctccacattctccctgtctgtacccccacctctgccattccgctccagctttctctgactcgtcacttcccctctttttctgatcagtttctctcccttctccttctgtccttcatgctaccccacctctctgaccttcagtcactcttctttccctgatcctcgttctcccccttctctgactttctctgaatgtggcatcccaggggtgctgggtatggtcatgtaggttgtgtactgcacaaaagtgcctcgttggctctacttgccaagatctgtctggagagatgcccatttcctttgtgtgctaatggtttggggagaccttagcagaggccaagcctgtgctttgcatggatccttctctatgtctcctcaagcagagggcccccctctttggcactaactccccagagtagagcagagcagggagcttgagaagagaaacaccaaatgttctgaaaatgtcattgtgaaatcaaaatggaaactcgtcaactaaaggtacccccttttctcatcctcatgcccatcagacggtttagagagaccaatccatcaacctccggctgagcatgcctaaccgcagctctgaaagactgaaagcaagacgctaatggaaaacgcgaacacttccattttcctactccacacccctctgacttcagcccttcttccacactgggcagaagacatctgctgcttttctgaaaacccagtgatcaacaacactgctggataagagtacaagggcagaaccaacttttggagtaggacagatactctaaatttaaatagaaaatgtgtaatagggaataaaccaacacatcattgtagcatgctgaaatgagcctcttactaacggtcagcagtgacaccgcggtgtttttcacaggcaaaggcaggtgttgaactccaaatgtcagcgcctggagggggggccgttctgagggaaggatgcattttgattctggacagtatgttttcctttgaatcactgagtcattgggtgtctacaggatcctgggggtcagctcttctcaaagactcagggacaaaagttgattttcccaaagcagccgagtgcgggaaagcgtgctaatgttggacaatgtgtggagggctgtggcatcatcacgcagctcctactgtatacacagaatcatctgctgaaataaacaccaagtgtgctgctttcaagtgaaaaaaaaaaaaaaaaaaaaa

SEQ ID NO: 6211 - DNA, 697 bp, Macaca Fascicularis
  misc_feature (1)...(697): n = A,T,C or G
gacacacatannntagatttaagaccagggtactggactcagtgtctcacacctgtaatcnnnnntttgagagtctaaagtgggaggatcacttgaggccaggatttaagagaccagcctgggcaacacagcaagaccccatctctaccaaaagtaataataataattagctgggtatggtgccacatgcctgtagtcccagctactcaggaggctgaggtgagaggatcacttgagtccaggagtttgaggctgcaaggagnnnnnnnnnnnnnnnnnnntcccagctctgggtgagagagtgagatccagtctccaaaataaataaatcaatcaaataaagaccaaagtcaaaccacacatcaggatctctcacacccttccaattttgccatctaccannnnnnnnnnnnnnncatctcccatctcttccaccatgacgtcactctttcaacaaggctaatgtcctcttactcacccttgcctctaagcctttgctatcaccatttcccacaaactggagggccctctctctctctttacccctcttccactacctcccacccctactttttccagaaagccatttcctctctttcttctgattggtcctgccctctcacccaggattatatgctggaaatgaccacttctggagggcaaggaacaagcccttgatctgcataatgagtgtcaa

SEQ ID NO: 6212 - DNA, 698 bp, Macaca Fascicularis
  misc_feature (1)...(698): n = A,T,C or G
ggcaactaattacttttgtcttttttggtcggattgtgccaaattattttgcatttgaatgggaacgtttttgcagtgaatccagatattgttgtattggtttggaaaaacatttaaatatatttattcatgtgaacatgtgtgattaaacaacctattttacatgtttctgtaattctgaggagtgggctgggggtaggaagaaatggcatcacttaaaattcagggcttatgtgaagaggtgttttaaagttagcatatgcacaaaggaatgagttggtttaaaaannnnnnnnnnnnnnnnnnatgaaattggcttattcacatcaaaactagataagatgttaaaaaaaagatatgaaacagaacctatagtttcctgaaatcagtacaattctatttataagaagctggaaagcaatgcaccttgattgttttaggaatgatttatgtgttgcaattttaatttatttaaagcatgtctactgtgtttgtcctaagagaaatatttcaacaaaacgtgctctgtgtttaagatatgtttaggcagtagttagcaactctgaaagtagaaactggaaatgtttattgtgaggcttgttgcagaatttccattttgtgagttacttcttagtttcatgtcagcctaaaattgtgaattcccnnnnnnnnnnnnnnnnnnnnnnnnnnnnnnnnng

SEQ ID NO: 6213 - DNA, 764 bp, Macaca Fascicularis
  misc_feature (1)...(764): n = A,T,C or G
ttctactcattttgggannnacaaatcataaaaacaaaaacaaaaattacgcagagaatgaagacatactagaccattatcttggcaggcattttgtttataatttttacaatcaataatagaatgtccctgttttacataatatatatttatatatattttatgtatatatatttatatattagatatctatatttcaatagaaagagacataaaaaagccttttcaaatgaggcatgacacgcaacacttgacactcttatttacaatatagagatgtactttctacacaattataatagatgttcagaggccagagagggtttacaaagacagcagagcacccccataaaaaagaggtgcaccatgcagctggacgtttattgccattagttctcactatgtnnnnnnnnnnnnnnnnnnnnnnnnnnnnnnnntggttattggagaannnnnnnnnnnnnnnattcatcccagctccataaccacgggctacacagtctttcaaaggaccagggnnnnnnnnnnnnnnnnnnngaaaattggaaacacaacatgaaatgcactcatcagagggannnnnnnnnnnnnnnnnnnngaaaggagaagctgctaccaacttatggttctgtactgagcatgggcacttgcctaggtcaggaaacataacatcatgnnnnnnnnnnnnnnnnnnnnnnnnnnnnnnnnnnnacagagcnnntatagcattcctcatgaggaaccagngtctatgcccagctctg

SEQ ID NO: 6214 - DNA, 699 bp, Macaca Fascicularis
  misc_feature (1)...(699): n = A,T,C or G
aagagaagggaagaagaaannnnnnnnnnnnnnncnnnnnnnnnnnnnnnnnnnnnnnnnnnnnnnnnncctgnnnnnnnnnnnnnnnnnnnnnnnnnnnnnnnnatgtnnnnnnnnnnnnnnnncagagttatcagtaggctagatagaaggtgacctctcctcataaggacttggacaactcagattatctgaagacacagacctgacaggagggagaagaaaaaacaaaacacttgaagcaagaaactcaaatgtaatcctacgannnnnnnnnnnnnnnnnnnnnnccatcagaagtgaagataggaagctcatcagatagaacatcagcccatgagatgtttgcaacaaatcattttgttgcaagcagtgtgtcgcttctgcacaatcagagactgtctcgatctctccactcaccgtggaagttgccttgtgcctaaactgaannnnnnnnnnnnnnnnnnnnacaaattttatttattgttatgaaactgtaaggtctacatataaagggaaaaagttaatgtggaaagctgatctacactcagctgatgccagcatatattaaagcagttcacgtgcagagaacaaagcaatgacaaccattggcccttagcattccnnnnnnnnnnnnnnnngtcttaaaaaggaagggaaaagtcttttgttgccctctcctatccttttgccatatga

SEQ ID NO: 6215 - DNA, 733 bp, Macaca Fascicularis
  misc_feature (1)...(733): n = A,T,C or G
tcagggcatatacaaaagggttgttnaaactcgatgttaactttacaacntnctgacctggtgcatgaattctcaagtactgtatttcactgtgttggtgtgtctgatggaaatttcgaggtggtcccacaaaaaatattttatgtagtgtgccttcaaagagaaccatttatttctcttcacttatcgtcccacaaagtcacattgggtggtggtcagccaagtcccatctggtctagttttactcttgtcccaattttaaagagaaatgggaatgagtttgccctggtgagacccacaccattnnnnnnnnnnnnnnnnnnncttaaagtccagtgttggctgttagtgtatttgatattctgcctgtctcctcatggttgaaatatgtctgaagaatagcnnnnnnnnnnnnnngctgtttatacttttttaaactttcctgtgttgtaaatattgtatacttttggtgattccagctatgtaacctctatgctctgtaaggtgattatttgtatatagcaacatggcccagtgatattatatagtttcccaatggagaggttattgagtaacctttgcattagtttaaacactaccagaagaatgctgagccaactataaacactcaattttgtatgttttccaaattgtacttattactgcttttgatactgtattacgtgccaatagtttcccaatcacatagcaggcaagagatattttgtacttt

SEQ ID NO: 6216 - DNA, 758 bp, Macaca Fascicularis
  misc_feature (1)...(758): n = A,T,C or G
gtattaatttnnnnncaggaaaaacaagaaattaacccagagagattctgggttctggaattcagcatagctacctccggaccgtggtgtctggcctccatttttgtctgtcattcagctnnnnnnnnnnnctgcagtcacctttactataaggaacctgggtataggggtggatgggcttcacgttaatttttttcttcctttagggtgggggattggtttggctttcttttgttgttgttttttgttttatttttgtcaatcaagattgatttttagatgcaaggacttgaaaagacccagaaggatgccaccagtttttccttgaggcctaggatttttttttctgtcccgagcannnnnnnnnnnnnnnagcttagtgcacccgtggcaccagccattttgagcagagcacctctttggggagcttttcgttttgttttgtttttaattctctttccttagcagcaaggtcttttttcctagagaatctactccattgcagaatcattgcaacctcaggagccctcactgattgagtgctgtcagcctgatatactactttggactctggaaacagatatgggttctattctctatttctactgtgtgtcgttaaacaaccgtcagaggccagatgacctgttagatggctagtcctgtataatttgactctgtatgtttcaatgtatgttactgcaatgcttcacctgctgtacagtgtttgtgagacgcnnnnnnnnnnnnnnacttttata

SEQ ID NO: 6217 - DNA, 764 bp, Macaca Fascicularis
  misc_feature (1)...(764): n = A,T,C or G
aggacaggctannnnnnngtccatnnnnnnnnnnnnnnnnnnnnnctgtctcggattcaggacaggacaaataagaaaaacttatgaaaatctgactcacttatattgcaaaaactggtcctgtgtaactactaataataaaaaataaaaataggccacaaaaccttagtatataactatgccctttgtccagccctataccacaacccgatattcagaaaattgcaacctggttcgcatcaagtttaaagatgcggcaaaatctaataacagatagataacaacaaaattaatataaggtctctatttataccagcacaacccgcctaaaattcccctccaaatcagactattagtcaatccagacactgcccctgttgcagtaaagccaaaccaggttttattaaaagctagaaagcccccggtttccatatcggagaagccccaactaaaagctcctcaaagcacttccccgcccttaatctccctcaccctcgccgacatattaagaattaaggtagcggctaaagttaagaccaggacagcagccctagtgcatagtaaacttaaagtagccataaataaaaaccttaaagccatagaacaatctatcacaaaacttaaagagtccttgacttctctgtctgaaattatattacaaaaccgacaaggactaaaaattgtctttctaaaaaaaaggcgggctctgtgcagccctgaaagagcaatgttgtttttatgcagatcattcaaaaatagttaaa

SEQ ID NO: 6218 - DNA, 721 bp, Macaca Fascicularis
  misc_feature (1)...(721): n = A,T,C or G
aggtacccggcggggcaggggattgggtgnnntaccggatttcggtatcgtcccagacccaagcgagtcacgcttcntgattctcgnnnnnnnnnnnnnnnnnnnnctttcaaattcctgccttccccctcccttttgcgcannnnnnnnnnnnnnnnnnnnnnnnnctcagggtctcctttctttctcacttctgtcttgaaggaagcatttctaaaatgtgtcccctttcggtccaacaannnnnnnnnnnnnnnnnnnnntgaaggnnnnnnnnnnnnnnnnnnnnnnnnnnnnnnnnngnnnnnnnnnnnnnnnncgggatcgtttgcannnnnnnnnnnnnnnnnnnnnnctgtgaaggcttaaatgagtttagatgggaaatagcgttatcgccttgggtttaaattatttgatgagttccacttgtatcatggcctactcgaagagaagaggagtttgttaattggtcctaggtagtagcctcattaaccatcgtttgtattactgaccacatagcctgtcaccagnnnnnnnnnnnnnnnnnnnnnnnnnnnnnnnnnnnnnntgtctttgaggacagacactgcccggaaactcagtctatttattcttcagcttgcccttactaccactgatattggtaatgttcttttttgtaaaatgtttgtacatatgttgtctttgataatgttgctgtgattttttttttttaaaa

SEQ ID NO: 6219 - DNA, 2575 bp, Macaca Fascicularis
gcggcgtgcctgcgcgcggtgctcatggcgctctacgatctcttctctcacccggtcgagcgcagctaccgcgcgggactctgctccaaagccgcgctgttcctgctgctggccgctgcgctcacgtacatcccgccgttactggtggccttccggagccacgggttttggctgaagaggagcagctacgaggagcagccgaccgtgcgcttccaacaccaggtgctgctcgtggccctgctgggacccgagagcggcgggttcctcgcttggagcacgttccccgctttcaaccggctgcagggggatcgcctgcgcgtcccgctcgtttcgactagagaagaagacaggaaccaggatgggaagatggacatgctacattttaagctggagcttcccctgcagtccacggagcacgttctcgaggatggtgaccctcgtgatgcagagcatggcgtttctccagtcctcctttcctgtcccgggatcccaattatatgtgaacggagacctgaggctgcagcagaagcagccgctgagctgtggtggcctagatgcccgatacaacgtatccgtgatcaatgggaccagcccctttgcctatgactacgacctcacccatattgttgctgcctaccaggagaggaatgttaccaccatcctgaatgatcccaaccccatctggctggtgggcagagccgcagatgctccatttgtgattaatgctatcattcgataccctgtggaagtcatttcttatcagccaggattctgggagatggtaaagttcgcctgggtgcagtatgtcagcatcctgcttatcttcctctgggtgtttgaaagaatcaagatcttcgtgtttcagaatcaggtggtgaccaccatccctgtgacagcgacaccccagggagaaatgtgtaaggaacatcttaggaccttttgaaagagcccagaggacacatgcaggcttgtgtgcttttccccctcagagacaacagttctttccaattttgctctacacaagttccatatcttcagagctcctgcagaatcaccaaggactagtttgtggaaaggtctgagagttcctggaggctataattagctttttgggttttcttccttgccttagagttgaatttcgggagaaaatggcaggcagttcagacatcttggaaagagtcccatctctggtcaagcaaagacttttcctctgttgaactgagaaacacactgtgcatttcttccttctactgtgagccactcttacgctttccagggctcttttgtgacaaacatgccaatcactagcactttgcacctgggggcatctccatttcccattcagagctttgatttccagagctgaggcctctaactggagacctggaggggcagggcccaagggcaagggctgcattagcacaggcatgagggagggctgctgaaggcgacttggactgtccatctcccttggcccaacagtcagtcatctgtaatcagctcagctgagcagccttggatctttgccgaactgtggctggctcttcaccctattttgccctctgtctgtgcccctgatggcaggctaaagtcagaggggctgtttcattcccagccccctcagcagcactgagggaaggaaggattgtcacagtaggttctttctggccctcacccaacagcctgggcacttggccctcctcctccttgacggctgtcccccttcctgcaaaggacaggggcaacaggagttggtgttgggattggctcccactgcctgacaaccacaagtttatttggaaggctagtgggaagcccagcggctggcccttcccttgactaaggaccacagtgcccatcagagtagggcaggcagctttgggaaggacacaagaagcagtgagggagtaaagaagatgctggcctgggcaggccagtccagcctggccactagcagaatgccaagcagttcagtggattaccctcgtggctaagcaagtgtctgcaagagcagagatgactggaaggggcctctgcacacggaagacggcttgttcagcccattcatctcctgaggacacgtgcagtctcctccaaggacagacggagctgctttctgatcccaagcaggtcattaccatggggaggacgtggcccctgtgatccgtgcttcatgttcacccggaaacatacccctcagtgtgtgcctcagtttaccatggagatcagttctcatttttagtgctcctttagactgactaaaaacaattttggaaacaaagctattttgaagtattcaaacagaggaattccctaacactgtccccgttgtctttttttaatattcaggctgttttatatgcctaaatttttttcttaagatctaaatgaaaaatagtttcttgtttaaatccccataaggcaatgagatatggaaggatgacaagataacgtataaacattagtttgcatcttattaaattattctaatgcaaattttgtataaagaacccatgatgttttgtacctttctaattaaaatgttcaaaatgaaaaaaaaaaaaaaaaaaaa

SEQ ID NO: 6220 - DNA, 775 bp, Macaca Fascicularis
  misc_feature (1)...(775): n = A,T,C or G
ctcgacccacagggacagccagccccagagtctgcactgggagaggagggactgggaccagggccaggcccaggacacggccacctcccacccactccactccgccaagatcactcagagaagagcctgggccacgtggctgctgcaggagccctacagggcaagggtgaggacagcccaagaaaggggtgggcatctgcccagacaggtctgccagaggnnnnnnnnnnnnnnnntcccaggcaggcaagactcagccttggtgggtcctgaggacagaggcggccccagagcactggggagagaggtggagggacaccaggagagccaggagcgtgaacacggcggaactcatcacagaggcttaagtccagccccaagtcacgtgcagcaggaacaagcagccactctggggcaggagctggaggcgagacagcaaagagggtgcccgcggcctggggagagcggggctgccggccacgactgctggacagaggctgccacnnnnnnnnnnnnnnnnnnngccgttcgnnnnnnnnnnnnnnnnntctgcagacaggaagggaggcacaagcgggagcgcggcaagcgcctgcctcggccgtcagggaggactcccgggctcactggaaggaggtgccacgatttcagctttggtagcttttttcttcttttaaattttctaaagctcattaattgtctttaatgtttctcgtttttgatgacaataaaatatcttttttaagtcttgtaaaaaaaaaaaaaaaaaaaaagg

SEQ ID NO: 6221 - DNA, 2103 bp, Macaca Fascicularis
gataaacagactccatcttttcctcggtgaactcagctaggtgttaagaggcaggcaagaagcagtgggcaggaagtacgagtgaggttgtgctctttcctgagagtggggttcctcaagggtttggaaacgtccctcgagccaggtacagttttcccttagagatgagtgctcttggagaaatgaaagtggggagaaatcgtccctgaaaggtggagattggacaccccaacgaagggaaggatgatttaggagacaggagggtcatcatgggaacaaaatttcccatggagttggggatcagagtgggattaggaaaagaagattcccgatgcggggagagccctgtggttagtaataagtgtgagggaaggatggcatcaccagaaacaaaatttccattgagcaaggggcttgaaatgggatcagaaagacagaatatttctaagactctcatgcagaggggaagtttaggagtcgacagtgcctcagccacagagggaacaaaaccttctctgttgccaggaagaatggggttagaaaatgaaagtcttcttgcaagatatacccatggacggataatacagcctcctttgggcagggtgtgtggaagtccacaggctgtagggagcagcagagctcctttggctagtggctctgaaagggtagagcagttagtgggaaagcctgctttggatatggaaccaagacaggaaatggaaaaagagtctacctgtgttgtaatgaaacccggcacagagattaagcctcctgtggaggtggacattggactaacccaagccgaggagccagatgagactaagaatacagagccccaaatgggcttggtgatagaacctccccaatgccagtttgcccaacaacctgaagagagaaaggaggctggaaacattgaatcaggagtggaacctccagatcgcatcagacccatatactctgggaaattttttgatcgaacaccttgctggccaagtgcaggaaaagttattccagttggttacagagttgcaagctgcgtgactgaaaaacttcccaggctaattactccacctgcgtcaaaaaagtatttcaacttcagatatccacctgctggagtagaaagagtattttatggaagagcaaatgatccccaaattgcaccttatttgacacatggaattagatctaaaatttcaataccggcaaacacattgataaacccacagcctattaccacatttcaacagaaaattaaagataaaaaagaatctatatatcttagcaatcgacgagcaccattaggaaaatctcatgatcaagcaccaggattacctaaaggaatggacacaatcaatacgacatttgggacagcaatcatcagagaatactctgctaaagacgtggtgaatccaccaaaatcctatgaagaagtatttaaagaaggaaatgaaggacatgatttgtatgttgtttctcataatgattattatgcaggagaggcaaagaaccgaaagtataacccatcaagtttccataggtttaatgtgtatggagtaccaacaccacattttaatgatggacgagccatggcaaaatctttatattggctccatgaactacaaatgaaaagaggagctaagtttgtatccaagagagcagatgatttcaaagaaaagtttcaacataaacttggaagagttttagatcccattgcagaaacaatgaatgttcccccagactacacatttggagcttgtctccgtcctgaggagtatggagttggtgatctcatccataatagacttccgggtgaatatcttcgaggcaaggatagacagcgagccctgattgcagcagttcggcatcacttgaagaaagttaattaccaaaaatttgacactttgctggcagccttcaggcactatgacaaggccagtaatgggggagagctttttggtaatgcatgggcttacagatcccagcagtttgatgtagatcaggggtcagcaaactatagcctgtgggccaaatccggcccactgtttgtttgcataagtaaagttttactggaacacaaaaaaaaaaaaaaaaaaaaaaaaaaaa

SEQ ID NO: 6222 - DNA, 748 bp, Macaca Fascicularis
  misc_feature (1)...(748): n = A,T,C or G
gggcaacactnnnnccagctccnnnnnnnngccaggtggggtnggnnctgtgagccacagcaggagcgagccaggcctgggtttggacacctgctgctctgcctcgtccnnnnnnnnnnnnnnnnacgccccttctcccacccttggtgcaacatctgacctgaaccagcttccccagcccagcaacactgctcccctaatgtggannnnnnnnnnnnnnnnnnnnnnnnaccacagttcatatagagagtttgtctgggccaaggctgagagagctgcccaggacacaccaagttgccctgggagtgcttccttcagccttatcacaagcacgtttttaaagactgaaggggacagggagtgggctgatacgaagtcagcaggnnnnnnnnnnnnnnnnnnnngagaaccttagtgactggctatacagtgttggactacagggtaagagttatggtgtctagcgcatggctttttatgtctacttggcatcagtctaggacccacagagcaattggcttcaagaggtctttagctcaagtgggagtgggatgtgactgctgtttcattccagtgcctctgtgggccagataattaaagggggctcacattcctcagataaaaaaagttccttttcgcattaggagaaatatgtaatgtagatgatgggttcatggacgcagcaaaccaccatggcacgtgtatacctatgtaacaaannntgnnnnnnnnnnnnnnnnnncccaga

SEQ ID NO: 6223 - DNA, 812 bp, Macaca Fascicularis
  misc_feature (1)...(812): n = A,T,C or G
gtcctaagtcagcatgtaattntgggggaggatcataagaaaggaaatactttttaaaaaagagtctaaaaacatgtaacaaagcaaggataaaattatatatatatatatacacacatatatatatatgtggtgtgactgtaaaactgtactttccattaattattagcggagttaagagaatgatcacattgaagtactgtgtggactagaaatgtgccctgtcatcatgcaatgaaatgttatcgttttaacatagctcatttatgtagaatgaattctggcggtttaccccacgtcacagttaggacagtagatggtgagatcgcagatgcacgattatctagattccgtgttacattttcaatgtttatcactcagtggatttttattaatatgctgattaagttatttacttggccagtcattgtgctaaatagttgctcttttgtgtttcattgccgtgatgtttgagtgtaatctagcattttaatacagtgtttattttgcatgatctttaacaaacgtgttaagcaattttaaaaaggcaggatgttgttgacattatacactgaagtcttaacattttaatatttatagtgcttattagtttgcaaagttgtatacttaggaattatttcagagacaatgttttctttttcaggtgagtagttgccgcgtaatatcattggatacattctttatactgtttgtgaaattaatactagcatattaagtgtataaatagattaagaaaacaataaaaaattgcatgctattctgactcatgaatttttattcannnatgatga

SEQ ID NO: 6224 - DNA, 736 bp, Macaca Fascicularis
  misc_feature (1)...(736): n = A,T,C or G
atgacaaggttgattgattaaaatatacanttctgagccctgtgttannnnnnnnnnnnnnnnnnnnnnnnnnnnnnnnnnnnnnnnnnnnnnnnnnnnnnnnnnnnnnnnnngacaaaactctcaaacgcctggagtgnnnnnnnnnnnnnnnnnnnnnnnnnnntcaatataaatttatttacctttaatttgcatagtgctttctgattggtcagacaaggagtgnnnnnnnnnnnnnnnnnnnnnnnntgcctctgcccttggaggtagcaattcctgtggttattggtgctaaaataagattaaatattatgttaatttgttctgatatgatgtgaataaatgtgttgttnnnnnnnnnnnnnnnnnnnncatcttatcagatctattgtactgtctgttccttctcataattaattaattnnnnnnnnnnnnnnnnnnnnnnnnnnnnnaaactattgtgatattctgagaggtaaatttaannnnnnnnnnngaggggggatgaaaagggaaattgccaggttcctgtgactttgaaaggactgaggaagcagagagcatttggggacttcactgaaactgactgcatcttgcaattttctttttcgaattggcagaaatattgtatttccatcgattgaagaaaaacaagtgtctggtaattaattaaatgacttgttcatggaaaaaataaaaataaataatctgtcagttgtggaatgtaaactga

SEQ ID NO: 6225 - DNA, 122 bp, Macaca Fascicularis
tcaatcctagtcttagcagccatccccatacttcacaaatccaaacaacaaagtataatattcaggccaatcagccaattcctattctgactcgtaatcacaatcctactgacccttacctg

SEQ ID NO: 6226 - DNA, 621 bp, Macaca Fascicularis
acataatcacatgagtagttcatctctgtgtttttttttaagttgaactatcatgccagtttcattctataccagttaacacagcttaggttctccttcaaaattcattcattagataaccttgttacaacccagtcattaaacaggagttagattacaattatctgcatttaacaaatagataaatcagttcacataaaggttatatatgtcacccaggatgaaaagaatctgcatttgaatatgcccgtatgaatgtgggttctgtttttgcaacagagattaagtgaccattttttctaattttatggctatatattttttcttatgaattggccacatgggagaagcagtgccacaggaaaaatgagatggaaatcagaattagagaggaatacttaggagttactaatcagtgtaggaatttgtcataggaggaaatttaatggttaatatctcaaaatagaagaaaattctaaatcagtgagatataaattaaagagacccacttcaaagttgaaagaaatttctaggcataaattgagatattggaatagagggtgcatgacacatatatatgcgtaaattgaaggacagctcagattcatttttagaagaaag

SEQ ID NO: 6227 - DNA, 745 bp, Macaca Fascicularis
  misc_feature (1)...(745): n = A,T,C or G
catccttgcaaagtnnnnnnagtagcaacggattgcctccaagccctattcccagcccaacgacccgatttaccacccggagaagccagagccccatcaattgcattagaccaagtgttcttggaccattgaaaagaaaatgtgaaannnnnnnnnnnnnnnnnnnnnnnnnnnnnnnnnnnggcatcaccaacatgctttcttctgacgttgcacagctgtcagatcctggtgtgtgtgtatcttcggatacccttgatggaaacagcagcagtgccggatcttcttgtaactcaccagcgaaagtcagcactaccaccgactctcctgtgtcacctgcccaagcggcttctccatttattccactagatgaactttcgtctaagtgattcactcatcctgagactttctttttgcagtggagagagagaataatcaagttggggcaaacactgaactttgtcaattaatttgaggctatttcctattcgaccccttttcttttttgaaannnnnnnnnnnnnnnnnnnnnnnnnnnnnnnnnatgtcaggttcctgcggatacctttgaattcagtgtagtaatattttcagacgtttccccaataagtgtgttgaagcatacatctttacgctgctactatgtctaaatacatatgttatcccttgatttttttaaataattgagagctctatttatttatgggattattaagttctgatgaaaatataaatgttgactaat

SEQ ID NO: 6228 - DNA, 3190 bp, Macaca Fascicularis
attttctgagagcaaaaggaagaacttaagcgggcggcacttggagtgtaaattgcgttgtagtatttaaaggcagaatggatcctgggcagccgagctgaaacactcttgaagatatactcagaagtaatgttttaccagctatctgggcatcctttagctcagtcaagttgatgcataaaattaaccatcacaagttgcttcccccttctttactatgaaaagtcaacttttgagccttttcttaaatgccatatctcctgggaggctttttctaactcacaggcagagatagatattctgaagccttaaatttgtaccttggtcacacaacaaaccagcaggacttcctgtgaaatcatgacccccatgtgctctttcagcccccatcaattcgtacctctaagcacctgagagccaaagtaaaccacaggaaaccacagacaagatctgtctctgtcacccaggatggagtgcaatggtgtcatcttggctcactgcaacatctgcctccctgggctcaagccatcctctcatcttggcctgcctagtagcttgaactcctgagctcaagaaatccacttgccttggcctcccaaggttctgggattacaggcatcaaccactgtgcctggacttgaagacatacaaatttattaagtgtaaattttatgtgacataggagccttaataaagaaataaagacctaaagaaacagactcaaactaaacatcatcctttcctggctctcaatcctgctggtccctgaactaaaacacacattatcaactctacttgttcttagtcctttggagtcagactgggactacaccattgactcttccggaactccagcttactgactacagatcttggaacttttcagctttcacaaccatgtaagccaattcctttctaataaataagcctctctctatatatacatactactggttctgtttctctggagaattccaactaacgaggtgagaaatggcttctataacattaaatgaaaagctccggaaaatactggtcttagagtaaacattgtttcttatgaaatgtttcctgtgatttaaccccatatttactgtctaaatttatctgtctaaaataattttcaggattctaatttcactaaatgtttacacaggtaccctatcattcactttcaacaaagctattctatatactaaattgccgctgtgttctttttggaaacctaacatttagaaaaatccaaaagatgatctatctgttacttaaacctgaaacacttaaatctatctattacttaaatttatctattacttaaagctgaaatgcttactttttagcaaacatttactttgttacctatttctgagagtgcaaaagcttcctttgaaaatgagacataaaatcaagaaatgcaactaaagctttaggactggaaatttcttagagattatcttgttcaatatacttttttttcatacaagtaaagtgagggagaatatgatgtcagtaagccataggggacatatgggagaaaactttttactttacatttttaagttttaacaccttgatcagcaattatttttagctggagcttagtttaaagtcatttatataccatacatttttaatgttgaaatcttattgcttatggttctaacttcaaccaaaaaatgcctcagacgcaatttgccagtaaatattttattaaaagaatgtatccttcatagagaacagattatcatgaacacaatgtagtcattgtttttaagacagtttgttactacaaacctttgaaaaaatagtaatggtggttgataaaaatattgacatagccatattaacacatttcatcagatatccctgtgaggtcagtactttcattaatctattttcattaacatatgagtaaactgtggtgtctgaattcagttattctggctcacaaaatggtcttatcaactactatattcttctctagagcaaacatattatcaacactgaaactattgtttaactcgttggaatatacacttaaaccattttcatacatatttgctggaaacttatatgaactaaatactatttcaccacttttcttgttttggttatgaaataaaacaatgaaaaatcattgggtgtaacttagtgagcaagtggaaaatcatgtactttggtccttctcttaatcagtgtgtaagtaataaaacttgctatttaatatgaaggtgatgatctttatccactgtcgaaggacatgtatgtggggctacttttgctgtaaataaaggattacataagctacacttattattcttaggaaaaagttactcttcatggcattcttttactgtgaacctcgaatggtgtgcttgagccattggaagcaggctgaaacaattggaaaacactgaattagtgggaggtaagggcggtatctgcaacagctgaagtaaaatgaacttttctgcagagtaaagcagcttagttacaaccctcaaagctcaaacgtcaatccattcccaagcaggacaagtgtgggtgatatatggaaaggctattttaaaatccgcttgagcttgccaatctggagatttgcccaggaaagagagcctcagaaaaatcactatgcaaacaagcaaattttatcaaatttatgcagaacttgagagtcacagaaactaattggacagaatcccatctaagatttcatcattaataattactatgacagatagttattttaactgtcttttctctcatgtctgtttcaatgacttaataagtatgtgtatttgttttgtgcaatattatcatggaaaaaatactttcccaacatgtccttataaagctaattctgttcttttggaccttgctgaatcttacatcatttttcaaatatggctatgctgtcaaatagaagtggtagggacatttttttctaaagtcagagcatttcattttgaatgctcaagaaaatcacaaaagccaagtgttactttcttttaaaataaaggtttgtttaacatcttgcgttatgcaaaatatttaagtgacattaaataattgtgaatactttctgtaatatcaacagaatatttttgtccgcaaagtgatgtcaatatattgagtgaaacactctgtattaaacataatattaatgcttattgaaaaaaaaaaaaaaaaa

SEQ ID NO: 6229 - DNA, 414 bp, Macaca Fascicularis
  misc_feature (1)...(414): n = A,T,C or G
caannnnnnnnnnnnnnnnnnnnnnnnnnnnnnnnnnnnnnnnnnnnnnnnnnnnnaaaaggaggacaaatatgaagaagnnnnnnnnnnnnnnnnnnnnnnnnnnnnnnnnnnnnnnnnnnnnnnnnnnnnnnnnnnnnnnnnnnnnnnnnnnnnngaaaagacaattgatgacctggaagatgagttatacgctcagaagctcaagtacaaagctatcagcgaggaactggaccacgctctcaacgacatgacctctctctgagaggcagccaggtcgctgccctctgtccttctcacgtggtgcctcctatgcccctgtgggcttctaggagctccggtggctaggagctccgggggcctgcctcctggtttaaacgtcagagccttcttctgatgtgtctgtgactctac

SEQ ID NO: 6230 - DNA, 1024 bp, Macaca Fascicularis
ttttactggtggtgttcagacggtaactttaattccaggagatggtattggcccagaaatttcagctgcagttatgaagatttttgatgctgccaaagcacctattcagtgggaggagcggaacgtcactgccattcaaggacccggaggaaagtggatgatcccttcagaggctaaagagtccatggataagaacaagatgggcttgaaaggccctttgaagaccccaatagcagccggtcacccatctatgaatttactgctgcgcaaaacatttgacctttatgcaaatgtccgaccatgtgtctcaatcgaaggttacaaaaccccttacacagatgtaaatattgtcaccatccgagagaacacagaaggagaatacagtggaattgagcatgtgatcgtcgatggggttgtgcagagtatcaaactcatcaccgagggggggagcaagcgcattgctgagtttgcctttgagtatgcccggaataaccaccggagcaacgtcacggcggtgcacaaagccaacatcatgcggatgtcagatgggctttttctacaaaaatgcagggaagttgcagaaaactgtaaagatattaaatttaatgagatgtaccttgatacagtatgcttgaatatggtacaagatccttcccaatttgatgttcttgttatgccaaatttgtatggagacatccttagtgacctgtgtgcaggattgatcggaggtcttggcgtgacaccaagtggcaacattggagccaatggggttgcaatttttgagtcggttcatgggacagctccagacattgcaggcaaggacatggcgaatcccacagccctgctgctcagtgccgtgatgatgttgcgccacatgggactttttgaccatgctgcaagaattgaggctgcatgttttgctacaattaaggatggaaagagcttgacaaaagatttgggaggcaatgcaaaatgctcagacttcacagaggaaatctgtcgccgagtgaaagatttagattaa

SEQ ID NO: 6231 - DNA, 670 bp, Macaca Fascicularis
  misc_feature (1)...(670): n = A,T,C or G
gcattgaaaatgcacnnnaaaaaatattaaagnnnnnnnnnnnnnnnnnnnnnnnnnnnnnnnaggggaaagttaagcatgtgctagtgtctnnnnnnnnnnnnnnnnnnnnnnnnttgaaacaatatacactatattacgtataaatgtatacacacttcctatatgtatccacatatatatagtgtatatattatacacgtataggtgtgtatatgtgcatatatacacacatgcacataacaaaatcagatgctcatcacaaatccagnnnntcactacaaaaccagatgccacacaaacaacagcagaggaaacaaggttggactcttgcaacagatcacaaaaaataaaaacagctactagcagtgactttggtcatttctgtatgttcataaagaatggattgtaacaaggaaaaaaaggaacagtgttagtgaaagaggaaaaatnnnnnnnnnnnnnnnnnnnnnnnnnnnnnnnnnnnnnnnnnnntaccatttcatcagttacttcttttagtcatgttgatttgatttcagtttctggctattaaaaacacttttaaactcaagtggcccacaacaaactgaacaaaactaatacagtgaaagcccttttcagtgaacgacgtcagaaacctcagaacccttggcctgactcagaacta

SEQ ID NO: 6232 - DNA, 703 bp, Macaca Fascicularis
aaaacttttcagtttctgtacattatataaaaaccagattgctatgcataatatgcagatctcaaatgtcacataaacacatagaatgcaacagattagttttacaagttttatttcctgggacatcagtcaaatttagacgtttatgattaagtcatactaagccagggaagtacagattttccaatcttgtgatgagaaagttcctttgagaatggataaatgtagtgaaatgttagaaatgttaagagtataagcaatatagctttcttaggtttctttttttttttttttctggagacagactctgtctggatctgtcaccctggctggagtgcagtagtgcaatcctggcttactgcaacctccgccgcctggggttcaagtgattctcccacctcattctcccaagtagccgagattacaggtgcgtgttaccacactcgctactttttggatttttagtagagacggggattgactatgttggccatgctggtcttgaactcttgacctcagatgatccacctgcctcagcctctcaaagtgctggaattacaggcgtgagccaccgcgccctgcccagtttctaccaatgattatatacttgatatataaacatccttaaatataaaatgttctgtatgattgcacataaaaaaatttgttcagcaatgacgatttatcaacatattaatgtaat

SEQ ID NO: 6233 - DNA, 1953 bp, Macaca Fascicularis
cacacttgcctagtgtctggctatgataattttcaggcgttttatgaaacatttaacaagtctgattacccttctaggagacagtcctagaatagaggtcatatgaacccagatcttagtcctcctgcctcagtgactccctcactccatacacaccttgaactcaggccacaagagagcacttgaccatctggctctggttccagtgactccaggacttatatgcccatacgccagaagatcaagatctgagtgggaactgtggaaagcatgtcacatgagcccctgccgcccttgaaactctgccttcctcctccttaaggaacagtacctgaaggtactggcggtggccctggctggccatcttgcttcctggtcatggtgatggccactgtgctggtcctgtccaagatgacctgtacatcattccatgaatgacacatgacaacagattcccagtgtaataagcacatttaacccagcacatgtcagccccactgttctgttggaagtgttctatttcactgatcttgcctctcctaaaacaagggacaacaactggcactctgctgcagaggcccttgaagcctgttggaattttagtgaaatgagatgcctgacttaagccgtgttgcctggcttctcaagtaccagcagacctattactagcaaggaagaaagcaagaatggttattgcatcctagaggcatttagtggaggagaaaactgccctggtaccaccgtagccctaagtgctgcccagagttctgagctctcaatgagcacttggaacacacctgcctgcagcctccctaccctttcttatgacttgtcctacttgtcaagcccaggttgtcccacttctccacatgagtctttcagtgacatctgtgtgaccatctccaccccctgggtaaatgctctgtgctgggagtccatagaacacagtctgacttagagattctctggcatgactttcttccccattgtgtgcgctgatggccttagatgtaggcctcttgtttggggcccttcctggccagaccctgaggcagcctccaaggagggtggtaagaatggttccctagagcccagttacggagtctgcctcctttccagatcatgctgtaatggactgagatctcaactcggcccacactctttcctggcctacacagccgtctcagaagggcaatgtttctcgctgttaaagcgggtggtccctcttgctaacctagctgagcaatcaggtactggttagctgtaaggcctgggaagtggggggtgtacccattggccttggtgatgaagacagccaggtctccaagtcccagccgggactcctgctgggccataaaggcttcaatatgctggcttctcccccactgaggacctcaggccccagttcattatcaggattttagaaataccaagagcatcaaaagaacagaaaagaggcccttaagggacccctaataagatagaatttgcatgtcctcattggactagaacccgaactgctttaaaaagcaaaaggcccttggtacaatctgatggatgtgagtgtacagagaagagaaaacacctctgagaggagtgagaggcctcagtaaggaagttgcaatctggagccacctggacggctcagagctctataagcaggagaagccaagggcataacacacagtagtgcaggtgtcagccaggaatcaaggctatgacagctggagtccggggccaagaactgcggggggggaaggagaaatgcttgttcccccaactcctatctcctgccatgggtgtggacctctactagctatgacattcctaccatctctctgcctcttccctctctcttctctctgccccaccctggggcagacacagtgacttccctgatgctagggggaggggatggtgtgggttagtgtaaaaaaaaaaaaaaaaaaaaag

SEQ ID NO: 6234 - DNA, 632 bp, Macaca Fascicularis
  misc_feature (1)...(632): n = A,T,C or G
tatagaaatctattggaagaaattacatagggtatgtggtatgatgttgaattaacgttattgtcgctaccgttataatctggtccattgaaattggaaaaaaatttagaaaaataagatgaatgagagagggaagacatggtgaaaaacaaatgccnnnnnnnnnnnnnnnnnnnnnnnngtaaaggagaatgaaacaaaaggcattcactctgtcctcttccctggagcctggttagtgctctggactcctggggaagccagcaggtgagagtgttggagccagcggggtgagtcctgactgggagtgtgggaatccatgaagaagcaaaagagacatcagtgggaagaaatcagtttaaatactcaaagttatcagggcacgtgtcagggactacgcatcccccgacactcactgagcgtcttcgtgtgtcctctccagggatccagatggagctcgttacatcacgtgaccctccctcctgaggacatgggtctccttattcctcagctgggggcatcacttgacagatgagcatcaggcagccccaggggatccaggaggagatattgagtgggatggagagtaggatgaacacgacnnnnnngtttaaggaaatctgagcagaagt

SEQ ID NO: 6235 - DNA, 738 bp, Macaca Fascicularis
  misc_feature (1)...(738): n = A,T,C or G
gaggcccctaggtgcccagagccnnnnnnnnnnnnncagaaccaaatcnnnnncctttcttggggcttggggctcgggccataggggctcctgggtgtcatgaagtgcacaggaaccaaatgactgagccctggagagccccatggtcagtgggtggnnnnnnnnnnnnnnnnnnnnnnnnnnnnnntcccagatcgagcttcaggctaagaccctgtgtcctccaccatgcactcacccctagccctggttagctgacagtcagctgtggggaacacagctacaaccctaccctggcagggacctgagagcatcttctcaggaggggcagcgcatgtgtgcatgtgctgtgcgagtgagcacacccgtgttctcactcagatatacacgtgcacacacacgcactctcccagctcagtggcctggaggtctgactgaggccctggggaaaggtgagttctttcatctccctcctccaggtcgtcatgcctggagtcaggtgtcannnnnnnnnnnnnnnnngccccctttttgtacctgtagctcctataaagggcccacacctggtggatacctggttgagtgtgtggtctctgccccagcctgtccttgtcacgatcannnnnnnnnnnnnnntaacgacgnnnnnnnnnnnnnnnnnnnnnnnnnnnnnnnnnnnnnnnnnnnnnnnnnntgtggcttcatatttcaactaaaaatatannnnnngagaaagaa

SEQ ID NO: 6236 - DNA, 652 bp, Macaca Fascicularis
  misc_feature (1)...(652): n = A,T,C or G
tagtaactcagnnnagcgttccatactaannncaagtgagcaaaacaaattatctaaacagtttggttcttaggagactgcctaaaagatcaagaaaattttctcatcttttctttttacttagaaacattgcaagaaaacttggatagtcttcaccagacctgccatgattttataagatttaggcctcagtgannnnnnnnnnnnnnnnnnnnnnnnnnnnnnnaaactaagcatccactcattccatcttcccaaagtcactcactgataaaggtagcatccttaagctcatttttgaaaggtggaggaggatctccccctgcccgaaggaatttttttatcagaataccttgaaaggggggtatatacatttggaaaacttaatttcttggctgtgtttgataacagttcctatgcatggtttttaatgtgatggaaatttgtttctttctttggaatacctctctccacccccaactttattcttcctctttaatgaatatttttattggagttcaaactccatgccttatgcgctcattcagttttctttttgccctttgtttactctgtctgtatgtatgtcaaatgctggcaaaactgaactgtcaagaaaatgcttgaaagttgatttgtcatagcgcaaact

SEQ ID NO: 6237 - DNA, 714 bp, Macaca Fascicularis
  misc_feature (1)...(714): n = A,T,C or G
tnnnnnnnattacaccagtatttnnnaactttttttttngnnntnnnnnnnnnnnnnnnnnnnnnnnnnnnnnnnnnnnnnnnnnnnnnnnnnnnnnnnnnnnnnnnnnnnnnnnnnnnnnnnnnnnnnnnnnnnnnnnnnnnnnnnnnnnnnnnnnnnnnnnnnnnnnnnnnnnnnnnnnnnnnnnnnnnnnnnnnnnnnnnnnnnnnnnnnnnnnnnnnnnnnnnnnnnnnnnnnnnnnnnnnnnnnnnnnnnnnnnnnnnnnnnncctgccacagcctcccagagtgctgggatcacaggcgtgagccacctgctcggtctaaaaaacaattttcttgaagnnnnnnnnnnnnnnnnnnnnnnnnnnnnnnnnnnnttccagagaaataggaaatatatgtgtgtggtatgagaagcccatattctgttcttgtcgcctgaatctaggcttcctctctggatgtgagcgcaggaatgaacggcggctgttttccgcccaaaggggtgtggagaccttttggaaacaggccttctcctttnnnnnnnnnnnnnnnnnnnnnnnnnnnnnnnnnnnnnnnnnnnnnnnnnnnnnnnnnnnnnnnnnnnnnngagtccagcttagctttccaaaattctgtgtggaacctactgaagatgtttttatatatttgaaaataatggcatgtatttctcatgctatagtaaaaaaaa

SEQ ID NO: 6238 - DNA, 693 bp, Macaca Fascicularis
  misc_feature (1)...(693): n = A,T,C or G
aactgcaatgtccccaagacatgcctgtaggtacaccagtccatactgataaatgactgaataaacaggagagaagaaacaaatcttcaagaagnnnnnnnnnnnnnnnnnntgctctctcnnnnnnnnnnnnnnnnnacctcctcaacccacagagtatggaaagggaaaaacaggaacttgacagtggagaaacctnnnnnnnnnnnnnnnnnccaggtggccaaggtgagcactgcctgggataggtgatgtggtggttacaaccacccnnnnnnntgtgatgagaaaggtgcttgagaaacatcagaccaactccaatggaggnnnnnnnnnnnnnnnnnnnnnnnnnnnnnnnnnngaactgtcagggtcatgagaaacaagggaagtctgaggaactgtcacaggcgagagaccgcaaaggagannnnnnnnnnnnnnntagtgtgtgcnnnnnnnnnnnnnnnnnnnnnaaagcagacattagggaaaaactgnnnnnnnnnaaataaaggctggatttnncttaatggtacctaccaacgtnnnnnnnnnnnnnnnnnnnnnnnnnnnnnnnnnnnnnnnnnnnnnnnnaatgggggaaactaggtgaggggcacatagaagctctctgtactctctctgccatttttctgtaaatctcaaattagaccaaaataaaagtttatt

SEQ ID NO: 6239 - DNA, 755 bp, Macaca Fascicularis
  misc_feature (1)...(755): n = A,T,C or G
acatgccacttgtactgacccgatcacctanncacacaggcatttcntnnngggctactctgtgccagagcttggggctccaatgcccgagcccagggaggccgaagctaacagggaaggcaggcggggctctcctggcttcccctgtccccagcgattccctctcccaggccccgtgacctccagctttcccgggtatttgttcccaagagcatcacgcctctgaggccagcctggcctcctgcctctactgggaaggctgcttcagggttgggaagttgtccttattcctgtgggagcctcgcaacccatgccaagtctaggtcctggtggggcagctcctgtctcgagggccctgcagaccctgcccttatttggggcaggagtagctgagctcagaaggcagcaaggcccgagcagctgagcaaggcccaagcggctggccaagctgaggtgcccagaagaaagaggtgaccccagggcacaggagctacctctgtggacaggactaatcgaatcctgggggtctggctggctgagggcagttcgtagccaccctgaggagtccgaggtcctgagcactgccaggagggacaaaggagcctgtgaacccagggcaagcatggtcccacatccctgggcctgctgctgagcacctggccctcagtgcaccgcctccaccctgggattcaggaaaaggcctggggtgacccagcacccctgcagcttgtagccagctcgggtgagcggcacgt

SEQ ID NO: 6240 - DNA, 749 bp, Macaca Fascicularis
  misc_feature (1)...(749): n = A,T,C or G
tgatgtattaagttactcatggggtggctaaagaggtttatatgtagattatcacttcatannnnnttttgttctttgaaaatgtgcatggaagccatattataccttattagagaatgaaaacatgaaaaatcttgatcatcctatccctgaactcctgggataacttagagaacacatagagattgtatccacacattcaacttgcttttagtggagatacagatgttacataagataaataatcacagagaataattttttcccttttttgattgtttgattgtcagatccatcaaacatagggcaaaacttcaattatctttgtttatgagattcttggataattacatgaatgcatcccttactgtgaataatcaacagattgaaatatttgcaatgaatgacatgaattttagacttctaaatcctaaaagttgcatgcttttaaggtagtcatttttnnnnnnnnnnnnnnnngttcaaaaaaaaaagtaccacactattttttaaagaacatgaatgtaaattaaactgcttttgaagacttactcctgtcaccatgagtatcaggttattattttttgttatcatggcagttgtagttgtaaatattttcttgtgtgttcctcacggatcataggattgaatgaatactccacnnnggatgtaaccttgaactcaatttgagggagtaaaaaactagcaacaagacccttcagaacgaatgtatcttcttttaaattttg

SEQ ID NO: 6241 - DNA, 722 bp, Macaca Fascicularis
tgaagtccagtgaggcaaactctccagcccatgaggagttcaagacgatgctgctgattgctcattactatgccacgcgctctgcggcccagagtgtcaaacagctggaaactgtggctgccagactttctgtttcactcttgcgtcacacccagctactacctgtagacaaagccttctatgaagcaggcattgctgccaaggcagttggctgggagaacatggcattcatcttcctcaatcgctttttggacctgactgacgcaatcgaggagggtactctggatggccttgaccactctgattttcaggatacagacattccctttgaggtgccactcccagccaagcagcatgtaccggaggctgagagagaagaggttcgagactgggtgcttacagtctccatggaccagcggctggagcaggttctgcctcgggacgagcgtggtgcctacgaggcctccctagtggcagcaagcactggggttcaagccctgccctgccttattacaggataccccattctgaggaacaaaattgaatttaagcggccagggaaggctgctaacaaggacaactggaataaattccttatggccatcaagacctctcacagcccagtgtgccaggacgtgctgaaattcatcagtcagtggtgtggagggctccccagcaccagcttttcctttcagtagtcggtagagctgaggaagagttag

SEQ ID NO: 6242 - DNA, 1683 bp, Macaca Fascicularis
taaaacttctctttggaattcatacacattccatttgagagtcagtctcattgccgaacctgatgtcagtgtggaggtgaatctgttcgtcccacagggagtcactctaggtcatggcagagtgggcaggggtatgtcatcctcttcctgggaatacagcaaataactgaggacagcagtgtgttataccaatgttccctgtcagtcacaaacgtgaacgtatgtcccttctgtactccacatgcgtgtcttttgagaagaaattgcaaaaattccactcaatgatagcatcaggcccaaagtgcaggcgctcatgggggcctctacatctactctcgatgtgtcttctctcagtctagtaacagatggacgcccctcttccctgacacgctgtggagctgggaacgatcactccgttgagaacagggagaatgaattcaggccgacccagtcgctggtccagagcgcgacgggcatccctgtgggtggatgtagggagggttccccacctcaactgtcactaccagttaaacttcagtaaattacattgcagctacacacagcttccaaatcgaagactctgcgctcacaggcacaagagtgaggttcgaggagttggcctgtgaaggtacttgatcactgcatggtgagaacccatggatgaaagctttcctttctttgccccattttttgagacatttcgccaggttcctcagaaagggccccattgatcttgcactgagtcccattgggtggtcagtttggtcacacatcctaccctccctgtttcaccccctgcacccgcacccctgctccctggggtcactttcccagttaaacaatttgcacacaagcccttgcccaggccctgctctgagaggggcaatttggagaacccaagccagaaccaaagcaagtgacaaggcaaagcccgcagtgaacagggcaagaactataatcctacaggatagcaacccatggtggggaaccatacacaacaagcaactgccgtggaaaagtggtggtgtgactcttgtttcttttgtttgtttgggttttggttgtggctaacgacaaggttcacagtcctcagagcatcctaagagttaggataatgccatggtttctagtatgtaacagtggattttcactattcagaactgcttaatttgcccggcaagtaattccctccagttttccagagagtattaatacgttcaccaattgctggttctttaaagttaatgattctttacactgtgttatctacatttgtctggggcagctaaattactcccaggaactttgcacacacagctgagcacaagcttaagtggcattattaggcggcgtctagaagctgaacttgttcagattccatgaaccagcagggagacagcccagcgtgggactcatacctgcatcttctcagaaagaggtgtgtatacacagaggagctgctgcttttacaaaacagttgatttagacctaacctttgtaggtctagcgtagagatggacaagtcctaggactaaaacaaaagtacaaatctaggaaataacaaagtattttctaagtcaggagtggccagcctgtagagtgattgaagacttctgttgtttcatttattgcctttgaagcatgtgaaaataaaactgttgtcacgaaaaaaaaaaaaaaaaa

SEQ ID NO: 6243 - DNA, 2512 bp, Macaca Fascicularis
  misc_feature (1)...(2512): n = A,T,C or G
aattactgaagcaatgtgagtgtaatgaagatacttgcctgagctacgcctcagggttgaaaggtggagagtcataagtcacagtggtttcattcgctattttagtgagattataagatgttgataaaatatctgttgattggaagaggcctgatgcaggatttctctttaaaggatgaaacaataaaagcagctgacactcactgagcgcttactgcgtacaaagctctgttctgtgtgcccatttacttttttccagccaccctatgcagcccaggtagtactcatatttccttatttcactgctaaggaaattgaggtataaaaagttgaaggtgggaagatacagagtcggatttagatccggggagtctgattagagtctgagattctgtgacatccacattcagggagaaactactatgttgactcataagtggatgttattaagattgaagttcgctgtcctcattaagattgatgtgcttacatcccagagataatggaattgatgcagccatccaatgtagatacaagtttcgtttatagagaaagattggcataaagcaatgtgtagattcccaaataattctcaacggccagtctagtctaagccttccccaaatatcttttataatgaatataagagtaaacagatctttagaccgggcccggtggccctctcctgtaatcccagcagcgttaacatatccagtaaggtttgctcctttttttctgaactcctgccctgtgggagttgcaatatagttgtagtggcatgctttattgtacaaacgtaagttttacttttccattctggactctccagtcaactgacagttgggttacttctttccaaatagtacctggtagtgccccaaagccagaggtggataccagcctttcttgagtgccacctgacacattggcatgggaaaagattctaaactacagctaattaactagagaagagatgtccttcttagacttggaattaacagctggttaccaggaaaagaataacagtagtcattgttaacctgataatcatatttccacaaaaactacactgtataaaaaagaggcctnnnnnnnnnnnnnnnnnnnnnnnnnnnnnnnnnnnnnnnnnnnnnnnnnnnnnnnnnnnnnnnnnnnnnnnnnnnnnnnnnnnnnnnnnnnnnnnnnnnnnnnnnnnnnnnnnnnnnnnnnnnnnnnnnnnnnnggacatgttaacgtccggctaattacannnnnnnnnnnnnnnnnnnnnnnnnnnnnnnnnnnnnnnnnnnnnnnnnnnnnnnnnnnnnnnnnnnnnnnnnnnnnnnnnnnnnnnnnnnnnnnnnnnnnnnnnnnnnnnnnnnnnnnnnnnnnnnnnnnnnnnnnnnnnnaaaaaaaagaaatagagaaaaagttttgcttccctcacttttggtcaatctgttcttagggtcagaattaatgttccttcctgtaggacatagcaatgcaaaaaaagaggaagcacaagctcaaaaaacaaatctaaagtttggagaaatagatttcatttttaaacagtctcaacatggaacttgcatgggacatccatggcaggactgacaggttccatgaccaaaatggtacagcccttcctaccttctcatttattctgctttgtaacttaacactattatgccaatgataatttaactagaaaaagttcctgagagaataacaaatctgtgattttattatgtcttttaattgatcatgttttgcagctttcagattcagatgtcaataatttgtttctattatcagagtatataaatcccatgcaaacatatctcagcataactgattttgtttccaaatcattaaacaggataaaatgttatttgttgtaagctgttgacatttgtaagggaattttgtttcaccgaatatttttaaagatgccgccagagcattaaccattatttcatttttacgtaagttgaagaaaaatgaaacttagtatgttctcagtttgcaatctacaaaggggaattttattgcttaaattaaggtttcattttctggcctgcgcaagagacttctatatctaaaatatggacatacgtttttcatattttagagttcgttgtatggaaaaataccatcaaagttgaccaaaaaattttgaaaatccttaccagttgtttgtcatatgtgaaagtcttatgattactttaattttatttattttatcttgttctcttgctggttattggcagactcagactcagtctttctgttttcacaaagaactcatgaagaggacgatagggaaacccacgtatgcctttgaggctagggactatgttgtaagttcacctgtgatggccaggtcatacagtcatggcacagccactaaccccattcacagcaccaagactggggacccagaggcactctgttatgcttccacactacaaaatgaaattcttaattgagagaactggacaccaggaaaaaaaaaaaaaaaaaa

SEQ ID NO: 6244 - DNA, 750 bp, Macaca Fascicularis
  misc_feature (1)...(750): n = A,T,C or G
agtaggccaaagtgcagcccagaagcancnantccntnnnctgacgcacactgggtgggcctcctgttactggagttgaaatgggagcatgctggagtcagcgttctcttgctcctggtgagaaggacatcccattgaccctggccactgggtccaatgttccatccttccttctgtcccagcctatccctctccccaccaggcccaccccacaacctctcctcaagggcagttgctcccacagctggagggcttgcacagaccagcagtcagtcacggaaatcattcttcctgctggagtgggccttaactgcctgcaaatgtccagcactactgcgtaggatgccagagccaccgaaggaaaacacagccacgtttaatataataataataaaaggaaaaagctcagcctgcagaactctggttttgacccaccgtcggccagatgcacatcttcagggcctgttcagcaccttcggaaaagcagggctcgtaatagactccagcacattccatcagagtgaggaaaactgcggtgagtcccagagaatctagggtgcagggcagggagcaggagtcatagggagtgataacctgaactgtgtatagtcagctgggagggtcttattaagtgaaatgagagccagttagttgatcttgtcacagatgtaaccatgataacaccccatagatatgtgacacgtgtgtcctgcccctgctttccccatccaacatnnncttctgtccaca

SEQ ID NO: 6245 - DNA, 796 bp, Macaca Fascicularis
  misc_feature (1)...(796): n = A,T,C or G
aatgctgaatttgtgnnnnnnnnnnnnnnnnnnnnnnnncggttatggcttcaacaacgaaacatttattcnncaactgctgaaagattggacaacatggaacaagcattgacatggcttggagatcagctcactgtactcagtactcggatgacattacaatgtgattggaactccactcaattttgtgtaacgcctgtgctttttaacatctctcaaaattggacagtaatccgaaaattattagtaggccataaaaatattagtttggacatccaagagctcactcagaacatttccgaagcatttcgacaacaattacatgtgttgtccggaactgtaacccttcaggagctgggtcagcgccttgctgcctttaacccatggacccagatgaagacatggatttctacaatctctggaagtatattgctttgggcacttggattgggtctacttcttttggtgattcgatgctccctccgtcgcctccaaaaacaaaagaaaacacaagaacaaatatgggctacctttttaggattgaggcaaaacaaaaaaaaaagggggggaaatgcaggggcctttgaaaacagtatgctgagaatagatagggctcaaggacagtatctccaattgaacttttaatgaactcccgtaggcgccaagaaggcgggcagataaggaagagcatagaaacaaagaactgagtagaaggttacatctgggaaaagaaagtttgttttgcattgcattctttctgctgacgtggggtttatggagtataaataaagtgagg

SEQ ID NO: 6246 - DNA, 322 bp, Macaca Fascicularis
gcagcatctttagtgacccctgctgatgttatcaagacgagattacaggtggctgcccgggctggccaaaccacttacagtggagtgatagactgctttaaaaagatactgcgtgaagaaggcccaaaagctctgtggaaaggagctggtggtatggaaataatttgttcttaactaactctttggtatcaggtaaattttttaaaaatctaattatatctgtgatttctccatttttttaaagctcgtgtgtttcggtcctcaccccagtttggcgtaactttgctgacttacgaattgctacaacgatggttctacattg

SEQ ID NO: 6247 - DNA, 1618 bp, Macaca Fascicularis
cctattaatcgtgtaaagaaatgaaaatcaaatctgactggaccgttgctccattttctcaaaacaggaaagtttctatagaaaatgtcctttcccgttactgaaggttgcttagtttatagggtcctgtggttttagtatagatgtgtttccttggactagtttctatctttcagagtttatgctgcagtttccccactcccttcacagatgggtggccctacattgacccagcactaaactcttaggtaaagtcttcactccatgcacagaagaagggcatagtttgagtgtcatttttaagaccaagtcagctctctacatacttaaaatatctacaagcttttacctgaaatgtgcaaacaaaaggttattcaaataacctaagactgttacagttacataagtccgtgatttcacaccaacctaattaattgcaaaaactgcaattacttttgcaccaacctggatatttgccaaagatgacatgcattctcttgagaaattgtccatgggcttaactctgcgtttcactttcctagtaaagcatttccttgactattcctgtgctccttcactatcctttccttctctctcttgctttttctagccttctgcctacgtttgccattcctgcccacccccattttcttactcttcccacctccctacttatagactacaatcctctttccttctggatgtctggttctcctttccccattttcaccccaaagtcgttcatcgatctagttcatttactgggtgttgattgagagcttactccatgcttatgacgtgcatgctgttgaagaaatgggttttcagaggcagcccttgggtgagacaaataagtacacagccaattgcaaggcataagtgctagtgcagctgaaattctgctgcagagggcggcggaggcttagcaacccacggaggatgggaagatgaaacctgtcctccccaaagcccctcctggggctgctcttccacccgcctccatctgccctcttctccatggcatgcaatacagacctctgttttggtgtaatacttattagacaatattgtactgagtccagccagttctctttaataattgtataccttgcagatagaacacatccaataaactgtgacttccctggagttaattctctctgcagtaaagtgagactggtgacttagaattgttgtcaggagttttctagctgaaaaaaaaatatcgtcacctaaaacaagtacatatttgtattgaaaattacatagatgttttctctttagtttgtgattatagggacatagtttaaaagtgaatttcttcagtaagattaatttccaaggaaaaaagttattttgtttcttttttgctggttttgaatgcaactgtttgttacccgtgccaaaacagtggatgtgaatgaaatgtatagtcagagggaaatttcacgtcactgggtgaaagtaaatgaaatgtatagtcagagggaaatctcacatcactgggtggaatttcacccttctttaaaagtctccgctttctgccttaaaaaaaaaaaaaaaaaaaaaaaaaaaaaaaaaaaaaaaaaaaaaaaaaaaaaaaaaaaaaaaaaaaaaa

SEQ ID NO: 6248 - DNA, 749 bp, Macaca Fascicularis
  misc_feature (1)...(749): n = A,T,C or G
ccctcgagaggctggtggaagcacgccccgcnannnnngcctcacnnntactcagggacgctggtcctgccggtggagtggcccaggggcctgctggaggctcccaggacagcccccagggtgcccactcggggctcgaggtcttctcagggatgatcttgaaggtggaggaggagatatagggctagtcgggggtgctagcagagccnnnnnnnnnnnnnnnnnnnnnnnnnnnnnnnnnnnnnnnnnnnnnnnnnnnnnnnnnnnnnnnnnnnnnnnnnnnnnnnnnncgggacagctcgagtccaggagaccagaaggatgagaggacgtgggctgtgtacctgtggtgctgcgtccttgccattgcctgtggagtgtggtgacctgcagggaaagtctgcagagagccgacctgtggggcccagtggaccaggtctactcagggatgatgctattggaggctccaaccccgtgtggcagtggctgtgaagtctgcagccagcgccccagcaggcagctggaggcaggggaggtggggaagatgcacttcggggccccctgctcaccggagctctggaaagggtggcttggccaggccctaaaaaggtcccgactgtgatctggcgtgactcctgaaagcccctgtccccttcatgggcgtgnnnnnnnnnnnnnnngggctcctgtgtcctacctgattctggcccaggggaaccgcatcccatgagcctggaataatttctctc

SEQ ID NO: 6249 - DNA, 644 bp, Macaca Fascicularis
  misc_feature (1)...(644): n = A,T,C or G
agtgagcagagtgtggcgtctggaaacagnnnnnagttctgtgggaggactagaaacagctgcagggcgaaggccccctgaggaccaccactctagtgacagtgggattgggacctgggggatacaggggccccaggaggaagctgccgaggggcagctcagtgctctgcagagaaggggctcgggaagaagcaggatgggcttgatgggcaggagggatccccnnnnnnnnnnnnnnnnnnnnnnnnnnnnnnnnnnnnnnnnnnnnnnnctgcctgtgtgacgctgggcaagtctctccccctgtctgggccaaacaggagnnnnnnnnnnnnnnngctctaagatccattttagatcaatgtctaaaatagctctatcgctctgcggagtcccagcagaggctgtggaatgtttctgccaccctagggcccagagagcccaaccctgagtcccnnnnnnnnnnnnnnnnnnnnncccttggcctgagccccttccccattcctgcagctagggagagacctggcctcagccctggcagggctctctcttcaaggccatatccacctgtgccctagggcttgggagaccccatagggccaggactcttgggttagcctggccactggcttctctctttttct

SEQ ID NO: 6250 - DNA, 659 bp, Macaca Fascicularis
  misc_feature (1)...(659): n = A,T,C or G
gttcaagtgattcttctgcttcagcttcctgagtagctgnnnnnnnnnnnnnnnnnnnnnnnnnnnnnnnnnnnnnnnnnnnnnnnnnnnnnnnnnnnnnnnnnnnnnnnnnnnnnnnnnnnnnnnnnnnnnnnnnnnnnnnnnnnnnnnnnnnnnnnnnnnnnnnnnnnnnnnnnnnnnnnnnnnnttcagtaacatttacatttggccttccatttacatttggccttcctcgtgtgccctgtttgttagctgttcattaccagagggcaaaggtgcttagaacatgatttgcccaccctgcaagaccacatattgctggaagttgaaggcagcagagggcaccgtgggccacaaggcctggtagccgcaaatgttcagtggtggctggagctcatgatgcattctttggtaggacttcaaggggttccatgtagcacacactatttagaatgactggtccaggatgaaacaatctgagtggacatccatggatgagaaatgcggatatgggactgagaccagctcctaggaaaatgcctgggtgtgggggaaatctgggaatttctaacacaatggcttatacttcctttgcaggagaatctctacgggaagcaaaaggcaagaccccggtcattttaggtagaaacaacagcatg

SEQ ID NO: 6251 - DNA, 758 bp, Macaca Fascicularis
  misc_feature (1)...(758): n = A,T,C or G
tacaagtcacaaaagcaacgctcaatgatagtaaagaacagaaacactgaataggtagatggagcgagtggcgtcccgtcctgccggcagacgcagccctcgtcgccgtgccacaccggaccctgaaggacagatccggcatggagagggaactgcagggtcagggaggcaaacatctttgtgacttgtgacgctcattggaaaattgcccccagaagcgatgcctttttacagccccacccgtagcgcggcgtctgtcccctcatatccctgccagcgctatgtatttttattctttttcccctttgccaatgtgataggctgtcgtgttctaatttgcatttctttgattcattgcagggctgaatggcttcgtttgtttttggctcttggtttggtttgctttcctctaggccagcgggggcgagtgcgtgtttgcggatgtccttggtgttcttggcaggatcactgagnnnnnnnnnnnnnnnnacatgcagccatgaagtctttgttttttgtttattttttgagacagagtctggctctattgcctaggctagagtacagtggcgcaattgtggctgaccgcaccctcagcttcctgggctcaagcgatcctcctttctcagcctcccaagtagctgagactagaggtgcaccaccatgcctggctaattcctgannttctttctagacacggagtctcactatgttgttcaggctgggtctcaagctccctggctnnngcagtcctcctg

SEQ ID NO: 6252 - DNA, 255 bp, Macaca Fascicularis
tgcaatcctgggcaacagaccgatgtactctgtctccaaaaaaaaaaaaaaaaaaaaagatgaggaaattgtatccaattcaaaaacgcagtccctcgggacctgctagtttaaaccccggaggatcctccccggcgggctggcacggtaggtggagaaagaggcttgggcggccccgctatagccgcgtgtgggaggacacacgggcttgcttcaaagctttgggataacagcgcctccggggatcatgaatgc

SEQ ID NO: 6253 - DNA, 267 bp, Macaca Fascicularis
cagagaattacctgtaccagggacggcaggaatgctacgcgattaacgggacacagcgcttcctggagagacacatctacaaccgggaggagttcatgcgcttcgacagcgacgtgggggagtaccgggcggtgacagagatgggacggcctactgcggaatactggaacagccagaaggaccgcctggaggagaagcgggcagtggtggacaggatgtgcagacacaactacgaggtggacgaggcagtgaccctgcagcgccgag

SEQ ID NO: 6254 - DNA, 737 bp, Macaca Fascicularis
  misc_feature (1)...(737): n = A,T,C or G
gaacctccannncaggaagcatnnncccctgtgtaaacaactcaaggtgggagtatttcagagggcatggggtcacgaatcctcacccagagggaagcctgttttagcagtggatgcgggagttgatgaacagacaagcaagttctgcttctgtcctgtttcctcctgacagctccattccttgaaagtctgatgcttcctaagctctgcttcataaccactctgagaattgtcccatggggtgggcacgcgaagcccagctctgttctatccaggtgccttgggcctgaggagtctgaggatctgacttgggtcttggaagggttccaaccccaagtcagtcaggaagctgcccgtttttttttttgttgttgcaaggcagtttaatgtcctttctcagacctctctagtccctcccgccctctgttctctgtggctgtgagcactttgtgagaatttgactcttaattttgaatcttatgtaagaggcttgagatgtgctggagagggcaggaagaggaaagttatcagccaactaacaggtcttgagagagagaatgtagctttgcttttaagatctggagtcaccttcacttgctagctgagtcctaacacaacttccaagtccatgattctcttggggcattggatgggctcagtgtgggtctcttaggcagnnnnnnnnnnnnnnncannnnnnnnnnnnnnnttgtactgtcaaggggcagcatttctgg

SEQ ID NO: 6255 - DNA, 720 bp, Macaca Fascicularis
  misc_feature (1)...(720): n = A,T,C or G
agaaatcannnnnnnnnnnnnnnccatttgggcgcttacattnnnnnnnnntttattnnaaatacttgannnnnnnnnnnnnnnnnnnnnnnnnnnnnnnnnnnnnnnnnnaattggaaacatccaatctagttttagcacagagttttgaaccttgagttataaaatgtagaataattaaaccaagtaaaaataagaccaccatctggcacccccgaccagcccccggttcaccccatcccaggaggggaagcacaggccgggcctnnnnnnnnnnnnnnnnnnnnnnnnnnnnnnnnnnncttacacctccaccgtcctcttcaccttttccagccatagggaagccttgagccatgtgttcaaacaagaggtggggcnnnnnnnnnnnnnnnnnnnnnnnnnnnnnnnnnnnngaaagtggcaccctcctggttgtgcagccttttaannnnnnnnnnnnnnnnnnnnnnnnnnnnnnnnnnnnnnnnnnncaaaactttatgtaccaacctcatcctatttggagtctgcatcctgtgcaaccgtcttgggcaatccagatgtcgnnnnnnnnnnnnnnnnnnnnnnnnngtggatgctaaccctaagcttgtcgtaaggaaatttctgtaagaaagctggaaagccccaacgctgtgtctcatgctgtatacttaagaggagaagaaaaagtcctatatttgtgatcaaaaagag

SEQ ID NO: 6256 - DNA, 618 bp, Macaca Fascicularis
atataagacattagtatgttactttcaggaccggcagtggtggctcacacctataatcctagcactttgggaggcagaggttggcagatcacctgaggtggggagttcaagaccagcatggccaacatggtgaaacctcgtctctactagaagtgcaaaaattagatgggcagggtggcagattacctgtaattccagctaccccaggaggctgaggcaggagatcattggaacgcaggaggcagagggtgcaatgagcagagattgttccactgcactccggcctcggcaccatagcgagacaccatttcaaaaagaaaaaacactttactttcgggatacaattgaggcaggagaatagggtctggaggccatttcacactttcttcctggaattaggaagtcttactccctttgcaaacccccacttctgcatggcagatgggaaattgaaagtacctctgattggctttttctaatcaatcagaatttgcataggactgtacccttgtaaattaattgaagcttcggataggaggacaagtctttccatagaagtgcaacttggtaacttcactttagcctctgattggtggctttctgcaacagatttcattt

SEQ ID NO: 6257 - DNA, 1701 bp, Macaca Fascicularis
ctactgtggatttggaggagttcttatgtaatccatttggtttgcatacacctcctatctgttgccattctcagaacataaatctttaattttaacataatcaaatccattattttgttgtgtgtgtatgtttatttcttaaacacatggttcagaaaagccatggtggatggttaaaaagatattttccacagctgcttctattagtttcgtaagttttccttttacattcaggacttgaatctttctggagctaacctttccaggtgtccagtatcttctgttgttctttcaattgttgctttaaaaatttcaaagctacattattactaggtatataaacggactatctctacatctttatctgctgttccttaccagtatataatgttccttttttacccttgtgatgttttttgacttaaattgtcaaaaagcaatattcagtttgctattctagtgtttttgttcctctgatatatctatcccattcttatatttttcaaaatttgtctctcttggttggttggtttgattttgtaatagctttattgatacataattcacacccatgcagtttgcctacttaaaagtgtacagtttaatggtttttagtatattcagatttatgcagtcatcaccacaattaattttagaacatttacattactccagaaagaaaccctgtatcctttagctgtgatcctccagtcccgccattccccacaactcagagcaaccactaaccaccctgttctttatggagttgtctgttttgaacatttcatataagtggaattatacaaactgtggtctttcgtgaccacatattgtatgactggcttctttcactgaacataacattttcaaggttcatgtatgttatagcatgtatcagtacttcatgtacttttattgctgggtaatattctattgcatggatatgccacattttgtttattcattcactggttgatagacatttgagttgcttccacttttttgctataacaaataatgctgctgtgaacatttttgtatgagttcttgtgtggacaattcctttggatattactcaggaatagaatttctgggtcatatggtaactgtgcttaatctttttaggagctgtcagactgttttccaaaatgactacaccacttttacagtctcagcagcattgtgtgagggtcccagcttctccatatcctctccaacacttgttattgtcttttttattataaccatcctaggttttgtgataaggatgcaaacagaaagctggaggtcttcagggacctagtgaacgaagttgtgtcttattttggcttgactttggttttaagtgtgcatattatgacatgttgctcacgtttttatgttctgggatctgtcactatcacattactttgccaatgttaggaacctgaatatctaaatcaagctttaaagaagtatttgctagctatgctcaatgtttcatcttcactataataataaaacagatttaggaaaatgctttcttttaaataagtgtaagtaaaacaatttgaaaacatgtttgttcttatcaaacagccttttgttcccttgatattttatacaaaatagtagatagcagaggataagttcctgataaggaatcagtattttctaacaagagaagttagagaacaagaacctcaaaaaaaaaaaaaaaaa

SEQ ID NO: 6258 - DNA, 1701 bp, Macaca Fascicularis
  misc_feature (1)...(1701): n = A,T,C or G
tggcactgtgctgggcccgggccctgccctctcggccaggtgcctcccgctctgggggcctggaggaatcccgggaccggccccgaccccttcctgctgagccagctgtgcggcccaaggagcctgggaccaagcgaaagggcttgggtgagggggtcccctcatcacagcggggtccccgccgcctctcagctgaagggggagataaagctctgcataagatgggtccaggtgggggcaaagccaaggcactgggtggggctggcagtgggagcaagggctcagcaggtggcgggagcaagcgacggctgagcagtgaagacagctccctggagcctgacctggccgagatgagcctggatgacagcagcctggccctgggcgcagaggccagcaccttcgggggattccctgagagccctccaccctgtcctctccacggtggctcccgaggcccttccgctttccttcctgagcccccagatacttatgaagaagatggtggtgtgtacttctcagaagggcctgagcctcccacagcctctgccggtccccctggcctactgcctggggatgtctgtacccgggacgacgtcccttctacagatgagagtggcagtgggcttcccaaaaccaaagaggcagcccctgcagttggagaggaggatgacgactaccaggcgtactatctgaatgcccaggatggggctgggggcgaggaagagaaggccgagggcggggctggggaggagcacgatctgtttgctgggctgaagccgctggaacaggagagccgcatggaggtactgtttgcctgtgctgaggccctgcatgcacatggctacagcaatgaggcctcccgtctcaccgtggagcttgcccaggatctgctagccaacccacccgacctcaaggtagagccgccccctgccaagggcaagaagaacaaggtatccacgagccgtcagacctgggtggctaccaacaccctgagcaaggcagctttcctgttgacagtgctaagtgagcgtccagagcaccacaacctggccttccgagttggcatgtttgccttggagctgcagaggcctccagcttctaccaaggccttggaggtgaagctggcataccaggagtctgaggtggctgccttgctcaagaagatccctctgggtccgagcgagatgagtaccatgcggtgccgggcagaggagcttcgggaggggacactctgtgactatcggcctgtgttgcctctcatgttggccagtttcatctttgacgttctctgtgctccaggttcccggcccccaagtcgcaactggaacagcgagacacctggggatgaggagctgggatttgaagcagcagttgctgccttgggtgagtctgtcaacgtcttgagcacatccatgagctaagcctggttcaggtcttaaaggacatgagacctgtgccttgttctgaagggctgtatggtaatgggaaggtcagggtgacgtgtgtgagccaactagtgcctgtaagacagtcaggaattcagggcaaaaatgtgtgctatatggccnnnnnnnnnnnnnnnnnnnnnnnnnnnnnnnnnnnnnnnnnnnnnnnnnnnnnnnnnnnnnnnnnnnnnnnnnnnnnnnnnnagcctgggcaacctagcaagacctcatctctactaaaaaaaaaaaaaaaaaa

SEQ ID NO: 6259 - DNA, 620 bp, Macaca Fascicularis
  misc_feature (1)...(620): n = A,T,C or G
cagccagatcaccannnnntacaattcnnnctgctgtcnnngaaatggtccattgagtaacacccccatcagcctctcaactgggaaacccctgaaatgctcccagagcacctctgacgcctggaaaagttataccttcctcttcccctttaccaaataaaacaaagtnnnnnnnnnnnnnnnnnncagtggccacttttcagtggcccaatatgccactgggctctcactcccaattccagcccaccctccgttacagagctcaccacaccctcctagatcaccgtccgcaacacacccattgcctctcaaggcccttatctcagccccttcctgcggccacttccctcagtgctcagatgcttccctgggtgagggagacactggggcaccctcagaggttggagcaggctccctattgtctctggatcctggacagatgctcagtaaactgtggggactatgtgcagactttttgccttcttggagtcctgggtctcctctgagagcctggctggtgctcttcctacgcctctataggtctctgtctctctcattttccttcaaaagctggcctgtatttctcttctaccttccagctcctcccacagaggaggaag

SEQ ID NO: 6260 - DNA, 215 bp, Macaca Fascicularis
cagtcaggtcaagtgcaaagcactgagttgagatttagtccacccaaatccacaagtggggggttcaaatatctttaaagagataaaagggtcttgtgtatatgtcttgataccccgcgggggtaaagatagcacaatctcccaaatattgcccctctcttcgggggtccagacctttctggcagatataggtaggcacgaaggggccaaaggga

SEQ ID NO: 6261 - DNA, 1471 bp, Macaca Fascicularis
tttggaccaaatcaggtttgaagtatggatgatatatatgagaatttttttaaaattctaaaatatagcaacattgcacaggaagatactcttacttcttagagtaactacagagtgatttttttttcttgagtgagactctgaagagccttttggatgctgtttggacttggatgaaagcaattagaattatgaagcaatgatcacttttagaaaatttttctatcacatgttgaatattttcaaaacctcactttaataatctaaagttatgggattgtatcttatattaattttacagttttgagtagtatgataaaagaaataagaattcaaaccattaagtacctacctatactacatgtaaggcactgtgcttttattccattcagctgaggtataagtgtacctcagtacagaataagcagctgtactcaaacattcttaaaaatgagaaccaatggggaaattgtttataatcattggaaatgaagaaattccaattggctatatctttacttcagcttttcttgaatgatttacagcagtgattttcaaaatgtgtctactggcacccttcccctttgtatcagagcagttctgcttttaactgttttatatgtcaggctctatgagatttcattggaacaaagagtttcactgatactcaagtttgaaaaccattaagtgaaaaaacatcttagaagataggaaatatgtaaaaaaattgaatgtattaaatcttatgagtaggaagatgaaatacaggtttatcatatagctatattgtttatgaacactaaagatctatacatgaacagcagaatgtataagctagcatttactagcatgtctctgatgcttttgttcatttctgttagtcatcatttttgtcccctctgcatggaattttatacttgtctagggtgagagtttgtagactttcagcagaacatattttaataaccaatttatttgttttattttgaaaaattatttttgaataaccaatttaatagtaaattttatatgaacacttggcataactttaccaaacagtttatttctatgcagtgatggaacattatgtaatacagctcatttcttgaccacctagttatagaagtaccattaagttaaaaattagagaaatccaagagttgttatacttaatgagaggaagcagaaatggtgggtagattctcagaggttttgatgttcagtactgactgttggaccatgttctgtgattgtaagaaatattgaaaacagtttgtatggagacagtaggtgattagcatttgagctctcaaagcagaactctagtaaaatgatctcgacctaacaaagggtctgttctattatatagactattcccataatcctggaatgtttcaactaggttttggcctctccattatatgagctcatatgtatatatttaagaagtctgattaaagtaggaaagatt

SEQ ID NO: 6262 - DNA, 1655 bp, Macaca Fascicularis
gtgacgtcggcagttgccgtggagagacccgctcggtcccgaccgtgagctggcgttaggagccgcagggtcacagcgtggctttgaagccgcctctgccaccaccatgagcggccgaagtcggggtcgaaagtcctcccgcgcgaaaaaccggggcaaaggccgcgccaaagcccgagtccgccctgctccggacgacgccccgcgcgacccggacccttcacagtacctcggtctcagctgggggaggaaaagaaggaagagagggacggaaggcagcatggatacgctggagaacgtgcagctgaagctggagaacatgaacgcccaggcggacagggcctaccttcggctttccaggaagtttgggcagttgcgactgcagcacttggagcgcaggaaccacctcatccaaaatatcccgggcttctgggggcaagcatttcagaaccacccccagctagcatcgtttctgaacagccaagagaaagaggtactgagctacttaaacagcttggaagtggaagagctcggccttgccagattgggctacaaaatcaagttctacttcgatcgcaacccatatttccaaaataaggtgctcatcaaggaatatggctgtggtccttctggccaggtggtgtctcgttctactccaatccagtggctcccagggcatgatctccagtccgtaagccagggaaacccagaaaacaaccgtagcttctttggttggttttcaaaccacagctccattgagtctgacaagattgtggagataatcaacgaagaattgtggcccaatcccctgcagttctaccttttgagtgaaggggctcgtgtagagaaaggaaaggaaaaagaaggcaggcaaggtccaggaaagcagccagtggagactactcagcctgggacatgcatagaagtggagaggatggtccttggaccccatgtgtccatcacctagctgcatcatttatcagttatggtcaacctggtttcatctgtatctgcctctttttcatctgtattgtttattgaaaatccaagacactaagccaatgcaaccgtgactactttgggagattggtagtctcttttgatggtgatagtgatggggtgcactatcataatcacatcaggtctgcttttcgcttctaatgttaactaacgaagttccagagatgggccttagaaatgtgttttaagaattaacaaggagtctcaaaaagaaatgagagggatgcttcctttccctttgtatccacaaaacaagagagagactgttctgttgtaaaactctttcaaaaattctgatatgataaggtacttgagacccttcagcagaatgtcaatcttttttttctgtgtaacatggaaacttgtgtgaccgttagcattgttaccagcttgtactggtctcataactctggttttggaagaataatttagaaattgttgctgtgttctgtgaaaataacctcccccaaaataattagtaactggttgttgtacttggtaatttgacaccctgttaataacgcaattatttctgtgttcctaaacagtataaatagttgtaagtttgcatgcgtggtggaaaagtaaaaacctgtatctctgttataaaaaaaaaaaaaaaaaaaaaaaaaaaa

SEQ ID NO: 6263 - DNA, 773 bp, Macaca Fascicularis
  misc_feature (1)...(773): n = A,T,C or G
gagaaagacttaaggcagttaatagtatcatatctattgttnngggtannnnnnnnnnnnnnnggnnnnnnnnnnnnnnnnnnnnnnnnnnnnnnnnnnnnnnnnnnnnnnnnnnnnnnngtttaatgaagggaacatcatactcatcatcagtctacttagaagagatttcctcgatnnnnnnnnnnnnnnnnnnnnnnnnnnnnnnnnnnnnnnnnnnnnnnnnnnnnnnnnnnnnnnactcatctctgtttccaatactgctacattttcatatnnnnnnnnnnnnnnnnnnnnnnnnnnnnnnnnnnnnnnnnnnnnnnnaagggcagcatnnnnnnnnnnnnnnnaatcgaaacgcagtggggaagcattttgaactgnnnnnnnnnnnnnnnnnnnnnnnnnnnnnnnnnctcgtgaagcagtttctctttgnnnnnnnnnnnnnnncgaatcctnnnnnnnnnnnnnnnnnnnnnnnnatagtnnnnnnnnnnnnnnnnnnnnnnnnnnnnnnactacaaagagnnnnnnnnnnnnnnnnnnnnnnnnnnnnnnnnnnnnnnnnnnnnnnnnnngcagtgtttgactctgagccctagaattctgaggttaatgtgctacagttatattaatgtataattattagctctaacgtaacaccaactgttgtgaacatccatgttattggaaaagaacacattttgagtgtattttagatgtttaaattctgacttttggctattaaatggcttacacaataagccaag

SEQ ID NO: 6264 - DNA, 717 bp, Macaca Fascicularis
  misc_feature (1)...(717): n = A,T,C or G
tgtgctgnnnncaatggatgtttgtnnnctcttgtgcannnnnaaaaaagagtaataaaaaggatttttaaaaagtaatnnnnnnnnnnnnnnnnaatctgtcacagttaatctaggtttgtaaataaatagtaatttatagaatttttaaagcgtaaaatcctgtaatattaaggtaaacctaggcctggaaaggttgttattttaagattgcacaggaggccacagacagaggcaagtgccccacagactccactttccttcctaactgttctcaaattaatgctcgtgannnnnnnnnnnnnnnnnnnnnnnttatagagtttggtaagtaaaagttacatgcccctgttttcctagcaggatattcactgttatcaaagacgaaagtcagaccattcattcattctcaaaacactgaatgccattctgtgcctagtgctatacaaggcatgggagattcagtgtgaataagtctttgctctccacctaacaagggccaattttaattgtagattgtcttaagcatgaattttagtaggcattaaaaattagtttgataatatgagacccaaccctaannnnnnnnnagaataatcagttcatgaacctttgatatttcctgtataattcatgaatgtgaaatcaatcattctagtgttaatactgtggaatgtcattggtgtaacaacttggggttcannnnnaacacctctt

SEQ ID NO: 6265 - DNA, 737 bp, Macaca Fascicularis
  misc_feature (1)...(737): n = A,T,C or G
gtgggatgctgggatcaaggtatgggaggcaagccccagggtggcagcaaacttgggtgnnnnnnnnnnnnnnnnnataaaagctcacccataatggatcctgccattacttctcaaaagtnnnnnnnnnnnnnnnnnnnnnnnnnnnnnnnnnnnnntccctgaggacagcagaagccagccttcctcttctgctcttgtccccnnnnnnnnnnnnnnnnnnnnaagaagaacccaaagatnnnnnnnnnnnnnnnnnnnnnnnnnnnnnnnnnnnnnnnnnnnnnnnnnnnnnnnnnnnnnnnnnnnnnnnnnnnnnnnnnnnnnnnnnnnnnnnnnnnnactagcagagaagaggtgaatgtccgaagagaagaccttgtggaggaaatcaaaaggagaacaggccagctnnnnnnnnnnnnnnnnnnnnnnnnatctatcagaggaaaggaagtgggactnnnnnnnnnnnnngttaagacaaannnnnnnnnnnnnnnnnnnnnnnnnnnnnnnnnnnnnnnnnnnnnaagacctgaagactggtcagaacagagactttaatttttattatggttattttattgattannnnnnnnnnnnnnnnncagatactacacctttttcatacaaggccctgggggcttagtccagtctgtgctcctgggctacaaggaccnnnnnnnnnnnnnnnncatctacagggcctcgcaccagtggagcagatgcctccc

SEQ ID NO: 6266 - DNA, 756 bp, Macaca Fascicularis
  misc_feature (1)...(756): n = A,T,C or G
tggatgacacaaatagcagtgaaggcagatgaaacaaagcttgtgagaagagctcaggaggtgtgacaatcccgaagaatgaccaccagggccaaggggaaggcacatgggtggtatagtggtgtcttaggccattcttgggttgctctaaggaatacctcagattgggtaatttataaagagaagaggtttaattggctcttggtttgcaggctgtacacgagacatggctgcttggcttctggggaagcctctgggagttttcactcttggcagaaggtgggaggggtgggagcaggcatctcacatggtcagggggtgggggttgggggaaagaaggggagatgccacacacttttcaaacacccggatctcacgagagctctcattcatgattgctaggacagcaccaagccatgagggatccacccccatgacccagacacttcctgccaggtcctgcccccaacactggacattacatttcaacatgaaatttggggctgggcatgnnnnnnnnnnnnnnnnnnnnnnnnnnnnnnnnnnnnnnnnnnnnnnnnnnnnnnnnnnnnnnnnnnnnnnnnnnnnnnnnnnnnnnnnnnnnnnnnnnnnnnnnnnnnnnnnnnnnnnnnnnnnnnnnnnnnnnnnacaggcacctgtagtcccagctacttgggaggctgaggcagaattgcttgaacccggcgggtggaggttgcagtgagctaagatcacgccactgcactgcagcctggg

SEQ ID NO: 6267 - DNA, 181 bp, Macaca Fascicularis
ttcttggagcaggctaagtctgagtgtcgtatctttaacgggactgagcgggtgcggtacctgaacagatacatccataaaagggagaagaacctgcgcttcaacagcgacctaggggagttccaggcggtgatggaactggggtggcctgtcacagagttacaattacggggttttggag

SEQ ID NO: 6268 - DNA, 771 bp, Macaca Fascicularis
  misc_feature (1)...(771): n = A,T,C or G
acgttaggaatgtttccnnntagtgtcatttacctgaatttcccgaagttcttgttcgatggaagttcttcttaaatgcannnnttccccttgaatttcttaagttagggctaaaaggcttgattagattcatgacaacaagcacttaaaaacactccagaggacacattgtaagtgtacaaggttgatgaatttttacaaactgaacacatccaggtcaaaaagcagaacatgaccagaaaccagaatcccctcccaggcctccatgctcacatctattcactaaccctcacactccaagagtgatggttgtcctgacttctaatatcaccaattaattttgcttatttttgttctttacataaatggaannnnnnnnnnnnnnnntttgtgtcttgaatcttttgacattatacttaggcagttnnnnnnnnnnnntccatatagttgtgttgcaagttcattcattttcatcgctcgctctatgatatggtttggctgtgtccccacccaaatctcatcttgttaattgtagctcccataattcccacatatgggaggaacccagtgggagataattgaatcatggaagcggtttcccatgtaaagttatcaaggtagtgaattagtctcatgagataagaaaaaaaaataaagggatatttcccattagaatggttctcgttctctatacagcacaccatgtaagaagtgcctttcgccttcnnnnnnnnnnnnnnnngctccccagccatgggaactgtgagtcca

SEQ ID NO: 6269 - DNA, 743 bp, Macaca Fascicularis
  misc_feature (1)...(743): n = A,T,C or G
tcaagcgattctctnnncttggccnctggagtagactaaatgtgttagtctttgaatggaaaacaactattttctcatcattgggtcaatattgactgatcagtagtaggtcnnnnnnnnnnnnnnnnnnnnnctttagatgtagaaatcctttcctttatcatagaggatatggtttatgatactatttgttttcattgtgactgccatcatgtaataatcatgaatattagatttttaaaattgtagaatatcctaatatttatagccagcagctgttacttcgtttgtaaaatttgcaaaaatccaaaacctgaagttggcttcttgaaagaattacaaggatagttcgtagggatattagtaatagattgccatgatcctgaagcctcttctcagaacactatgaagataatactgacagagtggaatcagtgaaaacagcctaacaaaacctccaacttcagtatatcaacttttaacagctcactggcttttctaaactaccgaaaaccacctataggatactgcatctcagaaagggtggcgtgagagtaactgagtcaaattgtcaagtactttggatatacatagtgtctagctttagattggtatgaaattaaacaacaatgcaaatagatttaattcttatttacttcaagaatgcaaaaaaaaggttcattttcctatccaaacagggtggttcaacataaaggctgacattgtcgtgtctgctttgtatt

SEQ ID NO: 6270 - DNA, 2139 bp, Macaca Fascicularis
  misc_feature (1)...(2139): n = A,T,C or G
gtctttaatgaaggaaaagaagtctgtatgatgactgagatgattgctatttttgacaaatatttattacagtaatccagaagtaataatcatctccaagtacgtaggatgcttatttctgaaacaaaggtttcaggcaggtggtgatgggtcttatttttcctagtgaatcatatgcatgccatttgaatagggatgtgttcaagaaagcaacttagtttcttgccagtgtagtatagtgcaatgtgataagtacatgatacttgtagctagactacctctatttgaatcccaactcatttcttatgtgaccttgggcaaattacttaatctctgtgtgcccagtttcctctcctgtaaaatgaatatattggaacctgtcttatagggttacggttaaatgtgcaggcacttagtaagcattacataagtcttagctattgatgctcttttttttattagtaaaaatgtaaatgccaattttctatttttctccaccctatcctgatacccatatcagtatgatcttaaagtgccttgttttctttaagtcaccttttagaacccaaagtttatgtcttttttaaattaatatcactcacacacaaaatgatacaatttcagtgatggtatcaggcagtttatctagaaagccaagggttttttactgttttactttttttttttttagtagaggggttcagtttggtctcgaattgggctcaaacaatccactcaccttggccttcctaagtgctggctttactggcttgagccactgcccccatcctgggttggttgttgttgttgttaatgacattatgttattggacttctgactttgctaagccaatgaagactatgtaaaataacatataaaaggtggccnnnnnnnnnnnnnnnnnnnnnnnnnnnnnnnnnnnnnnnnnnnnnnnnnnnnnnnnnnnnnnnnnnnnnnnnnnnnnnnnnnnnnnnnnnnnnnnnnnnnnnnnnnnnnnnnnnnnnnnnnnnnnnnnnnnnnnnnnnnnnnnnnnnnnnnnnnnnnnnnnnnnnnnnnnnnnnnnnnncaggagaaccgcttgaactgaggaggcggaggttgctgtgagccaagatggtgccactgccctccagcatggcaacagagcaagactccgtctccaaaaaaataaataacatataagaggtaagctgatatataaaatgtggtcatttgtaaaatatactagttgtaaaatggcaatagaaaaacaatcactagtttcttggctcttgttaacataccacagagcagttttggtttttttttttctcattcacagcaaagagtaatgacctgcaaagggataggctttaggtaaaaaaggaaaatgtccatttttcattttttgacatcatctgaaatactaaaggataaatgaaacgttttaaaataatcccaagaaaaaggccctttgagttgttgcttaaaatggtatctactgaacagtcagaaaacatgaattttttatgtaacaggtgccatgctagctgggcccaggggaggcaatgatgaataaaagtaattgccttctaaagcatatcaaatccgtgtaaacacggccataggccattggatgagtgtcacagaaaggtaagcaaagtgaaatgcagactgaataataagtttctaagatgacccaggaggaaatttttgagagtaagagtaggtaaagcacatagaaaaaggtagtatgggcattttataaaatggatgattgatggaggagggttgctgggagagatggacaaagtggaaaaagatggtaagaaatggaaattgtcttgaagctgcatttccacttgctgcgggtgtgtgctttgcctgacacgttaaaacctccaggcgtggtggctcatgcctgtaatcccaatgctttgggaggctgaggcgggaggattgcttgatcccaggagttcaagaccaatctgcacaacaaacccatctctacaagaaattttaaaattagcgggatgcagtggcgcatgcctgaggtcccagctaccgaggaggattgcttaagcctagcagttcgaagctgtggtgagctgcgattgtgccactgcactcctgctgggcaaaaaaaaaaaaaaaaaaaa

SEQ ID NO: 6271 - DNA, 749 bp, Macaca Fascicularis
  misc_feature (1)...(749): n = A,T,C or G
aaacatgtacatctcaaaaactggagtagaaagttagattgctcaatggcaactcctctagaactctatagctctgatcacactctcctgtatttgctaagtatgtaaagaatgttttcttttaaagtgttctcttttgagaacaactgctcatttgttgtaaaagcatttggttaaattgatggcatcataaaaaacagtgacttcatttcaatacatatttttgagatgattgtctagaagccagattaattaaatcgagcttgtgaccttgctaagcatataaattggaaattcagatacattcaaacttatgggttcatttaaaagtgttnnnnnntttgggtatgagactaatatcactaattcctcaatagttatcgtggctctatcttaattaattagaaaatatgtgtgtttaattctttgagaattaaaatacagaatatgaacagagggttaaaaactgcttcaactccaataagataaaggaagctgaaaatctgtgagctgagtgtttaattagctttgcctactgggttcatttttatgtcaatacaacagtggatcagacagtacgactttgaactggtgaatgtaaannnnnnnnnnnnnnnnnnnnnnnnnnngaagaactgatgcttgctgctaactaaagttttggatgtatcaatttagagaaccaattactacctgcaaaataaagcatactgtggtacttctgtttgatctagtatgtgtgattttag

SEQ ID NO: 6272 - DNA, 511 bp, Macaca Fascicularis
  misc_feature (1)...(511): n = A,T,C or G
aaaaaaaaaaaaaaaaaaaaagacgaactattggagctggtggccaatgatnnnnnnnnnnnnnnnnnnnnnnnnnnnnnnnnnnnnnnnnnnnnnnnnnnnnnnnnnnnnnnnnnnnnntggggtgtgtgtgtgcggatatagggacctccctctgtactctgtaannnnnnnnnnnnnnnnnnnnnntatgtatggaattttaaattatcttagcttanngattggtttgggtgagcacaccagctgcagatgtgtgtgaattgcaagatggtatttttttttaaccaagggatgtcttgtannnnnnnnnnnnnnnnnnnnggttttcagacatgtttaaaaaaaacacgtttacaaatgaatacttaccttagaaatattcaccttaggaaaaaagactttgctctgcccttttatattcctttacgctgcaagtggcgacatgttcacatttctaatttgttcattgtgtgcctatctggtctaagtatttcattcaaaatgtctc

SEQ ID NO: 6273 - DNA, 691 bp, Macaca Fascicularis
  misc_feature (1)...(691): n = A,T,C or G
gtgtcccacagtgctgcgctagtcccttctgccaccctccccagtcccaggacgggccctggggggagaaaggagcctgtgccccctgatgggtttggctgtcctgatcttgtcttccctcccctgaaggaaagtttgcactggattttcttggagccccacctccccagcgggcaggcgggcggagccgtgtatatatgtacatactcagtgcctcagttcagcttcttccacctcgcttccactgcaaggcccgggaaggagaaaggccaagccaaagcaggccccaccccgcccccgtcgtgctccacccctccctgccgcggcctcctggcccctgtatggtcccgcccccaaagaccctggggcccgcggggccgaaagcggagttgggtttgccttattttgctcattggattcaagttcttttgcatagttttcttttaacccctgtnngagtccaggggcgggagataaggacagatttatgcagctattttcatacattcccctttcagagtggggtagggggttctccacccttaccctatccactccattccccaccctctgccgggtgagtgtctctttgcatgtttcctttgctgtggtgggagattgtttgactgaacccccatccccaccttggtctccaggggtgtggaatggtaggggaatttgtcaaaaagac

SEQ ID NO: 6274 - DNA, 2052 bp, Macaca Fascicularis
atggatatgatgagcccaaaggctgagctctagaatttcaggggttccagcaaagccaaatatctatctctatctttattttctgcctgtgaccacagagcagagtagcaacccagtggtaaaatgggactttccacccccaccccatcgcagtgtttttttcaaagaccacctacctaatcaccctgtaccttgtgccagaaccttggaccctggccccaggggattcagcccacacagcccagcctcaagggccctcacgccctccctgaatgcccatcccaggcctcaagatagaagagaagagatccccaactacagtcggcagaaacttgtaagagagagtggcccatcccacagccagggcagtacagggaagagaaaagtcggagagaaggaggaaggagggatggactcagtgcttgtcacgggtcggtttcctggagtttggtatagagcgtgggcagctgcctcatgccagcagtagcttgtcccccataatttcccttattccatttaacatcatcaggagcatcttggtggaaagaaacatccagtttgggggctccaaacaaccacaggcaaggtcaggtgtcaccacgcatgggagtgccacaaggccttgcccagaaaccagaaacagctttcaggctaggggtgggacactttcctctctgctctctaaaatgctagctgcagacctgtgagggctctgccagaagaggaagccacccctgtatcagctctgctcaataggcaagagctggccctcacccgagagaggccaaaaggcccatatggaaggttcaggactggcctgttgttgggtatcttgcctacaggaagccccaacatgcttccctgttcattcagaggctcggtgtggctcagtccccatgccatgtctccctgcggggccctccagcagtcctctgtcccattctggcaactccatacatttgcccacatggctgtgaatttcggatgggtgtgtgtgtgtgtgtgtgtgtgtgtgattcagtgtgctctcatcccctctttcatggcccctcactacagagcaagcctgtccaacctgtggcccaagggccgcatgtggcccagggtggttttaaatgcagcccaacacaaattggtaaacttccttaaaacattaagatatttttttgtgatttttttttcagctcattagctatcgttagtgtgttagtgtattttatatgtggcccaagacaattcttccaatgtggcccagggaagcgaaaagattggacatccctgccatagaggtagtaaatagggacagaggttagtactggggcttggcatgctacttgcaagtgattcgattgcaaatccaccaccttcccacaactggaccatgactccccataagtaccaggggaagtcgaccctcagtgatcagaggacctcggatccttttcactggtctgggtgttcagaaacccccaaaagccttgagaaacactgagtcctttgatcatttgcagtcagctcgcagtcaccaggcctcccgttctcccttctatccttagagcactccatggctacctggctactgtcacacgtgcaggtggcagggtgaagggggacagcacctctcagaacccactagtctacactgccacagccttacaaccccagagttacttctcagatctttggattatttctccatcagactcataatcctgggcttcagacttggagaatgatggaaaggaaatgaagagctggctgggcacagtggctcacatctgtaatctgagcactttgggaggctgaggtgggcagatcacttgagctcaggagttccagaccagcctggcaacatggcaaaaccctgtccctaccaaaaatacaaaaattagctgggtatggtggtgcgtgcatgtagtccagctacttaggaggctgaggcaggagtaccattggagcccaagaagtcaaggcagcagtgagctgtgattgtgccactgcactccggtctaggtaacagtgagaccctgaaaaaaaaaaaaaaaaaaaaaa

SEQ ID NO: 6275 - DNA, 709 bp, Macaca Fascicularis
gggtgataataccaggaatttaataagatttgtaaagaatatccagaaaagtagtgaacttattttcagtagacatagataacaatgtgaatatttaaggtctgtgactatagttaaacttcactaagaatttgcagaattgttttgagatgtgggaataaaggtaattttattgaatcttcattggtgctaatgatggacagttaaaaagatagctagtgtatattgttatgggtcagtacttattagtacttccaaaattgaatttgaaatgctatgtattcacttttcactctgtaaatgtaattctttacaatgactttatttattaaagggcagccagttgtcatttttacaggattgtgtgagctattcaaactccttaacccctgaacaggatattaagcttccagaataacaatgggaataaatatggaatcctttttaagttttatttccattaaacagaaacccttataattcatactatcatgaatttgttttatccatctcatttgcataacagttcatctgcctggtcccactaggctctaccaaagaaaaagactctgatgagtggacattattactgtgactcttgcaagtagccataaataaaccaaaatagaatcaaatttaggtatgaaattccacatgtgcaaagtactgttaaggtgataacatttttgatgagatttaaaaacaatat

SEQ ID NO: 6276 - DNA, 2511 bp, Macaca Fascicularis
actgaaccagtgacaagctgggggaaatgacactgtctagtagttggaggtcagccagccccttgcgttattctcaaaccctaaccacatggctggacattcctgatatgcattcctaaacctctgctgctgagaataattggacctgccatctattcccagtttaactaccctgtataccaaacaaatccaattcgagccaacaggcaaagtataggctcagacagagtccatcctgtgtacgaggtggtgagcaggggtggaaaatctcactgtgactcatccagctgatttctgggctgaacccactgacctcacaggggctgttagaatactgtttgcaaagatttccagcacatagaagattcctccatggatgctggcgggcctgccgtgatataaagtggaagaagcaccatcaagatcttcaaggagcacagtagctgatgcccctcccttggcagctgtgttggccctggcatcatggacaatagaaacacccagatgtacacagaggaaaagacagctagctccttcctgccatccatgcctggacctacaaaaacaaaaggagggggtgaggctgtggagacccagccagcaccggggcctcttcctccaccagaggtgagggacattggagagaggcgggagccggaccgtgtgcagcagcagcctcagaagcctgtggtggctgcagggacacagaacctcaggaaattccggcagggcttcatgaagtgcttgctggaggtggagaaagtggaagcctcccatcggagagccttgaaggcccggtccctgacagcccagaagtcccccaggaccctgaccccagtgcccacctcatccccaagcctgcctcagacccctgcctcggcccctgccagtggcccatcgtgggccaggctgtcagctcctgggccagagcctgcccctgtgggagccccggtccccacctccacgccttgccctgtcctgctgtgccctgccctggacctgggctggagaaggatggagctctcgcaccacagcagcgagagaaccctgagctacgccaaggcacggcaggagccggaagagcagagcctccaaaagctgtatcaaaaccgggaaaagtccgaggagcaactgaccctgaagcaagaggaagccttccgcagctactttgagatcttcaatggccctggtgaggtggatgcacagagcctgaagaacatcctgctcctaatgggcttctctgtgacgccggcccaggtggaggacgccctgatgagtgctgatgtcaatggagacggtcatgtggatttcaaagacttcttggctgtgatgacagacaccaggcgcttcttctgctctgtggaacagaacgccctgacggacatggctccccacaacccccacactctactctttgagatcctgtccctgctggtagagatgctggccttaccagaggcagtcttagaggaaatcacaaactactaccagaaaaagctgaaggcaggcacctgcaaggcccaggagatggaagcggccataggccggctgcggttgcagaagcagcttccctataacccccagcaagaagagagctcagaagtcccagaacgaaaggtcctcagtatcctcagccggctgaagcagcagaactatgctcccaacctgcagagcccctatgcccaggtgccctgcatcccgctctgcccacggatggacaagaagatggtccgcaggaagcagctctcatcagcttcaggagggccagagaaggggcccagatacagagacacattcaaggaggggccttcagagctcaggacacaggagcagaggcctccagcaaaaccagggaagaagcagtcctcttgggtcccccaggaagggtcccaggagctgcaagcaggccaggatcagagtgagctagggttgctgccttcctgggttcctgaaggacctgaagggcttcagcagctgggctccggaaaggagatcgagggccagcagaggaggcaacggaaccggggaaccggggaggatgagcctcctgagagctgccagggccccggatatcaatccaccctcggtcaccaggcagacgtggtgcagccagcagagccttgctgccccttggccggccgtggccagccactgggagacaagcgccccaaggaggcagatgtcccacacatcaggccacaggaggctccgccagagcccagcccaggggcacatggggacagctctcaggaagcaatgcccccaacgtccacggtggctccagaggaaacagggaacacaactctgacagcagaaagtggcccagctctgtgccttctcgaacccactgaccctctggaggcctgaccctggacagttgctcaaggcctgcagacagatgggccaccagacaggagctgctgctggaatttgcttttgtggcctggtaagctaataaataccaataacttcaaaaaaaaaaaaaaaaaaaaaaaaaaaaaaaaaaaaaaa

SEQ ID NO: 6277 - DNA, 635 bp, Macaca Fascicularis
  misc_feature (1)...(635): n = A,T,C or G
gaatctctacacaaggnngtacaggatttggctttnctagatnnngtatccaaacttcgcagtcatgagaacaaaagnnnnnnccagcaggcctctctcacagagnnnnnnnnnnnnnnnnnnnnnnnnnnnnnnnnnnnnnnnnnnnnnnnnnnnnnnnctaatttcccctctgtcctnnnnnnnnnnnnnncttccgcttcattctctaccnnnnnnnnnnnnnnnnnnnnnnnnnntctaannnnnnnnnnnnnnnnnnnnnnnnnnnnnccctaataagatnnnnnnnnnnnnnnnnnnnnnnnnnnnnnnnnnnnnnnnnnnnnnnnnnnnnccataactgttctcttgtatcnnnnnnnnnnnnnntacattaagtagaatgtgcatgttgtagtcctatgatgatgtnnnnnnnnnnnnnnnnnnnnnnnnnnnncacannnnnnnnnnnnnnnnnnnnnnnnnnnnnnnnnnnnnnnnnnnnnnnnnnnnnnnnnnnnnnnntannnnnnnnnnnnnnaaactgaattggaaaaatagctccattttttggtgcttgggaagcacagtgaccaaaaaagnnnnnnggctgcttattcattagcctttcctactaatgtcaaacccat

SEQ ID NO: 6278 - DNA, 751 bp, Macaca Fascicularis
  misc_feature (1)...(751): n = A,T,C or G
gtttggagttttgtatggcctataatgtnnnngttccagaatgaaaaggtccgtaacaatctgaatagatgtggacacatatagcagagagaactatgtacattatcttgcagaacgaaatagaagggtcctaaatcacattaactcaaacattnnnnnnnnnnnttgtgtttattcttcaggtccttgtgccttatttggttttgtatattcaacgaactgaaatatttggaattcctatttctacatatttggtagtccataagactttgtcaaatgtaaacctacagtttgatgtgctttaaaatacctagtcaagaggatgatttctctttaatcgtttaaatgttctgaaagttaaaatcttttgaggcacataaagttggcaccatatatcatctggannnnnnnnnnnnnnnnnnnnnnaaaatgttcatgctgcattgttgattctcatttttctctcccattttctttctcacttggatacgttaatactgataatggataaagggtgagatttaataataaatggttttagaaaggtattcataggaaccgtggttattgagtttatggagtaaactagcttggaccttgggctacaggacaactaggattcacccgtaacgacacagtggcctgtgtttcttaacttcttgttgccatttgaaactctgtactcctatgtttaaagggttctgtatagtcatttttttttttcagannagttacattgctttgtatagaa

SEQ ID NO: 6279 - DNA, 794 bp, Macaca Fascicularis
  misc_feature (1)...(794): n = A,T,C or G
gtgtatagttcancncatnnngctangagnannaccccagactggtaatttatagagaagaggtttaattgactcacagttctgcatagcttagaaaggctcaggaannnnnnnnnnnnnnnagaaggcaaaaaggaagaaagnnnnnnnnnnnnnnnggtggcaggaaggagaaatgctgagcaaagggggaaaagccccttacaaaaccatcagatcttgtgagaactcacaagaacaccatgggggtaaccaccctnnnnnnnnnnnnnnnnnnnnnnnngctcctcccatgacacatagggattatgggaaactacaattcaagaagagatttaggtgcgggcacagcaaaaccatagcaccatttcccaggtgccaaaaaggttggggaccactgtcttagacaatttnnnnnnnnnnnnnnnnnnnnnnnnntgttttggttctttttttgtggaagaggtgagtaccagatgnnnnnnnnnnnnnntcttgaagccccttctccatagtttcttgtttgtttttcatgtcacatatgtaattatttttcttagtgatttctgcctttggtattatgtttagaaaaagcatcccaactcaagatttcatattttaatatttttttctattcttttattcctttcattttgtctctttccccatttgaatctttttgtgtgtacatgtgtaaatatgttgtttatatgtagagttatattgttatatgatatggagtagatcaacttgtattcatccaaataattaagcaacaattacagaagcattta

SEQ ID NO: 6280 - DNA, 791 bp, Macaca Fascicularis
  misc_feature (1)...(791): n = A,T,C or G
gnnnnnnnnnnnnnnnnnnnagtgaattctagatnnnaganaaattngnnnnggataatacttaagagtactggatctagaatcaggcttnnngagtataaactcaggctccccattaactaactgtgtgtctgtgagaccccgtttctcatctgtaaaatggggcaacagtggcactcatcttaaagggttggataataaaataatgcatgtaatgccctcagcatagtgcctggcacagaatttctgctcaaatgttagctgtcatattaatattgtcagtttcacacactgatgtacatatcctgttgaccaggctcaatctttaagcattctccatacttaaaccagttccataatccctaggcctgtactctagggattgagactgaaaggatcacttacgccatgtttctcnnnnnnnnnnnnnnnnnnnnnnnnnnnnnnnnnnctggtgtgtctcaagctattcccaggccttttatgtagagtttagaaatgaagtagttgaatcaatttagtatctcctttactatgtctctcctttcgatctcagccaaccccccacgtgcaggtaaacccagcactcatgatgttaagagctgggttggggtaatctattctgtatgcattataatagcctaacagtatttagtagctgtaacttacaggtttaatgctagatgaggatgtttcaagccttgagtgtgcttgtgtaaaaatggcggcaacatcatctcggtaggaattttttacttgaattgttattgtgggaaaatgttaacagattc

SEQ ID NO: 6281 - DNA, 733 bp, Macaca Fascicularis
  misc_feature (1)...(733): n = A,T,C or G
agctcaccagcaatgcnatcnnnnnntgcagcannnnnnnnnnnnnnngagacgnnnnnnnnnnnnnnnnnnnnnnnnnngaccagctcttcggccaccagctacagctccgagttcagcaagcggctgctaagcacctatatctgtaaagtactgggcaacctacagttgaactnnnnnnnnnnnnnnnnnnnnnnnnnnnnnnnnnnnnnnnnnnccatcttccttcacaacaactacaattacatcctcaagtccctggnnnnnnnnnnnnnnnnnnnnnnnnnnnnnnnnnnnnnnnnnnnnnnnnnnnnnnnnnnnnnnnnnnnnnnnnnnnnnnnnnnnnnnnnnnnnnnnnnnnnnnnnnnnnnnnnnnnnnnnnnnnnnncagagaagaatctacctgtgttcnnnnnnnnnnnnnnnnnnnnngacaaggagcggcagattatcaaggaacgttttaagggcttcaatgatggcctcgaagaactgtgcnnnnnnnnnnnnnnnnnnnnnnnnnnagacacagagcagagggnnnnnnnnnnnnnnnnnnnnnnnnnnnnnnnnnnnnnnnnnnnnnnnnnnnnnnnnnnnnnnnnnnnnnnnnnacccttcaccaagaacccagagaagtacatcaagtacggcgtggagcaggtgggcgannnnnnnnnnnnnnttttcgacacctctgcctgagccttctgctagccctgcctggttccac

SEQ ID NO: 6282 - DNA, 695 bp, Macaca Fascicularis
  misc_feature (1)...(695): n = A,T,C or G
tgtccagggagggcccctcatctcctgtttcnnncatacacatggggaggggctcggcgctgccctgacgggcagagctgaggcctggcctggacgggcctgccctgggccctgtnnnnnnnnnnnnnnncttctggcaaagggccagaggcatcgagggtgagggttgaaccaatgtcnnnnnnnnnnnnnnnnactctcattttggcctcttctgcgacgaggaggnnnnnnnnnnnnnnnnnnnnnnnnnnnnaacatgttgttctccggannnnnnnnnnnnnnnnnnnnnngaaatggggctgtgtgtataatatgggtgcctagttaccagaattctaagttctattggggatgtgtcagcaaggaagtgnnnnnnnnnnnnnnnnnntccatcctgtaagctcctcctttccatgagacctactcacaggtccctctgggtttctgatcgctcaccctcccccatcaactccttacctttcaccgttaagcaaaagtgtgcctcttcagcaccttgggaagagaagactggaatataaccattctcccaggtttgaggannnnnnnnnnnnnnnnnnnnnnnnnnnnnnnatagcagttgtgannnnnnnnnnnnnnnnnnnnntgttttggggcctnnnnnnnnnnnnnnnnnnnnnntatgctagnntctccttcctaggcagctc

SEQ ID NO: 6283 - DNA, 769 bp, Macaca Fascicularis
  misc_feature (1)...(769): n = A,T,C or G
ggctgctggagtgcagnnnnnnnnnnnnnnagtactattccatctctagcaatctcaacctgtaagagtcaaaaatattttaagatctgctgtgtgctttcctcaaaaggaaggaaactgcaggcatcccactcctcccttccagtaaaggagaccaacagacaaaaaatatagaatgcttctaggatttttttttaaggactaatctaaatataagaaactatttccttaaaaatcctgannnnnnnnnnnnnnnaccaaagacacagccaaagacatctaaatagccagagtttaaaaaaataaaataaaataaaaacacacacacaaaagtgtatttgaaaacaagactgaaagctttnnnnnnnnnnnnnnnnnnnnnnnnnnnnnnnnnnnnnnnnnnnnnnnnnnnnnnnnnnnnnnnnnnnnnnnnnnnnnnnnnnnnnnnnnnnnnnnnnnnnnnnnnnnnnnnnnnnnnnnnnnnnnnnnnnnnnnnnnnnnnnnggttagaccccaaatcttatcccttagaccaattcataacataggacttaaattaaaccattcagtcttctaatgtagtggnnnnnnnnnnnnnnnnnnnnnnnnnnnnnnnnnnctcttttaaannnnnnnnnnnnnnnnnnnnnnnnnnnnaagtctctgggggtgggatccacgcatgagtatttttaagcttctcnnnngattccatgtgcagccagacctgtctcaattcacacagcactagagncagnnnnatactagc

SEQ ID NO: 6284 - DNA, 748 bp, Macaca Fascicularis
  misc_feature (1)...(748): n = A,T,C or G
cacttcccctctnnnnncaggtgaggggtccagacagctggccagggactggtcaagacagtcacgggagctctaggtgggcacaaccaacccctctcctgggaggtccctgacccactggggataggagcctgtgtccctggtgctaaacactcttcacctgggccgttgttggtgggggnnnnnnnnnnnnnnnnnnncaaggccagaagcaatannnnnnnnnnnnnnnnnnnnnnnnnnnnnnnnnnnnnnnnnnnnnnnnnnnnnnnnnctcctttttatttaaaaaaatatatatgcccnnnnnnnnnnnaatgaggggactgggacaccatcctcacttcccagggctgggggaagggggcaggatcatcccctcccaaggagatctgtgggggacccactgtnnnnnnnnnnnnnnnagcctgagttcttctcagtttgactagaactcaggcctggagcctgggtctaccaggctccttggggctctctggtctcaggccagctggggatgggtggctagannnnnnnnnnnnngccctgtggccacagttctgggagccttcaaccctggcnnnnnnnnnnnnngtctccacggtgcccttcacagagggcttggtggtggcagaatggccatgcccaggcgtgtgctgagaccactgacaactgctcgtgtataggcaccccacagccccagagtgtggggcacagcaggcatgcgagtgagaagagtgaaggggaa

SEQ ID NO: 6285 - DNA, 741 bp, Macaca Fascicularis
  misc_feature (1)...(741): n = A,T,C or G
ctaggtacattgannnnnnntatacatgannnnnnnnnnnnnnnatattttnngatagttaaaggttttttattgtnnnnnataacaagttatccaacaannnnnnnnnnnnnnnnnnnnnnnnnnnnnnnnnnnnnnnnnnnnnnnnnnnnnnnnnnntgcagttgtacagttccaaaaataattaatttttaagggaatttttcaagacaaaaggcaaatattttatttcaaacctagaagcaaattcattccaagaactgaatatagtagtaaaacataaagactattgcaataaaaagtttccaggccagtgacttgtttaattacattcacatttttacattcactttgcctttcaaagcaggagtattttataaaactgaaagaatactttaaattgtcaagctggtgcttaacagtatatgtaaaatttaagtttatttcatttccaaggaaaggaccctgaagggagggcacagggagcttcctaggtctgttgataaactaactgatgctttgtcaagtcttccaagttttcactgtaaataatacacctaacaatgtaattttgctgttttctaatagggaatgaatgaatatattaatgtattacatttgtttcatgataaaacagttttcaccaatactgtgaaatcctttctctcctttctagccttgcaaaataccctactaaataaatccttttagacatggagtgcaggtggacactgtgtgaac

SEQ ID NO: 6286 - DNA, 239 bp, Macaca Fascicularis
gctccgtgaaaatgttcctgaggggccgccctgtgcccatgctgatcccagatgagctggcacccacctacagcctggacacacgctcggagctgccttcttgccggctcaagctggactgggtgtggctccagctatggctactgtggccgagactgccgggccagtctttatttgctgcccaccggggaaatattgtattttgtggcctccgtggctgtgctatacaacgtggatga

SEQ ID NO: 6287 - DNA, 702 bp, Macaca Fascicularis
  misc_feature (1)...(702): n = A,T,C or G
tttgtggtgcccacaaatggtcaaaatagtaacatcgaagatcactgaccacagatcactataacagaaataataataataaaaatttgaaatattgcaggaattaccaaaatgtgacacagggacacaaaatgagcacatgactttgggatggcgttaacggacttgtttgatggagggttgccataaacctttaatttgtaaaaaatgcagtatctgcaaagtacagtaaagcaaaatgcaataaaatgaggtatgcctgtgtttatgcttgctagtactttatactattttacctttcgcacagttgataaaaccacctatctgccactcttttgacattcattgaaatctttagtagtgttaacaaacttggcaaacttcataatgcctccatccgtccagtagttactgaatgcctactatctctaggtgctctgcttcacactgggggaacatgacattgtccttgctcccacatttttcacaagttcctaaaggatacagacaataagtgaatgcaacagcagtagcttaactcctgggagtcagcactcatttctgtttggataggttaggaagagcttcagagaatgttgaatttaggtatgtgaaacagaacagtgtattcaggggctttatgtagtctagtgtgaacagaatctgagaaatgagactggggctcnnnttaannntaggtga

SEQ ID NO: 6288 - DNA, 1461 bp, Macaca Fascicularis
atggtagctgggatgttagggctcagggaagaaaagtcagaagaccaggatctccagggcctcaaggacaaacccctcaagtttaaaaaggtgaagaaagataagaaagaagacaaagagggcaagcatgagccagtgcagccgtcagcccaccactctgctgagcccgcagaggcaggcaaagcggagacatcagaagggtcggggtctgccccggctgtgccggaagcttctgcctcccccaaacagcggcgctccatcatccgtgaccggggacccatgtatgatgaccccaccctgcctgaaggctggacacggaagcttaagcaaaggaaatctggccgctctgctgggaagtatgatgtgtatttgatcaatccccagggaaaagcctttcgctctaaagtggagttgattgcgtacttcgaaaaggtaggcgacacatccctggaccctaatgattttgacttcacggtaactgggagagggagcccctcccggcgagagcagaaaccacctaagaagcccaaatctcccaaagctccaggaactggcagaggccggggacgccccaaagggagcggcaccacgagacccaaggcggccacgtcagagggtgtgcaggtgaaaagggtcctggagaaaagtcctgggaagctccttgtcaagatgccttttcaaacttcgccagggggcaaggctgaggggggtggggccaccacatccacccaggtcatggtgatcaaacgccccggcaggaagcgaaaagctgaggccgaccctcaggccattcccaagaaacggggccgaaagccagggagtgtggtggcagccgctgccgccgaggccaaaaagaaagccgtgaaggagtcttctatccgatctgtgcaggagaccgtactccccatcaagaagcgcaagacccgggagacggtcagcatcgaggtcaaggaagtggtgaagcccctgctggtgtccaccctcggtgagaagagcgggaagggactgaagacctgtaagagccctgggcggaaaagcaaggagagcagccccaaggggcgcagcagcagcgcctcctcgccccccaagaaggagcaccaccaccatcaccaccactcagagtccccaaaggcccccgtgccactgctcccacccctgcccccacctccacctgagcccgagagctccgaggaccccaccagcccccctgagccccaggacttgagcagcagcgtctgcaaagaggagaagatgcccagaggaggctcactggagagcgacggctgccccaaggagccagctaagactcagcccgcggtcgccaccgccgccacggccgcagaaaagtacaaacaccgaggggagggagagcgcaaagacattgtttcatcctccatgccaaggccaaacagagaggagcctgtggacagccggacgcccgtgaccgagagagttagctga

SEQ ID NO: 6289 - DNA, 725 bp, Macaca Fascicularis
  misc_feature (1)...(725): n = A,T,C or G
gtagctctccccaccatcagccttaccaatcccttaagattcaagggattattgcacccatcattacccaaccactaaacagaaaggccaccttcactctttgaaaaagacaagctgtgtctagaaacactgcttttaagaggagcacatttnnnnnnnnnnnnnnncccccttcactatttcaaaatggtttcgaaaatggggtctnnnnnnnnnnnnnnnnnnnnnnnnnnnnnnnntttgtaagaggtcttgtatttgaatggccccttaaggatttatgtgaaacagaatgaagtcctgtctctgtgagagaacgtgcctcctcactcatttgtctctgnnnnnnnnnnnnnnnnnnnnnnnnnnaacatatttactatgttcttggcaaagtataatacccttgaagaaagaaatccgttttctattgtgcnnnnnnnnnnnnnnngaagccagtaaactagatactgtacatctagatattgtacctagaaaaaaatatcattggttctatctctttttgtatctattgtgccagttcggaaggtttataatcccttctcagtatacactgactagtgcacgtgtgaaatagtatcccacgggagatgccgctccatgtctgaggccacctgccctgtgtggaggacaccaccatcagttagcgccaccgtttttacagtgacttcggagctgctagacnngttttctgtgttggtaaa

SEQ ID NO: 6290 - DNA, 601 bp, Macaca Fascicularis
  misc_feature (1)...(601): n = A,T,C or G
aagcagtttgcaccttataaagagaaaaaaaaaaaaaaaagcgggtggtgtgtctcaggacgaaaggaggctcttctcattcagctaaattcacatttgccctccctcccccggcccccgccatatgctcctgctattattttggtaatgctctgatgcaacattgcaactttatgaaatctttgtatgaaaacaaaaagactgcaaaaaatacactttcaaaagaaaccattcattgcatgtttattatgcaagtttaaatgaacaaagaaaaccttcggaaacaagttgatcaacgtgagagaaatttcatgataattatattcatagtaataaagtgtcgtgggcttaattgtatatctggagccagtgtcatccaccaacaatgtgatacgttatgaacttgacagtagttttgggcttttctctttctttcagccacctgtgatcagttttgttgattaaggacttcttgtcaggtcattttttaatattaaagctgaagcaatatccattcagggatttcatcagttgcatcacaaatgataatatacatcactccatttttttgcattttgagtcnttttaaatgtaatggtaa

SEQ ID NO: 6291 - DNA, 1815 bp, Macaca Fascicularis
gagctatatagatggtaggacttagaggatgtagggccctacatgttagggcttcttagttgtagcgaagagcaattggtcttgtacatttagctttttcacgtttacttttgagttctggctctagaaatgtacaaccccattttttgaattataggttttaagatgttacttgctcttaatacttcttaaggtaacagccttgatcactacttttactttcgatgaaataacttaatgagctgtgaagaaaaaattatcagagtttaagggagagagaaaattttgtgaaaatgtccttgaggcttctgtctcctttatgaaaatgtcttcaaagtttccatcaccacctctaccaatttttcttccaccggaaccagtggacttaggttccataacaagctcctcttgttcactgaatgagctagacaatatttcccaccttttaaggaaaatatcaactgatatcaatgaaattaaaggaatgaaagcagctattttgacagtggaagcaaatctttttgatctaaatgttagagtgtcccagaatgaagcaaaaatttcatctttggaggttaaaatgaatgaatattcaacaacatctgaatgcaacagacagtttgaagatcaagaagaagatactgaatcgcagtcaagaactactgatgtaaaaataatcggcttccttagaaacgttgagaaaggaactcaacagaggcaattattatcccgactgcaaatcgacccagtaatggcagaaactctgcagatgagtcaagattactatgacatggaatccatggtccatgcagacacaagatcatttattctgaagaagccaaagctgtctgaggaaatagtagtggcaccaaaccaagagtcggggatgaagactgcagattcccttcgggtactttcaggacaccttatgcagacacgagatcttgtacaaccagataaacctgcaagtcccaagtttatagtgacgctggatggtgtccccagccccccaggatacatgtcagatcaagaggaggacatgtgctttgaaggaatgaaacccgtaaaccaaactgcagcctcaaacaagggactcagaggtctcctccacccacagcagttgcacttgctgagcaggcagcttgaggacccaaatggtagcttttccaacgctgagatgagtgaactgagtgtggcacagaaaccagaaaaacttttggagcgctgcaagtactggcctgcttgtaaaaatggggatgagtgtgcctaccatcaccccatctcaccctgcaaagccttccccaattgtaaatttgctgaaaaatgtttgtttgttcacccgaattgtaaatatgatgcaaagtgtactaaaccagattgtcctttcactcatgtgagtagaagaattccagtactgtctccaaaaccagcagttgcaccgccagcaccaccttccagcagtcagctctgccgttacttccctgcttgtaagaagatggaatgtcccttctatcatccaaaacactgtaggtttaacactcagtgtacaagaccggactgcacattctaccatcccaccattaatgttccaccacgacatgccttgaaatggattcgacctcaaaccagcgaatagcacccagtcctgcctggcagaagatcatgcagtttggaagtttccatgtactgatgaaagacactctacagaacttgtcaaatctttgaaacttggaatatattgctttcataatatgaagtttcattgcctaaaaaaaaaaaaaaaaaaaaaaaaaaaaaaaaaaaaaaaaaaaaaag

SEQ ID NO: 6292 - DNA, 240 bp, Macaca Fascicularis
aaaggcacaataaagttccatcctctagactctcggcaataaacctaacaataaacgttatttaacacaaaccacatccatatcctctgttcatttgattttggaaaaagtctagcatatccagtagtttcagggaattcattttaacttttaagaattctgatatatttaatttataaatatcagactgatagaattttggaaaactataagaaatgctttgttaatgtgtgtattcct

SEQ ID NO: 6293 - DNA, 917 bp, Macaca Fascicularis
atttgcaatggggaaaaagaaggcagtttagggccacccagaagaaaatattttttcccctgattttttttttttttttaatttggtatttccctgtgtgggtttgcctcattttacaaatagctgcctatgtcaagttgtgggtatgtgatttaaatattttaatttgaatcacattttacatagtctaggaaactgacaaaggaatcctatagagaattgttttctaaagtgaataactgcttctctatctacccgcccccctcattcttcttttctgtgcgtgttttttggggaatgttaggggataaatctggtttggcttaactaaaacgcagcctttcaaatccaaaacagagagcttaggtacccaacattctatagaatgtgttatttcctcaagaggttgctaggaacagttatgtagatctaccaggtgcagggaagcactctacatcctcacccaggtcctgtatccctgcaagactgcattggaaagactgaagagaggcggaatttcaccatgttggccaagctggtcctgaactcctgacatcaggtgatccacccacttcagcctttaaaagtgctgggattacaggcatgagccaccacgcccagctgatgataatctttactcgtaatattatgaaacaaatatatgttattcatatattgttttactgtaaatattttggttaacttttgattttatgctagtctatcataaatcttcaactaactgtgttatttaaaggatacacacagtaaaattcttgatccaaagaggaataaatgattttattttgttatgttttagtcttcatgtttgttttaactcttcttcctaatcacattatatacttttaaaaaataaagattctagcaacattaaaaaaaaaaaaaaaaaaaaaaaa

SEQ ID NO: 6294 - DNA, 1907 bp, Macaca Fascicularis
aaaaaccacctgatcccataaaacattcatcctcccggcggcccgctctgcgagcgccccgccagtccgcgccgccgccgccctagtcctgcgcgccctgcgcgccccgcgcgcccgcggcccgagcccagcccgaagcgactttcagtccccgacgcgccccgcccaacccctacgatgaagagggcatccgctggagggagccggctgctggcatgggtgctgtggctgcaggcctggcgggtggcagccccgtgcccaggcgcctgtgtatgctacaatgagcccaaggtgacaacaagctgcccccagcagggccttcaggctgtgcccgcgggcatacctgcctccagccagcgcatcttcctgcacggcaaccgcatctcacatgtgccagctgccagcttccgtgcctgccgcaacctcaccatcctgtggctgcactcaaatgtgctggcccgaattgacgcggccgcctttgctggcctggccctcctggagcagctggacctcagtgacaatgcacagctccggtctgtggaccctgccaccttccacggcctgggccgcctgcacacgctgcacctggaccgctgcggcctgcaggagctgggtccaggcctgttccgcggcctggctgccctgcagtacctctacctgcaggacaacgcactgcaggcgctgcctgatgacaccttccgcgacctgggcaacctcacacacctcttcctgcacggcaaccgcatctccagcgtgcccgagcgcgccttccgcggcctgcacagcctcgaccgtctcctgctgcaccagaaccgcgtggcccacgtgcatccacacgcctttcgtgaccttggccgcctcatgacactctatctgtttcgcaacaatctatcagcgctgcccgccgaggccctggcacccctgcgtgccctgcagtacctgaggctcaacgacaacccctgggtgtgtgactgccgggcacgcccgctctgggcctggctgcagaagttccgcggctcctcctccgaggtgccctgcagcctccctcaacgcctggctggtcgtgacctgaaacgcctagctgccaatgacctgcagggctgcgctgtggccactggcccttgccatcccatctggactggcagggccaccgacgaggagctgctggggcttcccaagtgctgccagccagacgccgctgacaaggcctcggtactagagcctgggagaccggcttcagcaggcaatgcgctgaagggacgcgtgccgcctggtgacagccccccaggcaacggctctggcccacggcacatcaatgactccccctttgggactctgcctggctctgctgagcccccgctcaccgcagtgcggcccgagggctctgagccaccagggttccccacctcaggccctcgccggaggccaggctgttcccgaaagaaccgcacccgcagccactgccgtctgggccaggcaggcagcgggggtggcgggactggtgactcagagggctcaggtgccctgcccagcctcgcctgcagcctcgcccccctgggcctggcactggtgctctggacagtgctggggccctgctgacccccagcggacacaagagcgtgttcagcagccaggtgtttgtacatacggggtctctctccacgccgccagccagccgggtggccgacccgtggggcaggccaggccaggccctccctgacggactgcctcccgcccgccacccccatctccaccccatcatgtttacagggttcggcggcagcgtttgttccagaacgccgcctcccacccagatcgcggtatatagagatatgcattttattttacttgtgtaaaaatatcggacgacgtggaataaagagctcttttcttaaaaaaaaaaaaaa

SEQ ID NO: 6295 - DNA, 657 bp, Macaca Fascicularis
gtatcatgacaaagactgagtaaattgtgcatctggtggtatcagaaatgtgttatcacccagaagaaaatagtggtgtgatttggggaccttttcttttcttttttcttttttttttttggacaaggggcagtggttgttttctgttctttctggctatgcatttgaaaattttgatgttttaaggatgcttgtatataatgcgtgcataccacttttgttcttggtttgtaaattaacttttataaactttaccttttttatatataaacaaaaccaagtttctaaaggctacctttgtatttctctcctgtacctcttgagccttgaactttgacctctgcagcaataaagcagcgtttgtatgacacatgcaaggtcatttttttttaagaaaaaggatgcacagagttgttacatttttaagtgctgcatttaaaagatacagttactcagaattctctagtttgattaaattcttgcaaagtatccctactgtaatttgtgatacaatgctgtgccctaaagtgtatttttttactaatagacaatttattatggcacatcagcacgatttctgtttagataatacaccacgtatgttctgttaatcattaggtgtgcactgaatttcttttgccgttattaaaaatctca

SEQ ID NO: 6296 - DNA, 645 bp, Macaca Fascicularis
aggcccgagcaatccgagtcctcaatgagagcccccccagccttgtggcaccgctgaccagcatcttccagctgcaggatgcagacaggagctgcctgctggtgcatgtccaccgcctccaccaggagggcaggttcagagaagcagtcatgctgggcacgacgttgaagctgcagccagaacttgatgttgaaaagatgagcatcccactgctcctccaggacaaggtggccctcgtggagcgctacgtggctggcttcccggacctccagaggaggctactggcccttatggattcctggtgccagcccggctttgacatcaaggacgttgccaggtgagttccgcggggcactggcagctggcaccagatggcatcctgggagccctggttagggaagggagtatgagggggcagcaggcatgtgggatgtgagctctccccaggaggttctggtgtttgggtcacagctaccatgtgactgcagccggagcagctgcctctggagaggagaggctggggctggcagcagcacagccctcttctcccaagtgaaaagagttaactgctcttagaagaacaaaaataattctccacagtggctcttcttatacagacacggccaccatactgcttatttgttc

SEQ ID NO: 6297 - DNA, 1788 bp, Macaca Fascicularis
gaattcttgaaaacaacaaagcaatcatttgatttaagtgtaaaagctcagtataagaaaaacacacacaggcattccatcacaaatcctttggctgtgctttatgagtttaccagtcagaacatcaaatcctttgacaagcattttgaaaaagccagaaacaatgcattaggttttgtcaccaaatcctataatgatgcaaaaattaagtttgataagtacaaagctgaaaaatctcatgacgagctccccaggacctttcaaattcctggatacactgttccagttgtcaatgttgaagtgtctccattcactgtagagatgtcggcatttggctatgggattccaaaagcagtcagcatgcctagtttcagcatcctaggttctaacatccgtgtgccttcatacacattaatcctgccatccttagaactgccagtccttcaagtccctagaaatctcaagctttctcttccagatttcaaggaattgtgtaccataagccatatttttattcctgccatgggcaatattacctttgatttctcctttaaatcaagtgtcatctcactgaataccaatgctgaagtttttaaccaatcagatattgttgctcatctcctttcttcatcttcatctgtcattgatgtactgcagtacaaattagagggcaccacaagattgacaagaaaaaggggattgaagttagccacagctctgtctctgagcaacaaatttgtggagggtagtcataacagtactgtgagcttaaccaagaaaaatatggaagcgtcagtggcaacaaccgcaaaagtccaaattccaattttgagaattaatttcaagcaagaacttaatggaaataccaagtcaaaacctactgtctcttcctccatggaatttaagtatgatttcaattcttcaatgctgtactctactgctaaaggggcagttgaccataagctgatcttggaaagcctcacctcttacttttccattgagtcatctaccaaaggggatgtcaagggttcggttctttcatgggattactcaggaactattgccagtgaggccaacacttacttgaattccaaaagcacacggtcttcagtgaagctgcaaggcacttccaaaattgatgatatctggaaccttgacgtaaaagaaaattttgctggagaagccactctccaacgcatatattccctctgggagcacagtatgaaaaatcacttaaagctagagggcctctttttcacaaatggagaacatacaagcaaagccaccctggaactctctccatgggaaatgtcagcttttgttcaggtccatgcaagtcagcccaattccttccttgatatccccgaccttggccaggaagtggccctgaatgctaacactaagaaccagaagatcagatggaaaaatgaagtccgggttcattctgggtctttccagaaccatgttgagctttccaatgaccaagaaaaggcacaccttgacattgcaggatccttagaaggacacctaaggttcctcaaaaatatcatcctaccagtctatggcaagagcttatgggacttcctaaagctggatgtaaccaccagcattggtaggaggcagcatcttcgtgtttcaactgcctttgtgtacaccaaaaaccccaatggctattcattctccatccctgtaaaagttttggctgatgaattcattattcctggactgaaactaaatgatctaaattcagttcttgtcatgcctacattccatgtcccatttacagat

SEQ ID NO: 6298 - DNA, 1735 bp, Macaca Fascicularis
  misc_feature (1)...(1735): n = A,T,C or G
ttagaccaatgttaacattcattttcaatgagaagatctcagggaagcgttttgatggcttgggagaagtaaaggaacctcgggcagagaccatatctgggcctaaggcagttgtagtccgagctgaccctgtgtgactggaaggccacacgagtatgcaagggaattgaaactgaaagaaaaagtcctgaaggcaaatattactaccctcccaaactgaacctacaccaaacctaaacctcttgaattttcaaaggcgaatactgtcatgagcatataaatgacagagttgggtcacttgcatgataagggggcagctgggcagtgacggtacaagcagaaatcccactgggctgaaaatttacaggaaaaccatgagcttttgtttggttcttcccccaaattgtctaagtggtcacttaacctctctagtactgtcctgacttgttaactctcaaagaacatgattctttgtgtttagcatgctttctgatggttaatcagtcagcaaatgaaggaaatgtcaagcactgaagataaaaagaaatattatgttaatggtggtggtttgaagtctaacagttaaaggattaattaaagatgtgtttatagaagctggctgtctttgtaatcactggtgggtctcagtatctacaaaacaggcaccccccctccttttctcttgctagccttttttcatttcttaatgcaagattttcctctgtatgttactttggtgtcttgttccatgcagaagggataagatgatctaataataaataagttttggtggtattataaaagataatgaattaaccatcttaaaatgcttcagaaattcttagatgaatgcaaattattgtttgggggacctgccaaatcttgaacatctcattgaagtgaagagagagaaaagaggtatcttcatatgaaagaatggttgatggttattgttttaagatatttccatagctaatgggtatttattgtaaatttctactttaataaatcttttccttctttctacaaatccactacgtaatgacttatgcagtgtgccttagggtattctatcctgggccaaggcaaactattttcctcaggactgttatctattataacaagtaaagtcatagcagttgtctagagaggacccttgtaagaaatgacaatatttttgctgtgtctgaaaggtttatcaagcccagtaacaggaatgtcagctaacattcattgtctctgaacttgtatttggaatacaattaagaaatagataaacaaggaaaacatactgatttggggttccccaaaggataaagtttcctcccctcacaaaataatctgatgtgactcattcagataataagtatttggcctttaaaaaaagctttattatatacaaggtatatgacatgatgttttgatacatatatatatatagattagtgcagtcggccnnnnnnnnnnnnnnnnnnnnnnnnnnnnnnnnnnnnnnnnnnnnnnnnnnnnnnnnncacaaggtcaggagatcgagaccacannnnnnnnnnnnnnnnnnnnnnnnnnnnnnnnnnnnnnnnnnnnnnnnnnnnnnnnnnnnnnnnnnnnnnnnnnnnnnnnnnnnnnnnnnnnnnnnnnnnnnnnnnnnnnnnnnnnnnnnnnnnnnnnnnnnnnnnnnnnnnnnnnnnnnnnnnnnnnnnnnnnnnnnnnnnnnnnnnnnncaaaaaaaaaaaaa

SEQ ID NO: 6299 - DNA, 724 bp, Macaca Fascicularis
  misc_feature (1)...(724): n = A,T,C or G
cannnagnnnagagtgcagggcannnnnnnnnnnnnnngcaannnntgtcnctcgggttcaagcgattcttgtgnnncagcctccnnnnnnnnnnnnnnnagaggtgtgcaccaccgcatccagctaatttttgtatttttcatagagacgggggtctcaccatgttggccaggctggtctcaaactcggacctcaggtgnnnnnnnnnnnnnnnnnnnnnnnnnnnnnnnnnnnnnnnnnnnnnnnngtggtgcctggccaaacgttcttattacaaatatttcattggactaaagctcacaactgttactatgcatcaggaatttacacagtcatttctcctttgtgtcattctcctatttgataatgtatagtgactatctctttatgggttatataccagtttcttggccagaattcaagatctgcccctaactaaccctacttctcccaataccctcacataccagccttatagcactcatcccctactagtaacnnnnnnnnnnnnnnnnnnnnnnnatgtatcaagcaaacaaaatttaatgagcactactataaggtaccataaactataaaagaggacagttttgcccttgttgctttcagttaaattattgtactactttttgcttaatttctagatttttttcgcatatatataatgtatccataggtaaagtgcgcagaaatatcaaactacaaaaannttcgcccactacc

SEQ ID NO: 6300 - DNA, 769 bp, Macaca Fascicularis
ctaaatagtaggtcaaccaaaccagattgtaagacaaggacatgcaatcctttaaattgtaccatcttaaagccagagctacctttttggtctataggacagacagcactattatgagttgataaaggagcaggccttggagttccactactaattgtcaaaaagactagaaggactcaaatgcatccaaccccacaattctgggtccataagtcattctataagcattttaatcagccagtgcccaagcttcttccatcaaccaaaaacttatttgctcagctagctgaaaacatagctggcagcttaggaatttcctcatgttatgtatatggaggaactaatatgggcgaccagtggccatgggaggcaaaggaactaatgtggccatgggaggcaaaggaattaatgtggccatgggaggcaaaggaattaatgcagccgtgggaggcaaaggaattaatgccacaagataacttcacttcgcctaaccctgccagtaaatcaacagcctcagcccgtgtttggttgttcaaagcctccataattggaaagtactgtatcgcctgatggggaaaggctttcacagaggcagtaggagaaacaacctgcctaaggcaacagcattatgatgagactaaaaacaaaactctatggagacacacccagaatgactcctacttaccagatccaaacctttctcttggttctctactctaagccactcttggcatcagctagaggctccagcttcttgaaaggcaccctc

SEQ ID NO: 6301 - DNA, 504 bp, Macaca Fascicularis
  misc_feature (1)...(504): n = A,T,C or G
agagagagaggttgagcagttgtgtactaattactagactattactgttattattcagctgtgaaaaagagaattcagagagacccaaatataatccacctcattgacatctctctctgtctctgtctctccttgtttctgtcccctcctacccacattctctctttccctctctctccatctctttgtttctttttctttctctatatccctctacctctctttatgtagctgtctctctccccagtacctctaagtatatatttttctagcgtcatatggcttgctttcattacccacatcaacattctaattcgcttttattgattttctcatttagttagtataaagataaggactggccacttatgnnnnnnnnnnnnnnnnnnnnnnnnnnnnnnnnnnnnnnnnnnnnnnnnnnnnnnnnnnnnnnnnnnnnnnnnnnnnnnnnnnnnnnnnnnnnnnnnnnnnnnnnnnnnnnnnnnttagccaggcgtggtggtg

SEQ ID NO: 6302 - DNA, 690 bp, Macaca Fascicularis
  misc_feature (1)...(690): n = A,T,C or G
atcatgtgcnggtctctctgttttatttttttaggtgttggtgatgcagcagtgatcaacatcgatacaaatgcttttccttatggaattgacattgtagtggtgaaggcagacagtagaccaaataaatacttaaaatatatagtgtgctagatagtgaaaagttctttagagaaaaaaataaaagatgaaggaggaggcagggagcatatggggagggaagggtttgcttgcaagttcacaacgggtagtggggtaatccctaatgagaagatgatgttcccctattgagcagacggtgagaaccaaatgaatccctcaggacaggctgccaaggagtgcaaacagcacatgcaaacgcccgagggctgcagtctgctggatctgttggagaatggggaaaatgtgcaaagcaaatgggcaagaaatgagggcaaannnnnnnnnnnnnnnnnnnnnnnnnnnnnnnnnnnnnnnnnnnnnnnnnnnnnnnnnnnnnnnnnnnnnnnnnnnnnnnnnnnnnnnnnnnnnnnnnnnnnnnnnnnnnnnnnnnnnnnnnnnnnnnnnnnnnnnnnnnnnnnnnnnntgggcgcctgtaatcccagctactcaggaggctgaggcaggagaatcgcttgaatccgtgaggtgaaggttgctgtgagccgagatcgcgctattacactccag

SEQ ID NO: 6303 - DNA, 1825 bp, Macaca Fascicularis
aatccttagattttgttcagatatacctacagttttgctaatagaatgcagtcctgctattcctttttacttttatgtacttaccacttctaaccatctcattgtcttcccatcacgcagtacattttgaaatgttgggcggtcctgatggtattacatccacaaggacagcatgggaagggtaaacaattgaaatagatagtttatgttgggagcttaattaggccatgattaatcgtctctcaaagcagagactgtcttatctatagaaggagcaaccactgagaggtggaactcccaagggaaaaagcgcgcaggtttccagcccacaagaaatggtaagtattttactttctttgactttttccctgcctgtcaagatgtccaaatgtacccagaggctgtccacattttcagttttgtcaaaggttatctgatttaatttcgtaagaaacatttaaatcagtggttatgtaaattatttattttgttttatttttaggaaagagcattattttacaacttcaaaaagcaatatgagttagtagttaaaattatgacccatattttttcaggaagacttgcttgaccaaaattgtcttatctatctgttatcaatgcagtcattcatagctgcttcagtggttcacattttttagaatcatgcttctctagcctttttttcaaagagttggagagttttccccttgggaataggcaatcttaatctttcctttccctaatttcagcctttgcagttcttcgatggctactcctgttatatacaactacccttagtgatgctcactattacctcttggcaatagggaaaagtcttatgctataaaatgattgctcaagacatgttttctgaaagcgaactcttcataggagaaatcaaatataatgacattccacccaggtaacagtcactaggacatagtatggaattttttataaataagcgagaccaattaaaccctacagttatacactacaacagtgttgtttattttatacctcttgaatcatatttattatgcttcagtgcccatcgacctagccttctattctatcaatatatgtgggtgtggattgggaatgagaaccaacattcacatccctgatgctcatgagagtttctacaaaggtggaatatgtaaacctagaaaaatgtaatatatagcttccatgcctctaagaaatatgagtgggtcaaatgcttctctgtgggtattatttttctgatatgcaaatggtagaaaagttcacattaatagccaaacagaccaagagagaaattagccaacttcagtgttaatctttctactttgacagttaataacatagcccagccctcctaatttgttgactgcaaagacagatatacctagttaattgctagaataattatacaaccctccatactggaaattgcttattcaccgagaagaatcctgcccagaaattttcagagacatttccttacattcccaacttcctttaatttacacaactttttatgagaccccttgaagccacatagtaaaacaagagatgaattatctaaggagaacttttggccctgcctctaatgtgaagatctgatacttgattctgtttcccattctttccaaacagaaagaacaagttcaattaaggtaaccaactatgtaaccactttttgacataattccacctaaaaaagaaagagtgaactaaattgtacaaacattaaaaacagtgatatgatccagatggctagttttgagaaaaataatattttctgtagataccttgtctggaaaaaaaagaaaaaaaaaaa

SEQ ID NO: 6304 - DNA, 762 bp, Macaca Fascicularis
taggagcatggttagactcatgtgaaagggggctggatgcagttctctaaaaggctgcacttttcctggtgcaatccacgtgacccactttctcacctgggggacattggttcaggggttggtaacatcttggggagagtatcttaacacagtttcttgacagctgctctggaacttatttctgccccaagttttgccacactgagactttgagtagctcctggtggactcagccctgttgaactcagagaggggcctcctctcactgatgcaaagctttaaggcttctctgactgttctgaaaactcttcatattcttgtcaagtctaaagagactgaagaaaagatttaaatactaatacaaatcagtagataatttctgtaggttctgctggggaaacataaactgtttggtgtttaaatttaagtgtagaaattgtagaatgcggaattagcacaggcccttcctgactttctgtttcacttgatcatttagcccagaccacccaggatgttttccaaaatgtttcacaggcgtgtcccactggatccatttgtccttgtcacttggagaaaggccagtccctgtgacggggcagccctctctgtttcttggtcagctcctgtgattcctgggacctcttccggtcggccctgcccgctgttctggggtcgactgccacgacttttgattcaagaagcttcctccaggcgggagcggctatttttcctaaatgagaattgttacattgcaaattgtga

SEQ ID NO: 6305 - DNA, 736 bp, Macaca Fascicularis
  misc_feature (1)...(736): n = A,T,C or G
acatcaccgcaannnnnnntctgaggaaacagctgcagtgcaagancttccggtggtacctggtcagcgtgtacccagagatgaggatgtactcagacatcattgcctacggagnnnnnnnnnnnnnnnnnnnnnntgatttgtgtcttgaccaggggccagatacagagaatgtccccatcatgtacatatgccatgggatgacgcctcagaacgtgtactacacgagcannnnnnnnnnnnnnntgggcatcctgagccccannnnnnnnnnnnnnnnnnnnnnnnnnnnnnnnnnnnnnnnnnnnnnnnnnnnnnnnnnnnnnnnnnnnnnnnnnnaagccaagaggatgaagcttcactggcagttctctcagggaggagccatccnnnnnnnnnnnnnnnnnnnnnnnnnnnngctgcaggagaannnnnnnnnnnnnnnnnnnnnnnnnnnnnnnnnnnnggagtgctcgggccagcactggannnnnnnnnnnnnnntgcggagcctggcgtcctgacccacttgggccacttccggctgcctctttgctactgtgtagcannnnnnnnnnnnnnnnnnnnngtccgtgtggggttggagtcaggggaaccaggttagtgggcccccaagaagagctttttatttccttttcaattttcgtggagtttatagaaagacgctaattggtgggtgatggtatgnnatcnnnnnnattnnnnnnnntaaata

SEQ ID NO: 6306 - DNA, 673 bp, Macaca Fascicularis
  misc_feature (1)...(673): n = A,T,C or G
gactggcggaaaaaagnnnntttgtctcacctgtgaaaaatcagggtgnnngcggcagttgctggactttctccaccacaggggccctggagtctnnnnnnnnnnnnnnnnnnnnnnnnnnnnnnnccttggctgaacagcagctggtggactgcgcccaggacttcaacaatcacggctgccaagggggnnnnnnnnnnnnnnnnnnnnagtacatcctgtacaacaaggggatcatgggtgaagacacctacccctaccagggcaagnnnnnnnnnnnnnnnnnnnnnnnnggaannnnnnnnnnntttgtcaaggatgtagccaacatcacaatctatgatgaagaagcgatggtagaggctgtggccctctacaaccctgtgagctttgcctnnnnnnnnnnnnnnnnnnnnnnnnnnnnnnnnaacgggcatctactccaggcctctgctaatcagcattctactctctgcttctatgagttcaactttttaagattccacatataagtgaagatcatgcggtnnnnnnnnnnnnnnnnnnnnnnnnnnnnnnnnnnnnnnnnnnnnnnnnnnnncatccatgttatcatgatggcaggatttcctttttaaagattgtatagtattccactgtgtatatatacattttctttagtaattgttcttag

SEQ ID NO: 6307 - DNA, 2231 bp, Macaca Fascicularis
tactttcctcctcctccgccccacatctccctccttcctcccttccccaacccctccacccaccaagtagcgagtcattcaatctgtacacctcctgggctgggaatcgcaattgcgaagttgggaggcggggtgacggcgtttgagaagggccagggcgaccggcagtgtgcacagggactgtgtcgggcttggacctcacctgatcctttctcttagagcgacccttcctctgctcccagtctcctctctctgccacttgtgcgctgcttccgcgcactcgcggctccctagcggcaggaggaggaaggagcacagcgggtggagagagtgcgccagggagaggtaaccccttcgggagcccggggaatcccggtcgccaccaggggcagtgccaccgccctcgcgggaccaacgcttccggcgtgtccccaactttgtggcgccctcaggccgcggcgactgggatagagatgccttccagcggcagagcgctgctggactcgccgctggacagcggctccctgacctccctggactctagtgtcttctgcagcgagggtgaaggggagcccttggcgctcggggactgcttcacggtcaatgtgggcggcagccgcttcgtgctctcgcagcaggcgctgtcctgcttcccgcacacgcgccttggcaagctggccgtggtggtggcttcctaccgccgccctggggccctggccgccgtgcccagccctctggagctttgcgacgatgccaacccggtggacaacgagtacttcttcgaccgcagctcgcaggcgttccgctatgtcctgcactactaccgcaccggccgcctgcatgtcatggagcagctgtgcgcgctctccttcctgcaggagatccagtactggggcatcgatgagctcagcatcgattcctgctgcagggacagatacttcagaagaaaagagctgagtgaaactttagacttcaagaaggacacagaagaccaggaaagtcaacatgagagtgaacaggacttctcccaaggaccttgtcccactgttcgccagaagctctggaatatcctggagaaacctggatcttccacagctgcccgtatctttggggtcatctctattatcttcgtggtggtgtccatcattaacatggccctgatgtcagctgagttaagctggctggacctgcagctgctggaaatcctggagtatgtgtgcattagctggttcaccggggaatttgtcctccgcttcctgtgtgtgcgggacaggtgtcgcttcctaagaaaggtgcccaacatcatagacctccttgccatcttgcccttctacatcactcttctggtagagagcctaagtgggagccagaccacgcaggagctggagaacgttgggcgcattgtccaggttttgaggctgctcagagctctgcgcatgctaaagctgggcagacattccacaggattacgctcccttgggatgacaatcacccagtgttatgaagaagttggcctactgctcctatttctatccgtgggaatctctatattttcaactgtagaatactttgctgagcaaagcattcctgacacaaccttcacaagtgtcccttgcgcatggtggtgggccaccacctctatgactaccgtgggatatggggacattagaccagacaccaccacaggcaaaatcgtggccttcatgtgtatattatcaggaattcttgtcttggccttgcctattgctattattaatgatcgcttctctgcttgctacttcaccttgaaactcaaggaagcagctgttagacagcgtgaagccctgaagaagcttaccaagaatatagccactgactcatatatcagtgttaacttgagagatgtctatgcccggagtatcatggagatgcttcgactgaaaggcagagaaagagcaagtaccaggagcagcgggggagatgatttctggttttgaattaattttcaatttatttacaaaagctatgtacaatttactaaaatgataaagcagtgatgtggatttctgtattctgatgatgagtctcttcggagtactgctcatcttaattaatttttgctgatacattgcttcgtctactagaacattccacatcacctataacaactgcacagtgttctgacacatctgagtatccaaaatagccaattaacacaatcaaatacaactgggccaatataaacatgtttg

SEQ ID NO: 6308 - DNA, 734 bp, Macaca Fascicularis
  misc_feature (1)...(734): n = A,T,C or G
gagccaggcgggcctggggcttnnnnnnnnnnnnnnnncagcatctggccgggctcttacctcatagacctgcaaggacagagaccccagggcctcgacctgatgccaccccaggccaaagccagagtgggagacccgttggccaggctgggcagggtgggaacaggcagagggacaagaggggaatggggaagtggagaggaaaagaagtcgagggacaggaaggaggaggctctaggaaggttctgggttggggatcannnnnnnnnagggagaaccaaggaagatgggcatggctggagaggaggaagaggaaggaacccagggtgtcagggcagtaggctgggnnnnnnnnnnnnnnnnnnnnggcaggacacagatacagtggcaagggcccagggctgggacgtgagagaaggcagcgaggcggtggagggagaagagaggactcaggtggaggtggggtgggccagctgtcagcatcccttagaggagaaacatggagagccggaggccagcggtcactnnnnnnnnnnnnnnnncctgtccagtggagacagcccccggcgctctctgttggcccaaggatgcccccagcacccctccatggcctttggccttcttcccattcatatttatttatttattgacttttatgaagtttccccttccatccgatccctactgcccatgttgtcctgaccatccctcccagccatccagctgtctgtctg

SEQ ID NO: 6309 - DNA, 1475 bp, Macaca Fascicularis
cattgtacagtgcgcacaccctcgctcgtaattgaggcgtgcttggggcagatgctttgtggtgtgggacaagaacagctgctaagtttatggaggagaaaggaagcaggatggtgcagcagggtaatcaggaagcagccgctgcccctgacacaatggctcagccttacgcttcggcccagtttgctcccccgcaaaacggtatccccgcggaatacacggcccctcatccccaccccgcgccagagtacacaggccagaccacggttcccgagcacacgttaaacctgtaccctcccgcccagacgcactccgagcagagcccggcggacacgaatgctcagaccgtctccggcaccgccacacagacagatgatgcagcaccaacggatggccagccccagacacaaccttctgaaaacacggaaaacaagtctcagcccaagcggctgcatgtctccaatatccccttcaggttccgggatccggacctcagacaaatgtttggtcaatttggtaaaatcttagatgttgaaattatttttaatgagcgaggctcaaagggatttggtttcgtaactttcgaaaatagtgccgatgcggacagggcgagggagaaattacacggcaccgtggtagagggccgtaaaatcgaggtaaataatgccacagcacgtgtaatgacaaataaaaagaccgtcaacccttatacaaatggctggaaattgaatccagttgtgggtgcggtctacagtccggaattctatgcaggcacggtcctgttgtgccaggccaaccaggagggatcttccatgtacagtgcccccagttcacttgtatatacttctgcaatgccaggcttcccgtatccagcagccaccgccgcggccgcctaccgaggggcgcacctgcgaggccgcggccgcaccgtgtacaacaccttcagggccgcagcgcccccgcccccgatcccggcctatggcggtgttgtttaccaggatggattttatggtgcagacatttatggtggttatgctgcataccgctacgcccagcctacccctgccacggccgctgcctacagtgacagaaatcagttcgtcttcgttgcagcagatgaaatttcttgtaacacctctgcagttacggacgagtttatgctgccgacccctaccaccacgcacttgctccagcccccacctacggcgttggtgccatgaatgcttttgcacctttgactgatgccaagactaggagccatgctgatgatgtgggtctcgttctttcttcattgcaggctagtatataccgagggggatacaaccgttttgctccatactaaatgacaaaaccataaaaaccttccaatgtggggagaaaggaagctttccgaggcctgagtattgcaatacatgcagtagtacatcattttagcaactctaaaaaaaaaaaaaaaaaaaaaaaaaaaaaaaaaa

SEQ ID NO: 6310 - DNA, 2182 bp, Macaca Fascicularis
  misc_feature (1)...(2182): n = A,T,C or G
gtccccatgggccaccataggccatggctgcacactgctgtcctctgggctggggtggccagcctgctcctccccccggccatgacccagcagctgagaggggccgggctgggcttcagcaactggaacaacaacgccggagtcaccgggctctcccaggaggcatcggcagagcttggccaccacctccacagcccgagaaaccatccagatgggaacaaggatgtttccacagagaatggacatcatttctggagccacccagaccgtgacaaggaggatgaagacgtccccaaggaatatgagcacctactcccaggccacaggtcccaagaccatgaggttggagacgaggatgtctcaggtgaggaggtctttgcgcagcatggtgggcaggcccgtgggcacagaggccacgggagtgaagacacggaagactcagctgagcacaggcaccacctccccagccacaggagccacagccatcaagacgaggatgaggacgaagttgtgtccagtgagcatcgccatcatatcctcaggcatggacaccgaggccatgatggggaagatgatgaaggagaagaggacgaggaggaggaggaggaagaggaggtctccactgagtataggcaccaggcctacaggcaccgagaccacaggagtgaagaggatgaggatgtctcagatggacaccaccatcatggccccagccacaggcaccgaggccacgaagaagatgacgatgatgatgatgatgtcaccactgagtatggacaccaggcccacaggcaccgaggccacgggagtgaagaggatgaggatgtctcagatggacaccatcatcatggcccaagccacaggtaccaaggccacnnnnnnnnnnnnnnnnnnnnnnnnnnnnnnnnnnnnnnnnnnnnnnnnnnnntctccactgagtatggacaccaggctcacaggcaccgaggccacgggagtgaagaggatgaagatgtctcagatgaacaccaccatcacggccccagccacagacaccgaggccacaaagaagaagatgatgatgatggtgatgatgtctccactgagtatggacaccaggcccacaggcaccaagaccacagaaaggaaaaggatgagcctgtctcaggtgaacacaacaatcatgtccctgaccacaggcaccaaggccacagagacgaggaagaagatgaggatgtgtccactgaacattggcaccagggtccccaacgtgtccaccatggccttgtagatgaggaagaggaagaagaggagatcacagtccagttcagccaccgtgttgcaagccaccaacctcaaggccacaagagtgaggaagaggacttccaagatgagtataaaacagacgtccctcaccatcaccaccacagagtccccagggaggaagatgaggaggtctccgctgagcttgcccaccaggtccccaaccacaggcaaagccaccaagatgaagaaactggccatggtcaaagagggtccatcaaagagatgagtcatcaccccccaggacacacagtggtcaaggatagaagccatttgagggaggatgattctgaggaggaaaaggagaaggaagaggatcccggctcccatgaggaagatgatgaaagttcagaacagggagcgaaaggcacccaccatggcagcccggaccaggaagatgaggaggatgaggaggatgaggaggaaggtcatggcctcagcctgaatcaggaagaggaagaaaaggaaaacaaggaggaggaggaggaagaagaggaggagaggagagaagagagggctgaagttggggccccactgagtcgagaccacagcgaggaggaagaggaggggctggaggaagatgagccccacttcaccatcatccccaacccactggacgggagagaggaggctggaggtgcctccagtgaggaggaaagcggtgaggacacaggtccacaggacgctcaggagtacgggaactaccagccagggtccctgtgtggctactgctccttctgcaatcactgtcagttctgctatctctgcccgctggtctgcgaaacggtctgcactccaggaagctacgtggactatttctcctcctccctatatcaagccctggcggacatgctggaaacgccggaaccctgacccagtc

SEQ ID NO: 6311 - DNA, 750 bp, Macaca Fascicularis
  misc_feature (1)...(750): n = A,T,C or G
atggatttcagttaagcaaaatggcttaatggtagtgttggactcctctgctaattataaacattttatgaaatcagtgtatgtgtattacagaaatcagaaatgagaaataagaacatgnnnnnnnnnnnnnnnnnnaagaaaaataacttgtagtcatatttaacagacaccagcagttctcaggattccccatgttagannnnnnnnnnnnnnnnnnnnnnnnnnnnnnnnnnnnnccaaagacccccaactgactgcacgaaccccctactggctaaggagatcccagagttacctnnnnnnnnnnnnnnnnnnnnnnnagatgggaggtgagacacctgttattacgggcggcccttggctgacgaccattaggttttctttgctaagagcttgacggaaaccagccctttcgaaagactccaccgctgataacccnnnnnnnnnnnnnnnnnnnnnnnnngaccagtattccttactgataagagatcacactaaccatggagtgcttctggccagatgacatgaccctcatgaaggggcgtgaagcttcactgtggttgtgtatgtttctctcttcagaaatattcatgacgcctcctgtagcttgctaaatatgtatatttacacactactctgcaaagattcctgttccttttgcccctccctggaagtgtctttttctggcttctggcnnnnnnnnnnnnntccctgcctgtcaaaatggccaccctgcaggctgaaatc

SEQ ID NO: 6312 - DNA, 818 bp, Macaca Fascicularis
  misc_feature (1)...(818): n = A,T,C or G
cagagtccacgtgntnnntatgctgatttgttgcaggagaggagagtagatggggccgtgcccagtttgtgttccggccaccatgggctttatatggtcactgcttgactgaatcatctttgctccttcattgtccttggctcttcagtagaaccttgtcccaccaagacctgtgatcacagggagttggatgtcacctagggcggtccctgcatacaaatctccttgtggtatcaagagataaattttcagacctgtccagatcttgccctcctcccagggctctttcctggattgtattttccatcttttctccaatctttttaaaggaaccagattctgaaatttacagagaggatgggtcccatagtttctcatcacaggtaactttctgttggagctcctcttctgcactcccactcatcttcctgccctgagttgtagtaatcctagcgctggctccaatacaaacccatagatttataaagcagagtctaatttagattcacatgtggttggacaattggacccataagtctagggttatctttcctgaagagaaaaatatgtttgtgtgctgcagtgtgcaggagggttggtgtgggaggagggagggagggaggacacaccagcagccctggtgagaaaagctctgctggcactgatgtcagtgtgagatgatgttgttctgtagttgccacgaaaaaaaaaagtatttgtctgaggctacattaacaaagatattgcctctagaatagaggggttctctacagtgatcattccttcagctgacgtttgttgtctcctagggatatgac

SEQ ID NO: 6313 - DNA, 723 bp, Macaca Fascicularis
  misc_feature (1)...(723): n = A,T,C or G
agtgggatgatagtaaaggagaaaggccacggtccaatccctctaccttcagatagggaactcaaatcctgaaattactattttctttctggccttttctcctggttagaggaggaagtgggaagtagttttgagtaatactttgttcatattactctctttttttgtttttgtttttgtttttttgtttgtttctggcccctctaccaatagggcaatagccccctaccctggatgggtataaggtgggcttggtccaacaggtgcccaaagggtacagactcctttctggggagagaatgctccctaccatatagttgacagtggttaggaactctccctttccctacctatcttccttttaacaacagaattcctgtttttcccttcttgattaagtgtattgatcaccctgcaatcctattatgtatctgagtgtgtgtgtgtgtgtatgtatgtgttatgggggaagggggggttctttaaaatttctgtggtttgtggctttttcttccatacattagttcccaccatcgcatgcccagggaccacnnnnnnnnnnnnnnncatgctgggatcatcgggggagggtagtgaagctcaccactgtcctttgttttggagattcttatttttgcataagtnntccatcctatgcagatagctgactaactgtattccccattcccctatggctgctgatgtaaataaaccgcatctccc

SEQ ID NO: 6314 - DNA, 689 bp, Macaca Fascicularis
aaagcggaaatgtgagacaggctggcacctccagaaaaactgcctctcagccttggtattccgtgcaaggtgaaaaaaaataggtcctccaagtttacagcttgaaatcaggctagtgtgttgccctggagaccacgaggggagaatttaaagtggcccgactggcagggtctaggtggctggcagaggaacatgcagaccctgccgggagcccaccctaaggacacagggcgggtcagtctccttgcaggatgtgagcagcgtccctgggctctatccacgaggtgccagtagcgtgtgcaggtacatacatgtgcgtgcacaccgttatgacacccggaaatgtctcaggacgtcgaaatgtgtctttgggggcagaagtgtccccattcgagaatgtgccccagaggaacaccaccacaccaggcctcaggattttgtgttgatcaagttccaaggaaaaggaacatctcagccgggcgtggtggctcacacctggaatgccggcacttgaggccaggagttcgagaccagcctgggcaacgcagtgagagaccccatctctacgaaaaaagaaaaagaaaataaaagaaaaaagaaaatgagatctccggttttaaaaattcataaccaccacaggaaacaacacactatgagacccagcagaagcaacagatagactctagacc

SEQ ID NO: 6315 - DNA, 724 bp, Macaca Fascicularis
  misc_feature (1)...(724): n = A,T,C or G
tgagaagcactatgnnnnagctggnnnnngaccctggcctgggggtcttagccactccccaccctagggtctagttcaggggtatccagtcttggcttccctgggccacgttggaagaattggcttgggccacacataaaataacactaatgatagctgacgagctaaaacaaaagacaaaacggtttgtgcaaaaatctcataatgtttttagaaacttgaagaatttgtgtttgggcctcattcagaggcatcctgggctgcatgcagcctgcgggccttgggttggacaagcttggtgtattctgcctcttactgagtatcttttggtaagctgccatacctctctggctcacagcctcctgccaccgttccactctgatgagttcagtttgtgaaggtgcttagttgaatcctcactccactgactctagctatgggaaccaaggtgatatggtttggctgtgtccccacccaaatctcattttgaattgtagctcccatagttcctatttgttgtgggagggacccgctgggagataactgaatcatgggagtggttcccccacactgttctcattgtagtaaataagtctcactagatctgatgattttataaggggtttccccttttgcttggctctgattctctcttgcctgccgccatgtaagacgggcctttccccctccaccatgagtggaggcctccccagccacgggaact

SEQ ID NO: 6316 - DNA, 4630 bp, Macaca Fascicularis
ctctttcccgaatgggactggctggagggtccaagctgctttacagaagagttccatctgcctggcccgatggctgaagctgagccccaggaggcgagttcttcggcagggcctcctcacccaggctggagcaagtccgccgcgcccgtccacccaggctggagcaagtccgacgcgcccctcatgcggggaagagctcgggcgggctttctccatagcaatactttgctatagggtcccggtaggtgttctcatgctgcacactctgttggcaaaaggaagataagagcgcggtgagagtgagcacagcttcacacacctccctctaggaagagtgagagtggatcgggactgtcagactctccctgcaggaggctggccgagtccatctccaaatgtcactaaaggctccaaggcactttctggaacaaacaagaatgctcaacccagaacgccagcgcagagcatgaacacggacataacatcactgtggcactgtttctttttgtgtacaccagtgagtaacttcgccgtgacctggtgactcaagacaactactttttctccaattactgggaacagtctaagatccgatgggcgttctgcacctgatcctgtgcttcattcagttcccggtaaggcacgctgcggagacactaaggagatgcactttaaatcgctttcatgaagtttatgtacctaaaaatttggtgcatgagtcaattcctacaataccatgcaagcctcatttggctaagcaaattggaagtgtgatttaaagcagacaatcattcctgatggctaatttttcagtaatttgttttcatacaagcaacttgagtttttggctagtctagaattcattaattagtccaagaccaatgctaagcaacaaacttgtaaatattcatccaatttaacagacatataaccaaatcttctctttctcgggatacttttatcaaaacaaatcaaatggcaattgggaaatctttttatggtaaaaagaccaagtccgaaagtatagtagcttcactgaagactagaaataattcctgggttttatcagtgaaggaaagaaaatacttcgccttttctagcgtttctcagaatgagagagaatctgaatcaaaatgagtcatgtgttcagccttcctcctcatttcctttaaagctcattcaagtggaaagctcttcaagcaaaacaagaccatcaggaatttcttaatgttttcaaatgctcattataatccctgaaacatttacccaatgatactgaatgctcgcagaacaaaccagagacatgagaaggggcataaaatcaaaaggtggactacagaaatctggcaaagggtacaagagctttggagaatgacaaatgagtccgttatctcagacgaagccagtaaaatcttagagacaccatgaatagaagccagaagaagtgtgcttgtataataaacatgtctggtgattttacaacgagagctacgacaactgcccaaccacaatagctgagagccgaggagacagtgatgaaaaggcaaaagactttcagacgctttcggcagcaggtgcaataatatttaatgcccaaagagcgaagcatttaatgacggcacgctaatatgtattgagagcctgacagcctacagatttattcatgtatttttaaacattcacctgcctcatccccttgaatcctaaaacaacgactccatcccagaacaaattgctacttactctaaacaagtggttactggaaagccttagtcatatttcaaagacgggaggaggaccttctcttaggagctggactattaggacgccaccagacttaaaaataattttaagcttccacttaaggagcaaatgtaccaaccacatagaagagatgcaagttaattagaccttgatttaataaaaatgcttcacctcccctaacttgtataaatctcacattgacattttaaataccatcatcgcaccaaacaaagcgtgacatagcttcatttgagtctcttctcttctccattaccaccccaccaaaaggatctcagtgtgtattttctagtttccttctaaccgatcagctgccatcccacagctagagacatcacagcttctgacctgggatgaggtcctgcatttggccaggcacaactcaaagtgatcttcgactgccatgaagaggttctggaatgccacagctgcccggttgaggaagcgctccaggagaagttgctatggaaacaaaagttagtgcctgtaataaattacctaagccagcagaaggtgaccttgcctatctctcctaaactaagagaatgctgatacagggatggggagggggtaaagagaaggagaaaagaagggaggggaagggacacacgcatgcatacacgtgcatgccaaagcaccctgggtatcttattcattagatatgtgattagcaatacaatggtccattctgcaaaagaaccattcaagcaactgggaaccacctcctttcacgttagataaaagctactgtgcagcaatttctgacacctacaaacttcctgagttttattttcagaagagcctcacatcaagagtctaatgctcatcataaaacaaaggccaaaagaaaaccggagtcgcagaaccaggagcgactccccataccttgttgggctgcaggcagcaggagacacagtactcataggcgctgcagcagccgttgggccagcagccatcacagcagtactgcttcgtgctagggacgttgacgttacagcagccatttaccagcaaatccttcctctcacaaacgtagcctgaaagtcagagaccaaccttagcataaaaccagcagccttgccacctccctaccagggatgaccatgaagcagcagtgaaagtatagagacagaagctggagtctggggcatcatcccaagcaccgaagagctggaaactggacataatgtgagtcggacttgctttccccatgcagtcattgacaggaagcaggcactcccctgttatcgccaggctacacgtcggaacctacctacacctactgtttagtctgccggcacatgtttgatttcatcaccaggtcaagctatagctacattctcctgttctaacctatgcaagccaacatctcatctgtgcatgaagaaaaatgtcattcttttctaaacaaaaagttcaaaacagaaaaaaaaccaaggcactgattcacaaaagtgagatccttctagattgaacaaacaaagcactctttacaaatatctttcagacgctcactgcttactgagtaatttggaggattataaaaatagaaatattcacatctaactcttataaactgatttgtacgtgtacacgccagggactcaatcacccctcggccttcgggaatgcagttgcctaatactcaagaaagaaaaaagcctcctaatcccctccttcaactttttataaatcccatcatctatatacacgtgccccctccaacccagcccattcatgcccaactttagagaaaaaaaaaatctccttacaaaagctaatgtattgttcagagctgctaaacagagatttctctacatccttctgggaatgggacagaaaaatgtaagggtaagtccataagggccaccaatggccctgaggaaactcccaggtgcacacatgagctcccaggtgcacgttcaggcccacaggtgcagagcagctgctccccgcatcgctgcattgcaaatgcccagcttcttcatcctcagagaaggagacttgctgaagtatatataaggttgttttcagaaactactttagaaaacaaagtctgttcaaaagcaggaggcaccagtagaacaatggtaatgaagaaactaaaagggccctcacttaagacttgagcaaatgaggcctatagagaaccaggttccggacacttgggaatcggtgccttttgttgtagttgttgtttatgttattctgtcttctaaattaagagaggatgattctaacgctatagtaaatgtttcttgggattcttcctatttctactcattttctttacagggactagaaaccaacacaaaatgtaaataagttagttagcattttcctcaaaaattctgctcaaaataataaacatacagcaactctatataatgtgacttaaactctgccagttgaaattctctttctgccctttacttttcatcttgtaagtgtaagcatctcaggcatccttttttccccccactgccaacttatagtattcggccttgaaatgcagctctttctaaagcttgctgaaagcaagctcatcaagaactctcaccttgcatcagacatctactcactcaaatgttatctccaacaaggagtcctgtaagatcacaacctcatactgtgttgctattgccttgaaaattaacttccagcctattaaaagtttgtaaatgcaaatgatcttatttaataatgtgttaccctggcaatattcacagcagcatctgtttgctaagaggcgtaagttcttacatgctttctttactaaactacttacttcacccatattcatggagaaaaataaaacctgtagctcttggaaaaaaaaaaaaaaaaa

SEQ ID NO: 6317 - DNA, 685 bp, Macaca Fascicularis
  misc_feature (1)...(685): n = A,T,C or G
tttagactactcagaagatgcttcataaattgtccttttagaatttccatcatggaaggtggtatggaagaaggtatggaaatatcttgtattctaaaaactcactggtatggtcagttagacatacgttggtttccaagatggaggcccatatatcctggggaactttggtctattagtttgtgacaatattcaaagaccaatacactactcagacactttcctaggaagagcaactaaaaatgtaaaattggttaaaaataaaatctgaaaagtatacatctcccactgaactaaaatccactgtctcataagttcatggaatgaaatgactttctgcctccattttaatcatgcataaaatgaattagatggctttgagtggattttcacaatggctcaagactatataaaattatatatataaaaaannnnnnnnnnnnnnnnntctgcatcaattagaatatcattaatttctttgtaaccaagtgaaaagctatactttttggaaattatgaatttgtcctaggtttgtttgagatttgagattatagatcatgcttctcatttttaaaatatgttctttaaatcaacactggaaactctgtaattatatacaagtgtaatacatgcatataatagaaaaaaatacgtggaatttcaaatatactaactagattatccc

SEQ ID NO: 6318 - DNA, 2155 bp, Macaca Fascicularis
  misc_feature (1)...(2155): n = A,T,C or G
gttttggccctgttgggttgagtttagtttttcagcattgcatttgagattcctgtgcgatattcacctggaggcatatcgtagacaggtggataagtctcagcacagaagaggtgttttaggtagagatgaaaatgtagatgtcatcagaatatggaggtgattttaaagctgtgggaatagataagaacccccctgagagaagagaaggttcagtgacagtcttcgagtacctctgattttttcctttttcttcaagagtaaaggaagatggggagcatgattatgcagttttcttaagatgggaagaagaaggatttgagaaagccaagtgagaagcctcactcgtctttttgaaggcaggatcccctccagagaagagaggggtggtgggtcgggttgggtgcggtgagaactggaagacaactgatatttgaagtaggtatggtgggaatgttacagtggagtcaaggctggggagattgaggagtttctgagcttttctagggtccagctgagtagggtagctgcaggaagcagatggtgccaagtaatgggctgtgctgcctttcctgtggtgagtgcaggaggggcacgtgctctggaggaactggttgggttgaattggatgaccagatactggagtttggcaaaccagggatagtgacagtcagtgaggcaggtgagtgtgcaggtccacagatggaagaaatgccttcgctggagactgggtgggggaaggagacaagtgaagcccaactcagtgttataaggtggagaaagaggaacccaagttctggaaggcagtgaagttacagagcagcctccagagagctaggggcttgaagaaatagaaggatcctgtattgaaatggaaaaatagtttctttttaaccttgctattgagtcactggcagggactgttagcatctctgtgaaatattcatctttatgtcatcaaagttttaaagcatcactttagaaagaacagtctgttttaaaaccaggtcagtgaaggctgaagccctcattgttgggctcatcacagcactttgtccttggctaggcatgtcacgttcttttcagcatcaagctgcttctttgacatcgtctctttttaaaaaagttttatttatttatttttaaatagaggtagggtctcgctttgttgcccaggctggtctcaaacgcctggcctcaagtgatcctcccgcttaggcttcccaaattgttggtattatgggggtgagtcatagcatccagccaagatcatctcttgaagatagattgcattctcatattgtttgaaggtttctatgtgcatccagatgaactgctttaagaaaatttagaaagtgattagagaaaactttattttatcctttcaaagcaaactttttaagggtatgtttcacatatatacattttcttaaggcgagaggcgtttagtaaaatgagtttagtaaatctaagtagttaacagggttgcacatttgcaggggtagcatctttccagtgagtgatgttaaattcccatgtctttgtgcagtgaagcaggactaagaatggattactggactttttggaagtttacccctttgtgaattgcttctgtaagtggcagtgccatttaggatgtactgcatagggttttggctgggattttaggactgaaagacatgtaggtggcatcaaatcagggtttcattgtatcacattaaattaacatgataaattatccgggtgtagtgactcctggggcctatagtcccagctacttgggaggccaaagtgggaggatcacttgagcccgggagttcgnnnnnnnnnnnnnnnnnnnnnnnnnnnnnnnnnnnnnnnnnnnnnnnnnnnnnnnnnnnnnnnnnnnnnnnnnnnnnnnnnnnnnnnnnnnnnnnnnnnnnnnnnnnnnnnnnnnnnnnnnnnnnnnnnnnnnnnnnnnnnnnnnnnnnnnnnnnnnnnnnnnnnnnnnnnnnnnnnnnnnnnnnctgacctcgtgatccacctgcctcacgcctgtaatcccagctctcagggaggcagaggcgggaggatagcttgagcccaggagttcgagacctgcctgggtaatatagcgagaccccgttctccacaaaaaggaaaaaaaaaaaaaaaa

SEQ ID NO: 6319 - DNA, 1758 bp, Macaca Fascicularis
ttacaatttcactatcatcatgcacctatgtgtggagtcctctcaatttatcttgctttggactcaggcttcttcaatatggggattgtgtctttcctctgttctggaaaattctcacctattatttcttcacatattgcatttttccaattctctgtcagtatctgtttctgtaactcctgttggacatttacttctctttcacattgtctgttttatctcttttgtgttttctgtctctctctctcactgctgtattgtgagttattacttagctcttccagttaattctttaagctttttcgtaatctgtttatcagttcattgtgtttattatttcagtgactaaatgtaatcgctcaaagttttatttggtcgtttaaaatttgcttttgtcttcatagttattctgtcctgttctctttatctctttatttattttttgatgctttcatctctttgttatttttaagatatttatttcttagcctctttcagattattctattatctctgatcctaggagcattaaatctcccactacgtctatagactctccttaagagtgtagattattgcctagttcagtttataatttgtgtatgtgtgtgtgtgtgtgtgtgtgtgtgtgtgtacatgcatgcaagagggagagagagagtgtgagcaagctcatttttttttcctatgaggcttttgtaagtcctgacctgtatttactgttaacttcttagcttgggttcatgcacccccagtcagtataactgtggacctcatacccactttggcacaggcttggagtatggatttattacaggtctgtttctttttgtttttctcccatttatggtcctggacagaaggtaagcttccttgcaacttccctggtccggtgggtagagttttattgtcccctttccagatgttaggttttaaacaatgactgttcttttctccgtcatgtagaccaaaggccaagttctgtgtccccacgggagattaaaaccaaagattaaaatcagtgcccactgatttctctaattgtgaatctttctggttacctagtacctagagtttctcttcccatgttttaaaaatatcagtgctaagtaggcctagcatttctacatgtttttagggaaaggggaccctttctgtggcagctcagtcagtgttcagcattcctgtaagttagcatgctctgtgtataacaagtatcaccagtaatagcatttagtaagtgctgttggcgcatgttgctgtcatgaacactatctcatgttgtgtaataccttcatttttccagtaactttataatcagctgatttgaaactcgcagccatcccctcaggtaggcagggcaaatgatgttatttccaatttgtcagaagctcggaaagctgattctgttgctgacagtccttgcaagggtcggaatcaggaccagagccccagatgcactggtgtcactgatgtccccacaccgggcacgagcccttctgtgcaaggagctccagtgtcacctggacagtgatgatgtgaaaacatttagaaccgacttacacaataaggcagattttcattctgtacccaaaacatgaacacagatttaatgcagagcaaaagggctttaatcaacagacatgttcatttttcacatagacctattttacaagctaaattgtaagccagaaaatgacattccagattttcaagtgagaacaaatgatttggtctacttaaaaaaaaaaaaaaaaa

SEQ ID NO: 6320 - DNA, 697 bp, Macaca Fascicularis
  misc_feature (1)...(697): n = A,T,C or G
agtgaataaagccagaggggccnnnnnnnnnnnnngtgagagacagaggctcgcctgggcagtgcagaagccagccacgtgtccctccttacaggggatgaaatgacctggggaggaaaccccagcccttccccnnnnnnnnnnnnnnnnnnngccagtgctgnnnnnnnnnnnnnnnnnntgtcccaagcaagcttgagttgtgtgcgagtccacgccgtgctgtcctgtaccgtatgcttcagctcccccaacccctgctgagcttgatttttccctaaatatcagtctccacgggaccccacattcgttcatgccttcttgtccctagggtaatgtgtgtgtttcctcgtcccaatttctatcccttggcagtgaggagcccatcgtgccagggggccctgccctgcttctccctgggaaggaatggggggcctgggtgtgacctcagagcccggaccagactgtcccagtcccatgtnnnnnnnnnnnnnnnnnnnnnnnnnnnnnagacgtgctgcagggcgtgggtgctcctccctgcttggaggctgttcctggatggcgacccacccactgaggaccaggccaggtgcgcctagagctgggcacagcagcctgtggtgttgcctgtgggtggagagggccccaggtgtgcttctcccgtagcggtcctaaacttctgtccctgtgcact

SEQ ID NO: 6321 - DNA, 143 bp, Macaca Fascicularis
acattgctcaggggacatgaagataaattagggaaagccccaccaaccccgccccccaatccggtttcctcccatggcaatgacattaggcgcctgtaagaggcacaaaagcagcaaagcttcctgtaccacatcttgtggta

SEQ ID NO: 6322 - DNA, 182 bp, Macaca Fascicularis
atgtttggaaactcgcgccttatttaaaaaaaaaaaagaaaaaaaagagtttgttactctattgtatgttacaaaagaactatagactgtggaatgcagtttaaagatgacatatgccaacaaatgcctggtattatatggcgctgccgtacttcaaacgggtttgtattttggaaataaaa

SEQ ID NO: 6323 - DNA, 2139 bp, Macaca Fascicularis
attgggaactcgaacaaactttaaatttcagcaaaatgctcagagactgctaatcctgcaacaagaagccaggtattctgaaggtaaaagataccagagattctcaaagatgcgagttttctgtgtgggactactctttttgagtgtgacctgggcagcaccaacatttcaaccacagactgagaaaactaagcaaagttgtgtggaagagcagaggataacatacaagggtcaccatgagaaacatggacattatgtttttaagtgtgtttacatgtcacctgggaagaaaaatcaaactgatgtaaagcaggaagagaaaaacaaagacaatattggtcttcaccatttgggcaagagaagatatcaagagctatcatctaaagaaaatattgtccaggaaagaaagaaagatttgtccctttctgaagccagtgagaataacggaagtagtaaatctcaaaattatttcacaaatagacagagactgaataaagaatatagtatcagtaacaaagagaatattcacaatggcctgaggatgtcaatttatcctaagtcaactgggaataaacagtttgcggatggagatgatgctatcagcaaactacatgaccaagaagaatatggcgcagctctcatcagaaataacatgcaacatataatggggccagtgactgcaattaaactcctgggggaagaaaacaaacagagcaaacctaagaacgttctaaacaaaattccagcaagtatgaactatgctaaagcacactcgaaggataaaaagaagcctcaaagagattcccaagtccagaaagttccagtaaaaagcaaaagcacccatcgtactcaacacaacattgactacccaaaacatctatcaaaagtcaaaaaaatccccagtgattttgaaggcagcggttacacagatcttcaagagagaggggacaatgatatgtctcctttcagtggggacggccaaccttttaaggacattcctggtaaaggagaagctactggttctgacctagaaggcaaagatattcaaacagggtttgcaggcccaagtgaagctgagagtactaatcttgacacaaaagagccaggttataatgagatcccagaaagaaaagaaaatggcggaaataccattggaactggggatgaaactgcgaaagaggcagatgctgttgatgtcagtcttgtagagggcaacaacgatatcatgggtagtaccaattttaaggaactccctggaagagaaggaaacagagtggatgttggcggccaaaatgctcaccaagggaaggttgagtttcattaccctcctgcaccctcaaaagagaaaagaaaagaaggcagtagtgatgcaactgaaagtaccaattataatgaaattcctaaaaacgacaaaggcagtgccagaaagggtgtagatgactctaataggaaccaagcaatcttacatgaaaaacaaaggtttcctagtaagggcaaaagtcagggcctgcccattccttctcgtggtcttgataatgaaatcaaaaccgaaatggattcccttaatggccccagtaatgagaatataccacacagcagaaaatatcattatgtaccccatagacaaaataatcctacacggaataagggtatgccacatgggaaaggctcctggggtagacaaccatattccaacaggaggcttagttcccgtagaagggaggacagtagtgagtcatctgacagtggcagttcaagtgagagcgatggtgactagtccaccaggagttcctagcagggtgacggtctgaagacctcatcacctgtgagttgacgtacaggagagccacctgacagctgaccaggtgaagagaggacagggtgaagaaatgagtgagccaagaatcctggtccccttgggggaatttttgctatcttaacagtcacagtataaaattctattaaagctataatgtttttaagaaaaaaaaaatcattacagatttatgaaataggtaacatttgagtaggtgtcatttaaaaatagcttgtgaatgtcacaaatgccttctatgttgtttgctctgtagacatgaaaataaacaatatctctcgatgataaaaaaaaaaaaaaaatac

SEQ ID NO: 6324 - DNA, 2099 bp, Macaca Fascicularis
  misc_feature (1)...(2099): n = A,T,C or G
agtcatctcacttaattttgcttttcagggaattctagggctcacccttagcaaaagtgagaaggaagggtctatcctgaagaacaaagtctaccctggctcgtgtcctctgagtcttcaaggatgccctgagtaggagtgtcacctcctaggaaggtgggccaaagcccccagtgtctccagcagccttcccatagcctgctccccacccaggcctagcaacactccagaggcagctctccacccaggaggggctggggtgcagtgtgctgggacagctctggcctgggtgcaggttcagactctgccactgactggccccaggataccgggcacatcacataacccctctgagcttcggtttcaaactaggattacagacatgagccaccatgccagcctctagcctcttaaacaggccccgatgagggccctaccctgatggcttacctagactgaatccacccccccaagaccccgcctcctaatcaactcccattggaggtcaggatttcagcatttgggtttgggggaacacaaacatgcagtctacaacgccatctctgcgtctccttgcaggagcaatgtgggtcttcttagatttgcagatgggaaaaatgtatgcccaggcctaggcctggatacagaatttagataccactgtgcccagcctcagtgtgcagacctggcccggctgtggctcttgaagtgtgccagcctctgactgcccaagggcttggccagcatccagttgcaggtgtggctccttccttggggttcctgcagcatttattggccataactcatttggcacaggtttagatgccacctcatagcatcacttaaactgcgggctgtatcttccgagtcctcctgctggtatttgtagtgtatgtttgtcacattcctcccatcgtaatcccctgaggacagggtctgggaacagactgcctcgcgtagcttaccaccccatccccagagcattgcatggggtgtttggcacatagtaggtgctcaatgtaaacgtgtgcactgtggcatgttagagccagacaggatctcatccagcacattctctgcacccctccctctcctctccaagtagcagggctgtgggttcaaataaagaggggctggggtgctggtctgactgtgctggtgatttggggagatctcttcctcttcctgaaccccaaaacattgggacaaacacagcaacacgctcagctccctgaatttcagtgattcatttgtgggataagggagtgaatgataaatgaaggacgactgttcccgggtctccctgtccttcagccctctgtgcctgtccctggctgcagccagtctcccactttatcctgtggagagggtgctctgagcctcttccccactcccacaccttattatgcccaaagagtgtgccagtcacctatcagacatgtggatggtggggacagggctccctcgggtagagaacagcttctgtagggcggggtgtgcagccccctcctgctctctgccctaacacctgccaatctgtcaaggctgccctgtacagaagggtaagccagaccccgctggtgtcttacctctgcctggatgcaaacagctcgctccttccctgaccccctgtcccctggcacagggcagaggacgcaaagagtctgaaatcgttcaggctcctattctgctgatctccaagttctcagtttggaagaactgggggagcagaatcctggaggctcagaagcactgagccccacatttcacaggtaaagaaacagggccagccnnnnnnnnnnnnnnnnnnnnnnnnnnnnnnnnnnnnnnnnnnnnnnnnnnnnnnnnnnnnnnnnnnnnnnnnnnnnnnnnnnnnnnnnnnnnnnnnnnnnnnnnnnnnnnnnnnnnnnnnnnnnnnnnnnnnnnnnnnnnnnnnnnnnnnnnnnnnnnnnnnnnnnnnnnnnnnnnnnnnnnnnnnnnnnnnnnnnnnnnnnnnnnnnnnnnnnnnnnnnnnnnnnnnnnnnnnnnnnnnnnnnnnnnnnnnnnnnnnnnnnnnnnnnnnnnnnnnncaaaaaaaaaaaaaaaaaaaaaaaaaaaaa

SEQ ID NO: 6325 - DNA, 715 bp, Macaca Fascicularis
  misc_feature (1)...(715): n = A,T,C or G
aaagacagatgtgaatgcctcaaaggtcacagaaacatccagccatgacatatatgaagaggctgaggctgacaacgaagaaagcgacaaggactcattgaatgaaatgtttccatcagccattctaaatggcacaggctcacctcccaaatttaaaataccnnnnnnnnnnnnnnngaaaatgacacacaagctggtatttctagaagacggttccagccaggtccgtaaagagccaaaaacatattttaatggtgatttgaaaaacttcagacaaaaaagcatgaaagacacttcaacacaggaagtagtttcaagaccatcttccaaaagaatgaccagtcacacaacaaaaaccagaaaggcagatgaaaccaacaccaccagcagatcctctgcacaaacaaaatctgaaggattccatgacatctcgccaaagtccccagacacctttagacgataagagaagaagcaaacctgtttctcctcattaggatatataaaccttactcagcctgggagatgaatacatcttccactctggataactcaactcctgggcccatcagtcctcaaatttttctgcttctgacttgaacctggtaaaggaagtaacaccgaaaaattgaaagaaactgtcaaaagatcaccttgatgtatatctcagaatatgttaaaaatcatgttgttctctgtgtctaagcaagagctctaa

SEQ ID NO: 6326 - DNA, 2137 bp, Macaca Fascicularis
aaaaattaaccaaaaggactgtagcgaggtcacgttgtgcttgtggggaactacatccttgagtaaggaaataccatatttgtttctcaaagcaataaaaaatgagggctttagggagctgtagtcactatgacagatagggtgtatttctgtcaattccatatacatactaaatttaatctagaactttcataatcctgctgtatggattggaatagagagcaaaagaagtgacagacgcccttcaatagaaattgctgaagactcaattgtagttgcttcccaacatgaaaataattatgttccaaatattttgatttaatttttaaattaagccagtaccttgttacctaggaaagaataatacctgtattcatagaaccttggatttgggaagatattttctaaagtgtaattcatctccctattatttcctagtacggttatatttttgaaaccattaaaaaaaatagtatttcacaggaacttcaataaaatgaaccagattctaaggatgccatcctcttgctgtaaacaaataaataaatgtaaaattccaatctattattccttaccttctatactttctagagttgacccttgaagaatgtggaggttcaaggcattgaccctttgcacagtcaaaaatctacatataacttttgactctccaaaaattttactaatagcctactgctgaccagaagccttagcaataacataaacaattgatttaacacatattttgtaggttatacactgttcatccttgtcttcacgttgagttgtctgaagaagaggacgggttagcacaggcagaagaaaatccatgtataaatggacccgtgtggttcaaacctgttttgttcaagggtcaactgtacgttttaccttcattatataccttctatctccacccacactcccaccaaaaaacatggctttgttctgaaaagctgggagtcccctaaagattttcctaaaatgcagtttctttgctccattttgaaggattctttgcaattggccaagtcagcatttagctttgttgcctcactttgtcctcagtctacctagacagaccttgcatgtctttcctttttgcgtgtgagatttttttaaccctaactactgcttttgctagtgtcccaaacttcatctcctattttacttgactatactatttaatagtgagtttacattaacccttccaaacatagggattgaagagtatcctgcattagaaaggaatgttttccatattgtcaaatgcaacaggacttgaataaacctataattagtagatctttcctctagatacaattatagtcctggagcagttgccagaatttgatgcgtccatgaaatatatagggtgatgttccagggtaattaacaacatcaccattttaaaatattttgtatcttgggttaaaatgagttataattaagttttgaggattatatagttagtgcctaatgaatgtgtcagataatcagtgctatagcaatagatgactgttacagtgctgttatagatgacttcacagtggagggtggcggattttagcaggaacttgaagggaagacatgggaagacattcatgaatttagtcagtaagcatgaatttaatgagcaagcactttatttttatccactgctcttattgataactagacaaagtgcatggagctgatagcataacaagagagaaagacaataagcaaatataatgtcaagtgctattttttaagtcgaagcacagcatttcagttaaggtgataaggagtaagtgctattttggataagatgataaggaatacccttacataattgtgtgaaagaacagtattccagatagtaggaagagaaaatgtaagctgccttatagaaaaacttcagttgacccatgcacatatgaggagacttcaaaaagcttgtggaaaaaaaatgaaattaaaagattttttaaaagtaaattctatttcttaatgtaaactctctcaagttcaagacacgtttgtaagtgatgagaccagccatttagtttatccctgaagaactgagggtcctagaaatgtagccatgtcaatatagtcttttattggttgaaaaaaaaaaaaaaaaaaaaaaaaa

SEQ ID NO: 6327 - DNA, 531 bp, Macaca Fascicularis
  misc_feature (1)...(531): n = A,T,C or G
aagcccccnnnnnnnnnnnnnnnatataaggctgtgaacccaggcaggtttctgttcttgctgtacgccctcaagagttcccccaggctggttctgctctacctgtacttgnnnnnnnnnnnnnnnnnnnnnntacccttcatccaccccatctgcnnnnnnnnnnnnnnnagctctggggaggacattgtcaccaagcttnnnnnnnnnnnnnnnnnnnnnnnnnnnnnnnnnnnnnnnnnnnnnnnnnnnnnnnnnnnnnnnnnnnnnnnnnnnnnnnnnnnnnnnnnnnnnnnnnnnnnnnnnnnnnnnnnnnnnacatcannnnnnnnnnnnnnnnnnnnnnnnntactctcagttctggaattattctccttttgnnnnnnnnnnnnnnnnagtgaactgaagactgtgcctcagaggatgtggagccacttctggnnnnnnnnnnnnnnggggctttttgtggccatgttctggcccctcatccctcagtttgttgcaactgtttgttttactgggccctgtact

SEQ ID NO: 6328 - DNA, 796 bp, Macaca Fascicularis
  misc_feature (1)...(796): n = A,T,C or G
cgagatgtgatatagaagtgtacatatgtgctgtacacctgggnnnntcaccactatagatcccatgcatggatctgtatagtatgttctgactctaataggactgtatatactgttttgagtaagaatgtgctgaaatcagaatgcctgtttgtggtttcatatgcaataatatattttttttaaaatgtggacttcacaggaaggcgtgagtacaattagtataatgcataactcattattgtcctagatattttgatatttacctttatcttgaatgctattaaatgttttgctatgtcaaagtaaaatattgttaataaacctaacaatgaccctgatagcaaaggttaagtgagagaaatatatgaattctaacaagacataggttaatatttaagagactgaaaaatctcagattcctctctctcaattttatcccttgcctgtagcagccagtcccatttcgtttagtcatgtgacaactgtcttgtgtttccacagcctgcaagtcagtccagaatgctaacatctaaaaatagacttaaatctcattccttacaagcctaagaatctttagagaagtatacataagtttaagataatgggatttttttcttttcttttctctggtaatattgacttgtatattttaagaaataacagaaagcctgggtgacatttgggagacatgtgacatttatatattgaattaatatccctatatgtattgcacattgtaaaaagttttagttttgatgagttgtgagtttaccttgtatactgtaggcacact

SEQ ID NO: 6329 - DNA, 676 bp, Macaca Fascicularis
actgttccttcaagcacctggcaactccagagacagcgctctccctgctcttgaagttgagaccgaggctccagcagcagccagcactcacagctgctgttgctgccatcttacctgacttgaattgtacaagtcgctgcctttagaaggctttggtttcaaatgatgcaatagtggatgatctggaggaggcggttaagattcccgtccatctctttaatgccaggaatctcctgacaaggaatactatactttaaatgtgggccttaaaataaacaaaacaaaaactgaactacagctcctttacatgacagagagacaagagagcaagccgggctgtccaaacccttgcttacagcctgtcccttgcattgagggtcccaagactgtagagtgaaatatttgaatcctcatctgttcgtgggagaagatttgctgtgcttagggccatgtaattctctagatcagggcattgttgagcagtgctattattaattaacactgggataataggtgtaaactgggactgtttcggacatactttgacaaatggtcaccccagctatgcgcactgcctactagatgaacggttgcattgagatgcattagctggtgcggagggaagttaggtttctgtgagtgaaactctgtggaagtttcagagtagcagagaacc

SEQ ID NO: 6330 - DNA, 989 bp, Macaca Fascicularis
  misc_feature (1)...(989): n = A,T,C or G
aaagtaaaggctacacacacatatggagcaccccatcccacagcacattacatccacctcacttcacagaactgagaacagagcagaaatgaccagaacacctttgtcaccatcacactgccctcctaaaatggaaccaaagctttggatgcaaagaaggcaccctgacttcccacaagacaccagaattcacacggtactcagaggcattgctgggaaagtttgttggtctttattagaaaaagttcaagagacctgtccataatacccaacagaacatgagtgtttctttgaggaaagggttctaatgtctgtggtgtatgagtagtttttggtataacttctttcctgctgctgctgcttcctggcaaacatagttttcctatttcaggcagagtgcggtatattccaggagacgctgtttccttctctcttagcttacttctttgttgaattctcactaatggcaagcttcaagatgttttgtgtgacaatacacacnnnnnnnnnnnnnnnnnnnnnnnnnnnnnnnnnnnnnnnnnnnnnnnnnnnnnnnnnnnnnatctgtgagttgtcattctcatctatccatgtccacttgcttgccagcatccaccagtgccttgccagcgtgcacggtcccacactgtggcccctgagtctcctaatgtacatgctgcagccagaatgcagatggagctggcttggctgttccctggatgggnnnnnnnnnnnnnnnnnnnnnnnnnnnnnnnnnnnnnnnnnntcttctgtctacgggtggaagtttaccagtgctttccccccacacactctggtctctactaagtagctctagagaacagtcaaggaggaacattagaatggttgcctatgtatcatccatttgtccaggtcctcctctgagctagaggctgtgaggaagacaaggaagnnagggctgagttcacagtgtggcnnnnnnnnnnnnnnncctggtctctaaccct

SEQ ID NO: 6331 - DNA, 1942 bp, Macaca Fascicularis
ctaccgttggtgataacaccaaggacagattttccatgactgggaatcttgatgaagaagactgtaccctactcatccatgatattctcaaagggaacagtgcgacgtatttattctatgcagatctaggagaacaaaaaagtgctttcctgggggagaatatcaaactctttgtgtcagacctaacccaaaagccagagctccacatcccagagattcttttggctgagaaacctgtggccttgaactgtaccctcaaaggcacctgcaaagaaatcaaagccctctttcgctcccggaagaacccagccgtctccagcagctcctcctcagtgccgcacttcatcctgaggcctgaggaccatggcaacacccttggatgtcacttgaacttctccctagccaacgtgaccagaagtagcttggtcaagctccaagtggtctcacctcacaggttgttcaattcctcttgttctttggagaagacagttctgtgcagctgttccttccatgggatccccacaccctccgtgcagtggtggatgggaggtgtccctgtggatgtgaacagcatggataacatcccccgggtgacttcttccacacgtgtcccctgggccaatagcaccatcaacctcatcggggagccagaaatagtcatgagacttcgctgtgaggggaagaaccaatatggaattcacacttccagcttcttcctgataccaaataagaaatcagtttccagtatgttcgtgaaaggattaatccagggcattgtgtatggagccattgcattctcattgctcttcttctgcctcgtcctcttgttaatgaagatgcttaactggtgggaggaacatcagagtcccaagaccaaagaaggcctgacccttaagaaaccagagctgctggaggaaccagaagtacccagcatgcctgaagctgacatcccaccagaccgggctggagtctagggatctggagagacagaagagtgtagactccgagacggaccacggcactcggcccgggacgtggaaacctggcccaggcagagctgcacagacctgccgatgccagcagtgactcagtcccagactccagacccggaggccgacgcccggttctcacccatttcctcccatttcctcggggaacatgccccggggcctccccagcgccagccctcgtgttagccaatgtagggaacatgcctaacacctgacacctgcccgagggacacgccaccccagcagccaggctgacaggagcagaaacaaaacacacagggacacgccaggcatcagcaccaggaaacaggctgctgccgcccactggggccgttgtgagcccagagtggatccaacccagcctcagccttcttcagagagagaaactgaagcatgctcagcaccatgggaaggtggcttgaaaccctaaggaacccccaaaaacacatccacaggggcactgggaaccatgaggccccagcctcggcacatctgcatgcagacagagaaactgaggctcaccgtgcctcgggccacaccgcaacgctgcgcgctgctcaggactcctgaacccgggacccttgccccccactgcagcagctgaccctgtcctggacattttctcctgactttatgagactctagtgcagaggttgcaaactcaaatgctcacagccaccaggcagggaacaagcggggcacagttggcctaatgggggcctcatctgccttgaaagcaactgcccctcctgaaggcggcggctcgccacggcggaaccgcggcggctcacagtggcggaactctctccaactcctccctacccgctccccacaggtcaggaacacggggtgactacagctagctcttcatgtttgtttgtttgtttgttttttgaggagaatccagagatctcgaaaaaaaaaaaaaaaaa

SEQ ID NO: 6332 - DNA, 743 bp, Macaca Fascicularis
gaagtgcaggatgacaatgcttctgtgcttgatgtctatttataagtgaaaatggtgaccaccttaaccacatggatgagacgtgagcacagttgtggcagagaagtttctccgcaccagaattatccacagcaacttggctgaaccccactacacacagagaaatcatcaacctgacttaagagttttcgagatgtcaacttcaggctgatcagcagatgggatgtgaaaaatactaccctattctatcatttgctgttgcttgctgaactgtgaagaactgcatgaactatatttaagctgctttctataccattgccaatcacctttttgaacttggaagtgctattttcctatggacttttgcattatttcattgtgcatgcatccagtgattatacataagcaacatatgtaatctgcttatatatttttaaaaatccatccatgcaaatggtaaataaagtatacattcttttgcaaaattatagctcatgtcattgaaagtttaaattggtttcatttaaagatcaatatactaggtctgcctctactttatagaaaactagcttctataaagattttttcactgtttactagtgaaatgagaaaagcaaagctatttataaaaggccttatgtcgtgtacatacatcgtctttgaaatatttgtgatctagtttattgcttgtaaaagagaaattatataatttatttagtaaatactactgtaaactatagttt

SEQ ID NO: 6333 - DNA, 681 bp, Macaca Fascicularis
  misc_feature (1)...(681): n = A,T,C or G
aagccctttgagctactgccttagtctacccgctgtccttttgttatgaggcagaggatctcatgacaccacacacacaaacccaccnnnnnnnnnnnnnnnacgtannnnnnnnnnnnnnnnngttcccactcctctgagggctgatactgctgggaatgccaactgctccacaagcagagggacaccccctcaggcctgcaggaggnnnnnnnnnnnnntggccaattcaaaccagcagcagagagcctgacattttcccatccatccatgaggaaannnnnnnnnnnnnnnnnnnnnnnnnnnnnnnnnnnnnnnnnnnnnnnnnnnnnnnnnnnnnnnnnnnnnnnnnnnnnccctgcactcctgnnnnnnnnnnnnnnnnnnnnnnnnnnnnnnnnnnnnnnnnnnnnttagttccttcaaacaagaaaggcaatacctacggacttgtgtacacttccgtccttggttatgacaggacnnnnnnnnnnnnnnnnnnnnnnnnnnnngtgctcccaatggatatccatcagggagggttagggacactcgtggcagcctgtctagcagcctgggctctctgaaagtccctaacttcctgaggggtacgcaaatactgttctatttcactatcagnaatgtttctcatctccagtgacggtggnnncagggggtgca

SEQ ID NO: 6334 - DNA, 1023 bp, Macaca Fascicularis
  misc_feature (1)...(1023): n = A,T,C or G
gatggaaattatanaaatttaaatatatgtttaataccacaaacactgtggggcacttgatatttattagtggtgtatatgatccactggttgcaggccaaatctagaannnnnnnnnnnnnnnnnnnnnnaatttaagttctattcaactttcctaggagttagaacctagattcaaaatgacttgtctttgctacttttgttccacattctctctctttacctttgccctaccttctgtttgtaaggacgattttagtattaattccaggaacacatgtttttatttcctctgctggaataggagaaagcttaatnnnnnnnnnnnnnnnnnnnnnntgaattatctgcattcaccactgtatatgcatatagtgacaatataacctgtctataccacggtagttccagtcctaactttctgaattattcttaaagatcttctctaacaagctatgggaatttggcttcatactcttttttttgcaacagcattgttctgggtgataattttgaattgatacctgttctttttttcgggttttgttggctttttgaaaaattgtcttttcttatcattggtgggtggcttggtagcaaaataacatttttttggaaaagaggacagaaaaattgaannnnnnnnnnnnnnnntattctttttttcctacttcgtcattgaaaattgaggaatcacttttaactgttttaggtgtgtgtgtccagagtgagcaaggactatgtttttggattgtcaaagaggatgcttaatcttaaaataaaaataaatttaaaaatcatcttataattagaacagagttgctgctatttgttctgtcaccaaggcaactaatcacattttaaaactgtttggcatataacatattcttaaagtaagaagaaaaaggtcacagaatagcatctcttttacctgggcttatgactgagcttaggttttagggcccatattttgtttaaaccagatagtttcatggtcttcgattcaggacattttgtgtaaaa

SEQ ID NO: 6335 - DNA, 721 bp, Macaca Fascicularis
  misc_feature (1)...(721): n = A,T,C or G
ggacagccatgtacggtgaagagttctagaaccagctaaacgtggaagtttgggtatttnnnnnnnnnnnnnnnctttacggatgcagccccagtaagctggttttaacctcagctccttccccatctcctcctaaacccaagcccttttatannnnnnnnnnnnnnnnnnnnnnnnnnntacatatttatgtgctgctagtctcnnnnnnnnnnnnnnnnnnnnnnnnnnnnnnnnnnatgaggtctaaaaaattactaatcgagaatattattctttaaacagaactgcctttttctactctttatgtaaactctttctattgtgttggtctaacaaggcactattttaaaattttttaatttctcccatagcacttaaaagagattttgtaaagannnnnnnnnnnnnnntttgtaataaaatggtctaagggctctttttccaacattaccattttttaaaaatgttttaaaagctagaaaacaacttatgtatattctgtatatnnnnnnnagcacatttcatttatggaaatatgttctcagaatatttatttactaatatatttatcttaagccatnnnnnnnnnnnnnnnnnnnnnnnnnnnnnnnnnnnnnnnnnnnnnnnnnnnnnnnnnnnnnnnnnnnnnnnnnnnnnnnnnnnnnnnnnnttacatatttgcagaccaaaaatgatttaaaacaagttgtagtcttct

SEQ ID NO: 6336 - DNA, 701 bp, Macaca Fascicularis
  misc_feature (1)...(701): n = A,T,C or G
agaagccaagatccgggcagtaagaagtgtttgacnnnnnnnnnnnnnnnnnnnnnnnnnnnnnnnnnnnnnnnnnnnnnnnnnnnnnnnnnnnnnnnnnnnnnnnnnnnnnnnnnnnnnnnntgcaccctcgtctccaactccaggctaacaaacggtccccccagcctccctcctccacggcggtgcctgactctcagacagtgtgttattaggacgatnnnnnnnnnnnnnnnnnnnnnnnctttatccgttcacatgctcactctcggaatacacagagctcttcgtgcctggggagatgaaggccactgagcagcccgtgttccgggctctgcttgggcnnnnnnnnnnnnnnnnnnnnnnnnnnnnnnnnnnnnnnnnntgtgtggcctggttcctgcccctcctttctgtgtggttatgttattcatttggaatgtaggtttttaaatttgtttatatttcattttagaattttactcccattcttgattttttcttttttttttttgaaaatgggaaagataaaatatatttagtaaaaagaaattaatcttttctttaaaagccaaaaatttggtcttttattaaaccagctgtttaattttatgaaaacttcaatccaagggaagtatataacgcatattactgacacaaatgtatgtagttttgtaaaagnntgccagtcttttcatgga

SEQ ID NO: 6337 - DNA, 777 bp, Macaca Fascicularis
  misc_feature (1)...(777): n = A,T,C or G
acagtatgcattgtannnnnnnnnnnnacagacagatttcatgnnnnnnnnnnnnnnnnnnnnnnnnnnnnnnnnnnntccannnnnnnnnnngggaaggacagatggcaaggaaacccttcgggggggagaaaaaaacgtcatattgtgttggacctacagattactagaaccatagctttagtaaaccaaggctttttttcttgaacacaatctgtgtagactgtgtagttcttgattggtggctttaatccgttatcattaggtatctccttgaactttctcaaacactgaaaatcttaagctttcattaaaaaaaaaaaaaagtaaatgnnnnnnnnnnnnnnnnnnngattcnnnnnnnnnnnnnnnnnnnnnnnnnnnnnnctccctgtcctgtaattaccaacagcaggtacccgggtggtagacaagaagccttgcgggatagataaggaaatgaggaggaacaaacatatcacatggtatcataaacatactttataagtacatttcttattagcttcttcttcgggcagagattataaaagtnnnnnnnnnnnnnnnnnnnnnnnntttgtgttttggaaattatcagtgttcacaatacctgcagggaagaaaaaaatacaaaaactcaaatatgaatactgtttacacccaaaagaacatttttatcattcttttctttgttttaggctcaatcaaaaattaaagtgcttggaatgctgtagtctgtgatctcttgaaatttaatcaatgagaacctagcatttt

SEQ ID NO: 6338 - DNA, 2480 bp, Macaca Fascicularis
taataaattggccctattttgtttttatcattgacaatctggctctaagaactcttgtgtgtttaagaggcagttggctgaggattttagaaagtgggatgcagagagacatttagagaacagtgcttagtggcacaagagcacactgtttctctgcacgtaaataccccatttcgcaggcattctgttatttctatcctctttccactaatttgagcctttgtaaaatatgcattgcttgccttttccatccgtttatcttctctctgtgtccattcttctcctggaaaaactgacttttaggaccatataaatactgtgtatggtcagttggagaacaccctcagctgagaagggatggggagcaggaggaaaggggaatgaccctcacctttggcaaagctgtgaggtggctccctccagagccctgcccctcactgttatatccttttctttttctagaggcttccttcctgcctgcttcacatatggcagtctatagtttccttcccacttctaggaaaactgagagaaatagttttctgtcctttacatctcaaagtagattcaagtcagcctgttttctctccttggggtgtttacattttgaagtctaagtttaatttaatataaaagcctttacctctagttaaaatcattttaggcaataggcccattggaggttacctggttgccggagaaccttttctgtcctaaaagcacactagtcaatgtccactgatagatctctccaaaataaaggagtaggggcacacccagagcacacagacctcaggacttagttcatcccagttctgaactcttctagtctcagccatttctaataacaacaaccttttaacctcttctgcttctgaacaaatgcttgcttatttcacagctcagtatctaaatctaatcaagtcaattatcatgcacaacctatttgtataaatattttagcaaatgtagcaagagtaaattattactagctgtaaatagaacatctttctaaactgtcacacattgccttagcataaaaacacaaaacatatatgaattactaaaaaaattgacacttattttttgcttatgaaatatgatagatcctttgtgagatacaaatcttaagagattgtcttggtattacacctgggtttatcagctaaatcatcattctaattataaatattcagggacacgactttctagaaatggagtgctaaattaaaaagcaaaccagtgtctgttaaaaagcaaacagattgtctgttttctgcatagacacagggtgctggaggtggaaaagaaactcttgttaccgatggcgatatgcagaactggctggtgggggtcttgagacagtttcatcaaatgtgcagaattagggcaggtctagtcacagatgtacagataatgctggagatgggactcagttcacccctgaagagggaaaacccacacatgactgtgatgagaccatttgggctgcatggtgagccctagtacattccagtgagccgcaggtctccagacttgggctgaggctcagcagtttttctcgggttgactgctgatggtgacgaatgggagcagggctcttagctcatggttttgacacccatgtgctctcccagatctcagcagggagctttacacacgtggcagttgttattttctgatcatctctgctctgtttacacagagtggcttcaaacactcctcagggtattgtctgacagatgtgctctgggacaaatacaatttccctgtgtgtgaaggaggcgaggctggcaatttgaaaatggaaaaatgacaaactcattcagtcattttatacccagcaaggagtttttgtgtccccagtttggccctcagctccaaagttacttttgtgcatctgagtgttattgagtcaaagattttggactctttaatcacttggaccatggagaatatggcaaagtgtcagccaagtctacttgagagacagaattgctgcctgttaaaaaggaaggtgataaatatggctgatttgttactatgatcaagtaggcaaaataattcattaaaccataaatttgtccaaaagcgtattagaaaactgtttgtcccagacagattcaccaaggggtagtatatttctaatgctgtctccaaccaaatgcttttataagtattaccgtttctggaaatttgggaaaatgttgaattctggatctttctgctctaaaagccttagtgattttagaattggaggcacatgaatatattttgaaagcaacatgctgaccaattagggatttgatatagtcaaaattgtgaagtaatgaaagtttgtctgaggcatcttgtggtaaccagctaggatttttttgttctacctgggagggattttttttgagaatatgggtttttgtttttgttttttcttatgacccaacactacagtgcttaaaaaaaaaaaaaaaaaggccaca

SEQ ID NO: 6339 - DNA, 1880 bp, Macaca Fascicularis
  misc_feature (1)...(1880): n = A,T,C or G
ttttttccccagtcaagacatctgtgcatgaacatcagatacattctttttgcatttgggaactcctagacaataaggtaacccactcctccgcttctgagagagcctttgaaaaatctagcataagcctatactcacagcttaattggaaagatttattaacaagatgatcctgttgctcatttggcttctgaaagctacataaaattgagaggatgaatggtcgtaattcttttgtgttgttaactggaagaggcaaaaccaacataaaaggactgctctattagttagaaatcagaattttattgggggaggaagagaaagttgaatagccactggtgaaaatataacttatttgttatataaaatagttgtcttttctcatgtgctcacttctggtttattttcaggcagttacaaaaagtagaaaaagaactattactttccatgatttatatagttgcatatctgatatgggaatacttcaggttgtaggtagcttttggttttctgtttgtgactgagttagtttttcagggtgacattaagaataggcgggaagagtgcttaggtatgtgtggattatccatagtgaagtatggggaccttctctgctgaatgcccagaacttggagcagctcacctgggaggtgtatgtttagggaatacaaatttatgttgattttagtttacccttgactgaaaagcaaatgtagttttaaaaaataaactgctttttaaaatgtactttggcagatagcaggcactcaaagaaatgagttttaaataaagctgtgataatcagaagttaattatttagcaacctcaataagctagcatctatacaatagtgactaaaatatacccaaagtgctgggattacaggcttgagccaccgcgcccggccaaggttttttttttttggnnnnnnnnnnnnnnnnnnnnnnnnnnnnnnnnnnnnnnnnnnnnnnnnnnnnnnnnnnnnnnnnnnnnnnnnnnnnnnnnnnnnnnnnnnnnnnnnnnnnnnnnnnnnnnnnnnnnnnnnnnnnnnnnnnnnnnnnnnnnnnnnnnnnnnnnnnnnnnnnnnnnnnnnnnnnnnnnnnnnnnnnnnnnnnnnnnnnnnnnnnnnnnnctgacctcaggtgatctgcccaccttggcctcccaaagtggtaggattacaggcgtgaaccatacacctggccaattttgggttagtttttaaaaaataaagacactgtattgataaaggactgtgcagtacctgactaccataatgtgtctcactggctttaaatcaggccagagacagaagtaaaatattataaataatgcatacatttgaggattccacctccacttaccatgtttaccccaaaatgttctnnnnnnnnnnnnnnnnnnnnnnnnnnnnnnnnnnnnnnnnnnnnnnnnnnnnnnnnnnnnnnnnnnnnnnnnnnnnnnnnnnnnnnnnnnnnnnnnnnnnnnnnnnnnnnnnnnnnnnnnnnnnnnnnnnnnnnnnnnnnnnnnnnnnnnnnnnnnnnnnnnnnnnnnnnnnnnnnnnnnnnnnnnnnnnnnnnnnnnnnnnnnnnnnnnnnnnnnnnnnnnnnnnnnnnnnnnnnnnnnnnnnnnnnnnnnnnnnnnnnnnnnnnnnnnnnnnnnnnnnnnnnnnncgtgcccggcccccaaaatgttctttatttcattatagtggtgaagatgacagttgaatttcagcagtaatttttttttttttttttttttttgaaacagagcgagactccgtctaaataataataaataaataaatataaaaaacaaaaaaaaaaaaaaaaaaaaaaaaaaaaaaaaaaaaaaaaaaaaaaaaaaaaaaaaaaaaa

SEQ ID NO: 6340 - DNA, 2149 bp, Macaca Fascicularis
  misc_feature (1)...(2149): n = A,T,C or G
ttaagtgcaaagtctgaaggtagataataggttagtgtgatgtagactgtaagaagagtccaacatgcctgtagccagaatgcaagaagaagaatctcatgaggtttggctgagatggtaaacagaggccaagtctcgtagggtctctggggaccctgtaaaagagcataaattattatcttagtgaacctggaagcaattggagttttctaaatggagggaatgacatggcttgacttagagtgaaaaatgctccgtcttgtctgcataaaggaagacttagaaaaggaagtgggggaacttggaagcagggagaccaatgaagcttttgttactttagctttagttctcttaagtttccagttgcttggaaaaaggtggtagaggtagtaaagatggatatatgtaagttgattaaagtgagttttttggaggtttaattcaacaaagaattggcgattgacttgatctggatgttaaaaaaaaagagagaagtaaaaaatgacttttccatttctattttgagaaattgggcaaggttgatgttatttgaagttggggagaactgcacgatttcctgccctcttaaattcacactgtggaagagacagaaaataagcaacagaaataagtaaaatacagtgtgtgtgccagatgttggttaacagctatagagtaatgtaaagcaggggagggggttgcaattttcagtagaataattagtggagtttctactaagaaggtgctatttgaacactggtcgtacttaaataaaagcataaaccacatttgggggtttctaatgaatgagaaggaattctaagtgcaaacatgttaagcagggaagtcagggtccctatactgaagtttagcagggctgaggcataagaggggatcagtgtgataagaggacaaggttgtgtacagctttgcaggctgattaggactgtgcttttactctgagtcagatcaaaagtgactggaaagattttagcagggacaaggcctgaactaattttaaaaggctctccttatgttgagaacaggcagtcagaggcaagggcagatgcagcaaggttttccataataaaccagaggagaaacgagggatactttgaccaagctggttgcagagaagtttgtaaatttacaagaaatggttggcttctggatattttgaaattaaagtcaactgacgacagctagaacgtgggatgtgagagaaagggaggtgtcaaagccgattccaaagtttttgatttggacacctagaaaaatggagttgtcaagactgtgccagaagtagaccaggggcatagatgagcaatttgtgtgcaggcatggtacctttgagatgtttattacatatcaggtggagatgaacctgaaattcagggatcatgagtatgtcaatatacatgatatttaaagccagaagtctaaaacgattacaggggattaagtttgatagcgaagatgtacaaatattgagttttgatgtctccaatgttaggaggtggctccagagaggagaggaggaacctttgtcccaagaaggcttaaaaggagtggcttgtgaagtaccaacaaaacctgactcaatnnnnnnnnnnnnnnnnnnnnnnnnnnnnnnnnnnnnnnnnnnnnnnnnnnnnnnnnnnnnnnnnnnnnnnnnnnnnnnnnnnnnnnnnnnnnnnnnnnnnnnnnnnnnnnnnnnnnnnnnnnnnnnnnnnnnnnnnnnnnnnnnnnnnnnnnnnnnnnnnnnnnnnnnnnnnnnnnnnnnnnnnnnnnnnnnnnnnnnnnnnnnnnnnnnnnnnnnnnnnnnnnnnnnnnnnnnnnnnnnnnnnnnnnnnnnnnnnnnnnnnnnnnnnnnnnnnnnnnnnnnnnnnnnnnnnnnnnnnnnnnnnnnnnnnnnnnnnnnnnnnnnnnnnnnnnnnnnnnnnnnnnnnnnnnnnnnnnnnnnnnnnnnnnnnnnnnnnnnnnnnnnnnnnnnnnnnnnnnnnnnnnnnnnnnnnnnnnnnnnnnnnnnnnnnnnnnnnnnnnnnnnnnnnnnnnnnnnnnnnnnnnnnnnnnnnnnnnnnnnnnnnnnnnnnnnnnnnnnnnnnnnnnnnnnnnnnnnnnnnnnnnnnnaaaaaaaaaaaaaaaaaaa

SEQ ID NO: 6341 - DNA, 746 bp, Macaca Fascicularis
  misc_feature (1)...(746): n = A,T,C or G
acagagtttnnngaaaatatnnngagccaagaattatatannctgccaagttatcatttctttacaaaggaaagtggaagacattcttagatatacaggggttaggaaagtatatcaatcaagaaccttccctgaaaattttgctcaatgatttactgcagctaacagagaacctgaattaaaataaaagaatagggaggcaattgtatgaaagannnnnnnnnnnnnnnnagaactagttaaggagcatagagtttaaattgttatgtatagggcattaaaactaaatacaaaaatagaaacgtaagctaggtctaaaatttcggtttacatttaagctggaaaggcatnnnnnnnnnnnnnnatattgaacaaatagtgttttatttttagcatgtattgtggatacaaatatgcatgttcttaagctaaacctaagnnnnnnnnnnnnnnnnnnnnnnnnnnnnnnnnnnacagcattctaaatgtcaaatctgacaaaattggaaannnnnnnnnnnnnnnnnnnnnnnnttttaagtatagcaggaannnnnnnnnnnnnnnnnnnnnnnnnnnnnnnnnnnnnnnnnnnnnnnnnnnnnnnnnnnnnnnnnnnnnagtgggtggatacatcctcattttctgtacgtgttgcatggggaaaannnnnnnnnnnnnnntcatatagtttatctaagtaaatttgacatggaaataagtgttaactacaaaaatagaatata

SEQ ID NO: 6342 - DNA, 733 bp, Macaca Fascicularis
  misc_feature (1)...(733): n = A,T,C or G
gacatgcaaggaatacagtannctcacatcaaggatcatnttatttntttcttcattttatgtcattttccattattttattagtgttaatctagcattaattccccccagagggaatgactatttttgcttgnnnnnnnnnnnnnnnnnnnnnnnnnnnnttttctttatctgcttttctgaatttcatatttatatgctttattgtagttttttannnnnnnnnnnnnnnnnnnnnnnaatctttcaagtattaatttataatgaactttccctnnnnnnnnnttgtttaggagggctaaatattccatattccttttgttgctgtagatatgcatagctattttgatgttctttgagtgctttattatagtgatnnnnnnnnnnnnnnnnaattcaaggtgggctatatggagttaagcatttttatactattaactatttattgagaattttcggaattctgtagctccttgtcttaacagttatgagaggcatgtattttttttcccttcatggtcttgaagttagttttctgtttgtttgggtagatctgaatgagttgttgagttatgttgaaaacacacatgaatcaaaaaagcggttgtattgtagaaatgtgatgttttcatgtttcgggaatttgatcagaaagctttatgtatgggttttatttttaacaaagnnngtaagggcttactttttaccaacttgtgtgtgtgtgaagatgtat

SEQ ID NO: 6343 - DNA, 713 bp, Macaca Fascicularis
  misc_feature (1)...(713): n = A,T,C or G
cttttttatgagacagggnnnnncntggttgcccagacnggagtncnagtggcacattcgtagctcactgcagcttcaaacttctgaactcaaacgatcctcccgnnnctgcctcctgggtagctgaaaccacaggtgcaagacaccacgcccagctaattattttttgtagtgacggggttctgtcatattgcctggactggtctcgaactcctgggctcaagcgatcctcctgcctcgccctcccaaagtgctttacatgactgagcctctgcgcccagccagacttggttctcaagttacttctggctgtttacaaaaactcattccaaagatgtgcagcgtattctcatagcatttccaaataagctccaagaaatgtttttggtaatggaagcagaaacaagcctgtagctcatgactgctttggaggagcaacatttatttggatttgtaaatgtagtgtgttaaaaatgacttatcacagatatttggaatcttcccactgatttctgcatggctggttgtttttcttcccttaagtctcagttaatgtcagagggcttctctgacctctcccaccccaccaccatcaacctgttttcttcatagcacctatcacagtctgaagtgtcttattatggcctgacctatccctaacacccatttaaaaatgtaagcatgaaagaaggaacgttgtctatcttgttcat

SEQ ID NO: 6344 - DNA, 734 bp, Macaca Fascicularis
ccaccaccgtgctaacaccactaccagtgcaaatgctcatacgaacacctgcggggctcctgcccaccccacccagccttgctgacaccactgcattgaacactgacacggaggccagcacccctgcacccacgagcagcccactgcagccaacaaatgtgtacgtcccagaggaaaagacatcatcacatcagaaacacacttgcatacatatgtttattgcagcaaaattcataattgcaaagatgtggaatccacctaagtgcccatcagccgatgagtgaatgtggtacatacagacaagaaaatactattcagccattgaagaaaatgaaataatgtcttttgcagcaacctggatgaagcagggggccatgacactaagtgaactaactcagcaatggaaaaccaaataccgtatgctctcacttacaagtgggagctaagttatgggtaatcaaagacatataaaggggtataatgaacattggagacccacaatggagaaagggggtggagggtgagtaataaaatactacgtaccaaatacaatgtacactactcaggcgacgggggccctaaaacctcaggcttcaccactgtacaattcattcatacaactagaaaccacttgtaccccaaaagctattgaaataaaatatattttttagaaaaaactataatacaaggctacagtaaccaaaacattatggtactggtacaaaaacagacac

SEQ ID NO: 6345 - DNA, 1654 bp, Macaca Fascicularis
ctcgtttacctagcagctcggctagtcgggcactagtagtgtgcttcctcgcggctgtcgttaagtcccacgctgttgactgtgacaccgatctccgattctgtcctcgaggcactaaagatgtggcgaaggcccgaagtgaggccgctgccactgcacttagtcctgcgactccccaaggactggccgaggaatggcgggctagccacttcccagtcctgtccctacgggatctgaaaagactcggcatcccgggatccggagggtcacttccctcgctgcatccccattgtgcaactgccagtctcaaaattgatgttaatctcctggagaaactagaggcagccaaggaggatgctgttgcaagagattccaggaaaagataatgataatgtggacttggaagatggcagaggagttgcagaaaagtgaccagattttagagatgtccagctccaacctggtttcatagacatggtaatactggaacaacctcttctccaagattctcaggcagtcagaggtcatggaagacccagcatgtgggggaaacttctttattctgctatccaaatataaaatctataccgaagtagctcctttgtcccttaaccttagtaagcaaatttgattaagcatttgaaagctatagaggtgcaaggtgggagaaattctgcctctgctacttggcagctctatgatattgggcaaaccactcataccacatttattttccttatatccaaaatggacataataataccttcttacttatctcactgggttattggaatgatcatagtgtttgggtggttggttgtttctaggaggtaataatgtatgtgaaaataattggtatatggaaaaggattaaatactagtgctgaaacattatacatattaacatgcctttaaatctgtctccctaccattccatcatttattttcagagtcagttttactgagatacaattaatgtattaatgtatgtgtacagctcaatgagttttgacaaatgtatacagatatgtaactaccacaatcataatatagaatatatcaatggccccccaaatttcctcatgcccctttgcatttttatactttaaaagtcaatatatacccaagagtgattaaaacataccttcccaaaaacttgtgtgtaaatattcttagtagcattatgtgtgatagcccccaagtggaaacaacccaaatagccatcaactgataaatggataaataaaatgtatatccatgcagtggaatataattcggccatgaaaggaatgaagtaccaatgtctgctacaacatggatgaacctggaaaacattatgttaagtaaaagaagccagtcacaaaagaccacacattgtatgactccgtttttatgaaaggtctagaagaggcaaatctatagagacagaaagtagtgtttgcctcatattgggggctagggaataatgatgaatgactgctaatggatgtggaatttcttttgggggtaatgaaaatgttctaaaattgattgtggtgatggttgcaaaactctgaatataataaaaccattgaattaatgccaaaaaaaaaaaaaaaaaaaaaaaaaaaaaaaaaaaaaaaaaaaaaaaaaaaaaaaaaaaaaaaaaaaaaaa

SEQ ID NO: 6346 - DNA, 750 bp, Macaca Fascicularis
aatgaggaaactgaggcttagagagctaaggaaccttccaatgacagccctggaagaaataaaatgccctgactcccaatcctgggccatcccctcctttctggcctgctgcgtgctgtggtctcccaacattcacacctccacacctttgacccagccactctccttgcctggaatgcccttgccagtctctgcctgcctacatgaaacccatcacccaggcccaagttggctcagaatttctacagggaacccttccacatccttctctctcctcccctttgctcttcaaactttatgaaatgcctcatatataccaagcatgtgccaagagtgatgccggatgcagagactacaacaaataacaagatttggtctgttaaataagatttgtaggagggttattggtctggactgagctcctggataagctccaacagaccaaatcaaaatggattcactcatgctgaagttccatgctacaaagccaaaactaaattgtttatctgatcttccaagaaatcaggacacagagagataatagccaaatccccaaacaggccacttctagccagcatgacaggaagtcccctctgctttaaccattataaggaaagcaactttgaaatcagtctgctttttgttctgtctgcttacttcagccctttctgcctataaagccaatctcctctgttcagctcgtcaaatgatcattctattttataagaatgaggtattgcccaattctaa

SEQ ID NO: 6347 - DNA, 674 bp, Macaca Fascicularis
  misc_feature (1)...(674): n = A,T,C or G
ggggcagacagtgctgtgccttnnntaacttcaggatgttccaaggatgctgctggattgcgtgtgtgtgtgcctgaccctgatttctgcaacctccagatttctttcttgacccttcaaagtggaacagtccagtgacaaaaattttagagtttgagaaggtcacagaaatcctccagttggtgccnnnacagtcttcattttacagaggaactcaggcctaatggagttaatgcaactagatcagggttttggttatgtgttgtttctaccatcagcacctgtgtgctcagttcggacacttttcccagagaagtcttggagtagagaatcctactcaaatgtcactgtatattttaagtgttcctctgttttccctttgcctcccccattgccttttcttcccctgatttctcctctggtcatctcctctcccttcggcgtgtaagccatgggaaggggatcgaggggaggacagcttctggttaaacacaggtccctcttccacatcaaatgaacattggcttcctgggacagaaggccttcaaaggannnntcctccctcaaaccacatgtgatctctgaaaaaataaacnnnnnnnnnnnnnnnnnnnnatgtctgtggtcccagctgctcaggagactgaggcagnnnnnnnnnnnnnnnnnnngag

SEQ ID NO: 6348 - DNA, 665 bp, Macaca Fascicularis
  misc_feature (1)...(665): n = A,T,C or G
tggatgggtgactntgggcaatggaccttcacatcttcaagcctcagttttctcatctctgaaatggggttatgatacctgcttcatggggccattgtgaggataccgtgagatcatacatgagaaaaacgcataaccctggtgcctggaacatggggtggctggttaagtgatagctgttacgggattcaagagcgtgaatcctgggccattgcactgctgatacttggtggatgctgttgagcaagtgactgcacctttctgtggcctcagtttcctcatgtggaaaatgggggacataatagtgtctatctcataggtaaattattcagagagatgtccagcacggagtaagcacaccctaacagctctttcaccggtagttatttaaatatgtattgtgagatacattcttgcaccttttttctcactaattctagaaacagagactcggagatctgaaagcggaacagcgtcaaacacacacatcacccagaaacctagaacgttagagcttgcaagaagctcaaagaagctcaggcctaatctgaaacctatgaacagaacccaatccgatgtaacaaatacttattgagcacctactacgtgcatgctcttcactggacattggaatccaaggctgatctcagccctgaacagctcag

SEQ ID NO: 6349 - DNA, 319 bp, Macaca Fascicularis
ctttgccgaccggggcctcccagccatgatgcgtgcacactttgcgggctgcacgccgggtggctgtggctgggggagaagctgtgttgactgggagagcgttggaaattcggacatcgagagatgacgggagtgagtttctttgggtttgatctccaccccgttttctcccagacaccgcacttaacttgtgggaatgccgttgcctgttctacccctttgttcactttgcgttaactgctgtggtaactttttcaggatgtgtgtgaagaatggtaatgacatagtcgaaaagaaaatgtactgttgtgctgtttca

SEQ ID NO: 6350 - DNA, 756 bp, Macaca Fascicularis
  misc_feature (1)...(756): n = A,T,C or G
cgatgtcaagatgggnnnnnnnnnnnnnnnnnnnnnnnnnnnnngtatannnnatgttacccaaagaagnnncctatcagaggtttggaacacgcacacgcttagttacgatacttgtttctctgatgggtcttcaggctccccagtgnnnnnnnnnnnnnnnnnnnnnnnnnnnnnnnntacctttggtcatttttatcaacgtggatgtaatgtgcatgcccttattgagtttggttattctatcgattctattctttgtaatattaaagagacaaacgagagcttgtataaattattaaatgatgagaaacttgagacctacaataaagagaacggtaaacaagnnnnnnnnnttcaagatcatcagattgaacccatggaatgttagaaaaaagatgctgtcttcaagaaaatatgccaataattnnnnnnnnnnnnnnnatgacaaagacacccaaagcannnnnnnnnnnaccaaaaattggcaaatgggacctaattaaagcttctgcacagcaaaagaacctatcaacatgctaaacacacaacctacagaatgagagaaaatatttgcaaactatgcatccagcnnnnnnnnnnnnnnnnnnnnnntgctacaaccacacnnnnnnnnnnnnnnnnnnnnnnnnnncctactagttgcaaataaatctccactgagttattcatgtaagtgttttataggataaatcagttgcaaaaacnnngtttttaaatagcatgcaaataaag

SEQ ID NO: 6351 - DNA, 1739 bp, Macaca Fascicularis
gacgcgacttcttgtttggcgagggtggagcttcgaagtgagacccaggaggccaaatcccaaaaagcctaaaataaggatcaggaccaagggaagggaatcgtgaaaaatggaagacagtagcacagacacagaaaaagaagaggaagaggagaaagatgaaaaggatcaagagcccatttatgccatagtgcccacaattaacattcaagatgagcggtttgttgatttatctgaaactccagctttcatttttctgcatgagttacatgctatgggaaaacttcctggaaccagaatggcagagttaaaagccaagtataccttgctgcatgacgccgtgatgagcacacaagagtcagaggtccaactgctacagaatgccaaacgtttcactgagcaagtacaacagcagcagtttcacctgcagcaagctgataattttccagaagcattctccacggaggtctccaaaatgagagaacaacttctcaagtatcaaaatgaatataatgcagtgaaggaaagagagttccataatcagtacagattaaatagcttaaaggaagaaaaaatcatcataatgaaagaatttgagaagataccaaagccaggagaaatggagaagaagatgaaaatattgagagaaagcactgaagaattacgtaaagaaataatgcagaagaaattagaaattaaaaatttacgagaagatttggcatctaaacaaaagcagttactaaaggagcagaaggaactagaagaattgttggaacatcaggtcgtcttaaaggatgaagtggcccaccatcaaaccattccagtacaaattggaaaagagatagaaaaaataacacgcaaaaaagtagaaatggaaaagaaaaaaattctcttggaacaagaagtcaaaaacctaaatgactccctaaagaaagttgaaaacaaggttagtgctatagtggaagagaaggaaaatgtaataaaggaagttgaaggcaaacgagccttacttgaaatcaaagaacgagaacataaccaattggtcaagctattggaattagccagagagaatgaagcaacttcattaactgaaagagggatattggatctgaatttacgcaacagtctcattgacaagcagaactaccatgatgaactttctcgtaagcaaagagagaaagaacgggattttcgcaatttgagaaagatggaactgctcttgaaagtgtcctgggatgcacttacgcaaactcaagcaatgcatcaaaggcttctattagagattgaagctatccctaaagatgattctacattatctgagagaaggcgagagcttcacaaggaagttgaagtagctaagaggaatttggcccaacagaaaattatatctgaaatggagtctaagttagtagaacaacaacttgcagaagaaaacaagcttttaaaggagcaagaaaacatgaaagagctggtattcaaccttgtccgcatgactcaaatcaaaattgatgaaaaggaacaaaagtccaaggatttcctgaaagctcagcaaaaatataccaacattgttaaagaaatcaaagcaaaggatcttgaaatcaggatacacaagaagaaaaaatgtgaaatttatcggagactcaaagagtttgctaaactgtatgacaccattcgaaatgaaagaaacaaatttgttaacttactccacaaagctcatcagaaaaaaaaaaaaaaaaaaa

SEQ ID NO: 6352 - DNA, 710 bp, Macaca Fascicularis
  misc_feature (1)...(710): n = A,T,C or G
gtatgagaataatttttaatgtcntaatgatnnnnnnnnnnnnnnnnnnnnnnnnnnnnnnnnnnnnnnnnnnnnnnnnnnnnnnnnnnnnnggggattggtttttaccctagacttcactcttaaaaagcannnnnnnnnnnnnnncatttatggctcaaatgaaagcatataaggttttcttgaagttgtgccaaagcattctgtagagtaggatgagatgggtgttgccctagtctgttggtagacccagaaatcagtatgttgtcttaggttaaagcttgtaccaaaatatttatttcccccgtttcaagccctgagtcaaacatttttttctcttaataatagacctgaaatgttttattagtatttctgtgaaatcagttgattcttgtgccatttttatatatgtaattgtaattttgcccatgttaggccctctaaagaatgtttgacatcctttgagatattttgttaataaaatatgatcttttttggctaccgcaaaaatctattcagcaagaaggtatcagctgcgtaccttgcacagtggagctgaccgcctataaactctccctaaggtatttgtttacaggtgtattccattttagnnnnnnnnnnnnnnnnnnnnnnnnnnnnnnnnnnnnnnataaatgcgttctgaatcttttcatcttattgatagcatttnnnaaatnnnttccaaagaa

SEQ ID NO: 6353 - DNA, 716 bp, Macaca Fascicularis
  misc_feature (1)...(716): n = A,T,C or G
gccctgtgcaagtgaccaggaggacaggagaggccgggcctggccagggcagggcccagcaggaccctaaggactcttcagggagtcctggtgggaagtgcccactgaggggaagcctgtgtgttggaggctcttccagatgcgttcagctggcccgcgcccactcgctgggccttaggctggtgtatatggggaagttgtaacggctttcctggtgggaagggatgttgctctgcttttatacagttggccatctgtagctaccctgttcttcccaactctcctccctagctagagcaccagccctgggaacacagggctttaggtctgcttcaaggtgaggacgtgactcccacatataatcaggagaaagggacagaggaagccccagcccccactgtggctatcctgacttcagtggccacatctcaggtgccaggggctgtgggagcttgagccgtccttggccaaacacaccgcaggcaaggatgcacccctgcggatggatagccttctgcttctgccctctggccctctaccataccacttccccagccagaactggggtgcagctaggaggaatgggttgcacggcggaggtgggtgaggtgggaggcgtctcacnnnnnnnnnnnnnnnnnnnnnnnnnnnnnnnnnnnnnnnnnnnncctgttgtggagtgttctcatcagttttggctttctgagattttggga

SEQ ID NO: 6354 - DNA, 1806 bp, Macaca Fascicularis
  misc_feature (1)...(1806): n = A,T,C or G
aagaagataaagaaacacttcagatgctgtggcccctcaaggagcttaccattttaagacaaggtgtatttactggaaagacttagacaagggtaaagggagtgcatggtaggctatttttacattacttgacaattcagtgcattatagactatgttatgaagggtagagagcaaaaaatacagaaaatctaaaatggtgcataatccagagttacgtttattacaaagagtgttttaaaaataataatagcttataatttactaatcaccttgacaggtgtttttggtgcttgcttttttgaaaacgagtatgtctactctgaaaagtcactttaaaccagtaaggagactgccagggaaatgtctgatttgggaagtggtggcaatttgccttccccaggcatttcgtacagtttcattgtgctttcgtacagtctatgtgctttctggtttgggggaaaatagttaaatggtttggtttccaaatcttctttgctagtttgcagatggcatgattaaagaaaataagacagatgtgggacccgacaggcaaattgtgccaaagtggaggatgtggcaagatacacacttaggagaataatcaggagttgatgaccctgcttgctgtggagcgggctggaagcttctgctggtgcggcgggtctatcctgagctgggctggatgcctcagtgggtaccgctgtctttgcaatgtctgggtcacagaagaaacactggtgagctgagcaaggttgggatgccacttcctgggactcccccaggcatacctagaggctcaacctctgtacttcaaggcatctcaaagctgaaacagaacagtgacctctcgaactcagccaggcagagctattctggatgacatcctggggaattctgaatggggccatttctttcaggcctcagaaacatcctctgcaaagtgggatttatgatgtggcccagatgacacctctgtgcctggcctgcccctcacctgaccctcttgcatctcatcacacggatgacttcactctgtattaccagtctcctgggcatcctgggacccagagtcacaggccgcagagcaatgttccatgcccgctttgaggattgtccagttgaaatatgtcacacccacagtcagggttcccgtggaccatcactgcacggcacaccctggagtagctgctaacacttggacaaaaagctgacctgcctcaaatcccagaaaaaagctgtgttcagtttgggggacaaatttataaatgtcatggatataggcaaatgaatgcttaggaggcctactccactgagcagtacttctccattttactgtgcatagggatgccctggggatcttgttaataacgcaggcgctgattcaatgggtctggggtgggcacctgagattctgtatttctaaaagctcccagacgacgcagatgttgcaagtctaaggaccgtatttttgaacagggagtcatcagggtgtccaactttattccaggatgtgctcatcagttttccctgctgcttaggcttctctgatggtttgctaactccaaatcctctacaagcttgtcaaaacagaggtaaaactagtttctactctgtgtagacatactaccaccttgagatttcatgcacactctaggggggaaaaacttggtgataaatnnnnnnnnnnnnnnnnnnnnnnnnnnnnnnnnnnnnnnnnnnnnnnnnnnnnnnnnnnnnnnnnnnnnnnnnnnnnnnnnnnnnnnnnnnnnnnnnnnnnnnnnncaaaaaaaaaaaaaaaaaaaaa

SEQ ID NO: 6355 - DNA, 699 bp, Macaca Fascicularis
  misc_feature (1)...(699): n = A,T,C or G
caccatagtactgaatgaactgtatactgagttttcaaagaagtatttaaaatagaannnnnacctacaaagcaagggcataaagattttggtttgtgtttctgtaagtgtagtttaccatctaaagctttgttttttaattttaaaaaaagcttcaaggtattgccttccttagcatccttactgattatgggtgatgagtttttaactcttaaaaatcatatacatatattagtttatcttnnnnnnnnnnnnnnnnnnaagggaaggtatacacctaagggttgtacttattttgcatttttggtcatgggtgggaatggggtgggtgcctacttaaatagtttttaaaaaagaaaaaaatcacaaatatttttctactattatatatgatcttcctttatactagtttctctctagtaaggcatgccagaagcccagataccatatcatggattcttatgtattgtaccttttgttggtggttaaatcgcatcannnnnnnnnnnnnnnnnnnntaattataaaatgcttgtaaaggatcaaatatcactaaatactttaaattgttttacttaagagtcnnnnnnnnnnnnnnnnnnnatcatactattaatgtgtaatctaagctcttcnnnnnnnnnnnnnnnnnnnnctggaacaatattgcttgtattcctgtcatagaacaggttttgt

SEQ ID NO: 6356 - DNA, 678 bp, Macaca Fascicularis
gatgtgattaagtttaagtttaaaaatggagaggttatcctggattatctgagtgggccccatctgcaatcacgagaccgaggcagaggcagatctgaccccagacagaagaggagaatgcagcagcgcccgcagaggcagaggctggaatggagcagccccaaggcaaagcatgctggccaccatcagaagccggagtacgtgaggcacagacgctcccctggagcctccaggggagcacagccgtgctgataccttgatttgggcattaacacttattttggactttcggcctctagaactgtgacagaatacgtttctgttttttacacactttgtgtgtaagactgtgttaccgcagttgcaggaaactcacaccagggactagagcagcactgtggtgaccactggtgctggcagatctgtcaagtggaccaggccctggttccagaagtgaggtcctcatgcagaggagaggactgcacacctggaagggaggtggtgattaggtaatgaacagttcttccattcctgtaccaattgaacaaggcagtcccctctctcctattcaccctcatccagcctcctccccaccaaccccatctacctccctagagggcacttgcattcaccttgccactgctctggtgtatttgtttttgcactgctataaataaa

SEQ ID NO: 6357 - DNA, 699 bp, Macaca Fascicularis
  misc_feature (1)...(699): n = A,T,C or G
tgctgccaccctgggttcctctataaacctcgctgctcagctgccgccacaagtcccatgtgccccgcatgcgtnnnnnnnnnnnnnnnnnnnnnnnnnnggtgcgtgggtggcaggctgggcccagcatttgctgacagccactgtgggctggactnnnnnnnnngtggtctctggggacacagannnnnnnnnnnnnnnntccccgcctggcggagttcacagtctagtggaggacagactgttaccaaatggcaacacgnnnnnnnnnnnnnnnnnnnnnnnnnnnnnncaggctgtagcannnnnnnnnnnnnnnggaaaggtgagggaggcttcacggaggagnnnnnnnnnnnnnnnnnnnnnnnnnnnnnctcggaacccttggggtccacaagatgggaagcgtnnnnnnnnnnnnnnnnnnnnnnnnnnngtaggctcaggnnnnnnnnnnnnnnnnnnccagggacattgtcagggtggctggagcatggactgctgggggacagagaagggggtggagcaaaaggttgggaccatgtgaccagggaagatgctggatggaggattnnnnnnnnnnnnnnnggatggtcaggagtcaacaaagggaagagagaggattcactggtcaagagtgtgtcggctgtgacacaagggccatcatccctgaatgcccaccacgtgccccgcact

SEQ ID NO: 6358 - DNA, 1785 bp, Macaca Fascicularis
tagaagtatttcagactttttggttatagagtaaatcccatgatgtaaacctacctcataagtcatgtgacataaaagttaaggtagtggagtaggtgatcttatttctttcatctgctcagagtggaatgaaaatcctgacttagaaaaggtgcaaagttagggacttatggtacattcgctttctatgtgagaacagaaagtatggaaacagtaatttgctcaaaactgaaatctgggggtgatgttttcatttcatgtatttgatggccatccacaaactcatacttggtgttgacattctagttgagtgttgtggaaatagacttgattttgattcattgtagtttgcatagtcaagaaatagacatgattctctactaagggtgggactagcaccatagctcatgaaagaatccttcttacaccagtacttgttctgcctgtgagttggcacagacttacgcaatattcatagtctatctttaagtacaacttaatgcatattttttctgtgtatttttttcaaatgaactcaacaattcttcatgtattacagatcagagatcctctccatattcaagcattatgcttctatttcttggaggtacatttcaccagtgatacttaggaagttattttgtctttcctgtatttccctagttaggtataggagtaaaaacattattcagttttcagaagacattgttctgactccgaccctgccttgtatactcgactatatagacttcaccctgggttttgcctaaactattgaaagacgagaataaatagacatagataggctagctaagtcaagactagggactaaggaatatagactcacccaggtttttttttttttttttttttttttgatttttctctccccaaatgggaacatctatcatgctggaggactgctgtgatggggctttacattttactgttttgttgctagcttattgtttcatatttaggaatcagtcatgtttctgattgtggtataaagtttgcttaagtgccccatagttaaagctattccatgtacgcaaacacacacacatattttgaatagtcatgtgagtgcctgttctcagtcttgccccctttaccatttctcatacatatacaagttatttattgtttatttttttcctcttttttgaccggagaagcaacaaattacatagttttatttgtgtttctttgattactagtgagcttgagtacttttaatattttattggatatgtttgtgaccgactttaatttcttgttcgtgtgtgctgtggctgcccaatccagcacctacttccttctctcaccatacccccccccccaacccctgcaaagaatcatgcatgtggtttgggtggcattgtcacaccctcggctttctagattaacccagttacctttaagcagtgccccacttcccagtagcaatggttcaggggtaggcacctgacccagaccagaccactgagataaagatgtttgcctaggctttttcaggagctattgaagacatctccttggagatagtgtgctgggaggagtcacattctgaacttgctgcagctcatttttctaatataaaggaaccagcctgaggcagtaccaagagaatgagagggagtctgttggagcccttggggacttctggatcaaattggacctgaattgagatctatttctcaactttcacttatgtgagccaataaattccttttttgttgaaggcaaaaaaaaaaaaaaaaaaaaaaaaaaaaaaaaaaaaaa

SEQ ID NO: 6359 - DNA, 702 bp, Macaca Fascicularis
  misc_feature (1)...(702): n = A,T,C or G
actacctgaaccccagacccaaatttggggnnnnnnnnnnnnnnnnnngaaaagaaaagacccacaccgtatcctgctgtgcttttgggcaggaaaatggaagaaagagtggggtgggnnnnnnnnnnnnnnnnnnnnnnnnnnnnnnnnnnnnnnnnnnnnnnnnnnnnnagctgggcggagaatccaccccacagaatgttcagagagacccactccttcattttccagagtcaaaggaatcagaggctcacccatggcaggcagtgaaaagagccaagagtcctgggttctagtcnnnnnnnnnnnnnnnnnnnnctgtataacctttgggaaatcattttccttctctgagtctctggttctccatcagcaataggagggtattaggtcccctgcagggtctttctagctggagcactnnnnnnnnnnnnnnnnnnnnnnnnnnnnnnnnnnnnnnnnnnnnntgactgtcctccttctacctggagctctctgtcctggaaatctccatcagagcaagacagccagagaagcccctgagagggannnnnnnnnnnnnnnnnnnttctccaaccagctcgtcaaagcacactcctatgtctaggaatggcacaagtaaagatgttatattttgtatcttttatatgatatgcnnnnnnnnntctgtaaagggcctctgcattgttgctcccatcaggg

SEQ ID NO: 6360 - DNA, 730 bp, Macaca Fascicularis
  misc_feature (1)...(730): n = A,T,C or G
tacttngtatttntgatacgcacnnnncaggatgacctcagggctatgtggattgagtaatgggatttgaatcaatgtattaatatctccatagctgggaaacgtgggttcaatttaccattggtttctgaaagtgttcacatcatttgggataccagattgctcaatacttttctgggtatattgtgcccttgatttttatctccaagtggcagtttttaaaattggccttttacctggatataaagtaatagtgcctgccaccaccatccaacagacctggtgctctaatgcaaagttatacatgggacagttgctggcatgtcttcattggctgtataaaatgtggccaagaagataggctctcagagtaagaagtctgtgatggttagcagtaactgtccctgctctctggtataaagctctcaaatgtgactgtgaatctgggtgggataagggactcggctctgtctgctcaatgccattgtgcagagaagcaccctaatgcataagctttttaatgctgtaaaatatagttgctgaaattaaatgccactttttcagaggtgaattaatggacagtcgtgaaattcaaaagctttttgatgtataaaacttgataaatggaactattccatcaataggcaaaagtgtaacaacctatctagatggatagtatgtaatttctgcacaggtctctgtttagtaaatacatcactgtataccgatc

SEQ ID NO: 6361 - DNA, 766 bp, Macaca Fascicularis
  misc_feature (1)...(766): n = A,T,C or G
aagatagataaatttcccaaccctgattatgaatcntggggcaggatgatattggtggtattgatggtgaacctttcctactggattctttgcatgccagacagcaggatnnnnnnnnnnnnnnnnnnnnnnnnnnnnnnntggcagcacccaagtatnnttcattctttgcagggaaaaaaatgtgcatgggggctgaaatgtggtatatgtagctcaattagcctatcctctgtgatgcaaaatggaatattccatggcagatctgcccttctgagatgttgaccatccaaaaaaccttgtttatggtgctccatgattagctcacacacaatgccaaggccatgcttgtattgtccgatacatagtttgacaatgggtaattctacccagaccctccctactgattggctaggannnnnnnnnngaactcattttgctactggttgtttggggatccccatagtggactactttcaggaatggcatgaattgtaacaaactgagtgctgcccccactgttagggaagtttataaaaacttagttccggaagacnnnnnnnnnnnnnnnnnnnnnnnnnnnnnnnttggcctagatccaaccaccactctctgaacctcagcacatcttcattgacagggagggagcccaggacatatgtgtggctcattgaccagaagactttcttagtcccagcagccatgcatcatgcacttatgnnnnnnnnnnnnnnnagggctatgtgaaatgcatctttgtaacatc

SEQ ID NO: 6362 - DNA, 650 bp, Macaca Fascicularis
  misc_feature (1)...(650): n = A,T,C or G
gggaggaagaannncctgtcnnccggnnnccactgnnctccctcccagcgtccagtgtctgccccttagcagggccgggccaggcagaatgttgtcaccagtcanatgcaggctttagccatccaaccctttctcctgttcagggctggggctggatggggtctcttcttctcacagttccctcttccactcttcacatacatatatttttggcccagccaaacaagcgcaggccacagaatggaaccagaggggtgtggtctgccaccccaccttgagggcagcacaggcaccacagggtggaggagagggggaaaatgctggaagcctccagatgcccgctggcctgcaggagaaacacgtagcagatgttgttcttgcctctgcagatgccccacatcttccacccaggccccannnnnnnnnntccacagccggccagccctcagctgctcacaaatgattcagtctccctccctcnnnnnnnnnnnnnnnnnnnnnnnnnnncggcaagaatgtacctgtagatgtgtacataccacagtgctgtaattttgtatgtagcaatcatgtaaatacatgtatggattttataatatacatatataaaaattataaaggcatatttttagaaaaacagcacaccactg

SEQ ID NO: 6363 - DNA, 649 bp, Macaca Fascicularis
aagtgagccagcagaggcgggaactgtgagaccaggctgtaggtgtgacccttgccaggaagagagagagggaaggagggttggatgagcaaagtctcagactcagcacagctctagcaaagttctggtcgaaccaactgggagtccttgagctaaagatgtcctcagaggagccctgcatctcccaaggttggtcctgtcttagcatccctgctgtgctcagccttgggtgaaaggaagcccataggaagcatggccttgggagctgaggccttggtcgatgacactcccagcagtaggaaatctgagtggggcattttcatggccgccatccaaagcaatgttcacatcacctgcttgatactgacatgatttaagcccaagggaggtcaggtattgaggtataaggactgtgactttgggaagaccaggttgtggggctcctctgttattgaccgtgtgatcttgatcaggttttttactaacgtgactgagtttttctacaaaatggagcaacaatgcctttttcatgggttgttaagaagataatccgggacctgaagccttctccccctagctccagtgggggaaagctgcatggaacggactgactgacagcctgattcagaggcccagaggaggaagccct

SEQ ID NO: 6364 - DNA, 675 bp, Macaca Fascicularis
  misc_feature (1)...(675): n = A,T,C or G
cnnnnnnnnnnnnnnnnnnnnnnnnnnnnnnnnnnnnnnnnnaccnnnnnnnnnnnnnnnnnannnnnnnnnnnnnnnnnnnnnnnnnnnnnnnnnngtgggggccccggcgcgagctggtgcagcagccgggcacctcggaggaggcgctgtgcggcacgctgcacaactggatcgacatgaagcgggccctgatgatgatgaagnnnnnnnnnnaggcagtggatcgcaggcggggtgtggagctggannnnnnnnnnnnnnnnnnnnnnctggcgtccgcggagcccggggccgttttannnnnnnnnnnnnnnnnnnnncttttgtgagccaagccccagcctgcactgtcgctgccccttccctgcctaaccctttcctgtcttgccttggaagcgcccatgtctccctgggaaatggtacagatgactggtatacctggatgtaaaatatataaatatatatatagaaaatacatataccatatataaatatgaannnnnnnnnnnnnnnnnnnnnnnncacactggtctctctgcaccaagtcctccctgtttgcttccgtaattatgtacatttctagctccatgcnnnnnnnnnnnnnnnnnnnnnnnaacagaatgcagcctggacactggcctccataccttgtttaggatttcttcacccttt

SEQ ID NO: 6365 - DNA, 778 bp, Macaca Fascicularis
  misc_feature (1)...(778): n = A,T,C or G
gggggaggggggaggaatgtgtaacatagttaacatgggtaaagggagatcttggggtgcagcacttcaattgcctcgtaacccttttcatcatttcaaccacatttgctaaagggagggagcagccacgcggttagaggcccttggggtttctcttttccactgacagcctttcccaggcagctggccagttccccattccctccccagcnnnnnnnnnnnnnnnnnnnnnnnnnntctggttgctttggcctgctgccctctttcaggggtcctaagcccacaatcatgcctccctaagaccctggcatccttccttttaagccgttggcacctctgtgccacctctcacactagctccagacacagcctgtgcttctggcagctgagatcactcacttccccctcctnnnnnnnnnnnnnnnnnnnnnncaagccacgaggtcagggcgagggcagaggtggtcaccagcgtgtcccatcnnnnnnnnnnnnnnntcgtaagacttctgatttctcttcagctttgaaaagggttaccctgggcactggcctnnnnnnnnnnnnnnnnnnagacttacccccatgagtttgccatgnnnnnnnnnnnnnnnnnnnnnnnnnnnnnnnnnnatgatttcttcggtaattgtgagggtggggggagggacatgaaatcatcttagcttagcttcctgtctgtgaatgtctatatagtgtattgtgtgttttaacaaattgatttacactgactgttgccgtaaaagtgaatttgaaa

SEQ ID NO: 6366 - DNA, 1183 bp, Macaca Fascicularis
  misc_feature (1)...(1183): n = A,T,C or G
aagatgtgattgcagagcctgtgggcacctnnnnnnnnnnnnnnnnnnnnnnnnnnnnnnnnnnnacctnnnnnnnnnnnnnnnnnnnnnnntaccgcctgttgtccacgctgctgggtgtcccgctggcnnnnnnnnnnnnnnnnnngttcgcctgcatctccttctgccacatctgggcggtggtgccgtgcattaagagctacctgattgagatccagnnnnnnnnnnnnnnntactcactctgcatccgcaccttctgcaacccactcttcgcggccctgggccannnnnnnnnnnnnnnnnnnnnnnnnnnncggaaggaggtctaaagccaggtggggcaacgagggtggcagggcaaggggcgttgggccaggctggtctccggggaacttcttcacaagggctgctggcgagctctnnnnnnnnnnnnnnnnnnnnnnnnnccatgatggagcacacagtgtagggaagccagaaagaaaagacagcccagccacggaagcacagtggcnnntcgctctcccccagccccaccacgatgcccccatgcctgggcgtgagggaagatcatttgctaagaggcagctactgcaagtctttgcgttcacttgtactgtaacaacataaaccagcacgcagttcccaccgggggccaacctgtccacgcgcactcaggaaagtgaccagtgaccactggcattaggagggtggctccaataaaggattttggctgcatnnnnnnnnnnnnnnnnnnnnnnnnnnnnnnnnnnnnnngtctgtgtcctgaccagctccaaaaatatacttcactgccctgaaaaacagatacagggaaagttggttgtctcttcacttggccaaatccaaggaacagaacagagtctttttcttcttcggattctattgtttgctgggattgtacatgttccttgggagatcatgttcannnnnnnnnnnnnnnnnnnnnnnnnnnnnnnnnnnnnnnnnnnnnnnntggcccttgggctggcaggggcagtgaccctcccagggtaccactgagggcagggcctgggttcaagcctccctgaacctcccctttggctaannnnnnnnnnnaagtgcacagcactgccatttgacatgaaagnnnnnnnnnnnnnnngagatgtgaagaagtcacaaggtctaatttgtg

SEQ ID NO: 6367 - DNA, 752 bp, Macaca Fascicularis
taaataaataaatgcatacatgcatattattaaaatgtggaacacactgattatcttccatttcctaacaacactgtgtgtaatcaggattgcaggcatgttatgaaatactaaaagagctgaatattaaaattactctggaatcatatatgcttattgttggggttatttgtcacatctccaaagtcatcacagttttctcagcatcaatgtcctcatctcaccccagtcctagttctagtcttagtggaatagattgtatcagactaatcctctgacagacaacaatggtcaactgtggatgaaattttaaaacaactatttaaagatgccagagagcaaacaaaagcagacaagttagggagatctcaacccatgaaatcaataaacatactgactgagactcatgcacacagacattacagagggaccgaagctctatgggaggaggacccttgtccattttgttgatggcacatagtagatgctcaataaatttttgttgtcaaatgaatgttttgtttggctgaccacatttgttgttttttcagttttactgagggatgatttatgtaaaataaaattcacactttttaattgtaccattttatgagtttcacaaacatatacagttgtgtctgccactatgatcaagacgtagagtatttccaacaccatagaaagttcctttacacccctttgcagtttatcttttcccagccccagcacctggcaatcgctgacctgatttc

SEQ ID NO: 6368 - DNA, 741 bp, Macaca Fascicularis
  misc_feature (1)...(741): n = A,T,C or G
cagagacccaattnnnnnnnnnnnnnnactccttagccctcagagccggcagnnnnnnnnnnnnnnnnnnnnnnnnnntcctctctttttggagggaaaaaaaagtatcactacannnnnnnnnnnnnnnnnnnnnnagtccttctagtttcctttctttgtctctctctgcctgcctctctactgtttcccttttctaacatgctccctagaannnnnnnnnnnnnnnggctctagtccccctgagaagtaaagaaacagtacagccccttccactgcccattttaccagctcacattcctgaccccataagcttggaagggtgctaaaaggcccatgaaggaagtgggtctggtggggaatggggaggggaaagaagggcttctgccattatagggttgtgccttgctagtcaggagccaaaatgtcccctggctctgctccctagggtgattctaacagcccagggtcctgcnnnnnnnnnnnnnnntgtannnnnnnnnnnnnnnnnnnnntcctctggggcacatggtttgagctctgtacttcccacatggccagctttcttgtctatacagatcctctctttctttccccacatgtctgcctggggtctactccataagggtttacaaatggcccacaacactgagttagtggacaccggctaaatgaggaaaagcagcaggcattgtcatgttaaatgccccgctgtagctccctgagagaaggactgtagct

SEQ ID NO: 6369 - DNA, 750 bp, Macaca Fascicularis
  misc_feature (1)...(750): n = A,T,C or G
tcaatgagacatnnnntccatcaatgtagccttttatggtnnnnnncctggaatctggactgggtcatgattgagaccataagaaaccgtgattcagcttcaccaacagaagaaggtggtaggagtggcaatgtcttggttctaactctcagcttaaaaaagatctggcaaacttggccgggcacggtggctcacgtctgtaatcccagcaccttgggaggctgaggtgggcagatcacgaggtcagnnnnnnnnnnnnnnnnnnnnnnnnnnnnnnnnnnnnnnnnnnnnnnnnnnnnnnnnnnnnnnnnnnnnnnnnnnnnnnnnnnnnnnnnnnnnnnnnnnnnnnnnnnnnnnnnnnnnnnnnnnnnnnnnnnnnnnnnnnnnnnnnnnnnnnnnnnnnnnnnnnnnnnnnnnnnnnnnnnnnnnnnnnnnnnnnncaaaaaaaaaaagacctggcatcgttgattttgagctgttggtggtcatgagctgctgccctttagccaccctgctgtagagaaaccacgtgcagagaccacttggacttggagagggagagctgggccactaggctggtggagccatcctagctaagggatcagtcattgagtgaaaaagttgtctgggttgggttattccaaccatctgggccgttccatgttacccacaacagtaacaggtctttcctaactgacttatccaaaatgagaaataactcatttatcatttaacccttaaatgatgaat

SEQ ID NO: 6370 - DNA, 696 bp, Macaca Fascicularis
  misc_feature (1)...(696): n = A,T,C or G
agtgccctagaagggaaaagaannnnnnnnnnnnnnnnnnnnnnnnnnnnnnnnnnnnnnnnnnnnnnnnnnnnnnnnnaagaagaaaaggaaaaaataaannnnnnnnnnnnnnnaatgtgaactttggggcttctgcttcgtttttacnnnnnnnnnnnnnnnnnnnnnnnnnnnnnnnnnnnnnnnnnnnnnnnnnnnnnnnnnnnnnnnncactgaattcaacnnnnnnnnnnnnnnnnnnnnnnnnnnnnnnnnnnnnnnnnnnnnnnnnnnnnnnnnnnnnnnnnnnnnnnnnnnnnnnnnnnnnnnnnnnnnnnnnnnnnnnnnnnnnnnnnnnnnnnnnnnnnnnnnnnnnnnnnnnnnnnnnnnnnnngcctccaggcagtgctatggtccaggctggcttcgtttttccaaggagccnnnnnnnnnnnnnnnnnnnnnnnnnnnnnnnnnnnnnnnnnnnnnnngaatcccgtatctcctttccatcccagttgggttggaaggggttnnnnnnnnnnnnntcacttccttccnnnnnnnnnnnnnnnnnnnnnnnnnnnngaaaaaggcgactgannnnnnnnnnnnnnnnnnnnnnnnnnnnnnnnnnnnnnnnnnnnnnnnnnnnnnnnnnnnnnnnnncagggccagnnnnnnnnnnnnncggtcctcctcccgcaccaggt

SEQ ID NO: 6371 - DNA, 746 bp, Macaca Fascicularis
  misc_feature (1)...(746): n = A,T,C or G
agcatccgcaggcactccgtgtcggagatgacgtcctgccccgagccccagggcttctccgacccgcccggccagggctctgccggggccttcaggtcctccccagcaccccactcagggccctgccccagcagactctaccccacgacccagccccctgagcagggcttggatcccacccgcagctccctgccccacgccagcccggagaacctggtggaccagatcctggagtccgtggactcagattctgaagggattttcattgactttggccggggccggggctctggcatgtccaacttggagggctctggtggccggcagagtgtcgtgtnnnnnnnnnnnnnnnnnnnnnnnnnnnnnnnnnnnnnnnnnnnnnngcggaggtgtccatgtggcgtgtgtgtgcgtgtgtgtgtgacttttttactctgtgccgtcccgccagccctggtgacctcctcactggcctcagtcgctttgtgtttctgtcttggttggaaataccatcagcctcctaggcccggcccaggtatgtgtcaggcggatgagtcagcgttacctgggggcctgggtcagggacaggggtcggtcgctcgctcccacgctcctcctgccccagtcctctggcgtccacacctgcccgcagagaatgtgaatctggtggggtctgcccacgccgggccccagagtgaccagactccagcacacctgtctcttcctgcctggggtgccatggggag

SEQ ID NO: 6372 - DNA, 737 bp, Macaca Fascicularis
  misc_feature (1)...(737): n = A,T,C or G
gcccttttgcctgtnnncaggccgctggaacaaaggaaggacagctcattnctcatgggcgatcannnnnnnnnnnnnnnnnnnnggccgggggagcttgagggagggctggggcctccttgtcctgggttcccagctctccccctgccccctccctgagcaccaccggcaccgcctcccacacagggctgnnnnnnnnnnnnnnnnctgctccacctcccccaaattgtcatggaaagggtggagaatggaggggaaccaggcgtccttggaggcagcccaggagggcaactgtaatgtcacccacaagggaggctagggcagtggagcaggccgccagcagcagctacccaggccagcctccatggctgggggatctgtttggagttttctgcccccgaccctcaacttccgtcaaggagcaaggcttgccagcaagtcagaaggatttaaactgagcagccaatctttccagccctcccccaccgacctctgcctggagatgcagcagcctgtgtcctccaggacctctggtttcttgtattatagtatatttcgctgtggaaaatgtcacgtttagtcaccttggagcccactcacctggtcctgttgttttaccccatcccttctcttgcgcgcctattgatttgtttctgaggagagtacaccgttcactattgtagagtaactcctgtgactcaatattaccatagtgcgatgtcgttcttgtgcttatt

SEQ ID NO: 6373 - DNA, 769 bp, Macaca Fascicularis
  misc_feature (1)...(769): n = A,T,C or G
gagaacagaatgaagccctcgnngagnnnnncagcttnnnntgagttcnnnnntctataatctgttaaaacactgtggaactaataaatacatacggtcaggtttaacatttgccttgcagaactnnnnnnnnnnnnnnnnnnnnnnnnnnnnnnntgttaaannnnnnnnnnnnnnnnnnnnnnnnnnnnnnnnnnnnnnnnnnnnnnnnnnnnnnnnnnnnnnnnnnnnnnnnnntgttgtattaacaaaagttccctgaaacacgaaacttgttattgtgaatgattcatgttatatttaatgcattaaacctgtctccactgtgcctttgcaaatcagtgtttttcttactggagcctcattttggtaagagacagaacgtatctgtgaagtagttctgttaggtttgtcccattggtgttgtcattgtaaacaaactcttgaagagtcgattatttccagtgttctatgaacgactccaaaactcatgtggaaaaaaaatgaatgaagagggtagggaataaaatcctaagacacaaatgnnnnnnnnnnnnnnnnnnnnnnnnnnnnnnnnnnnnnnnnnnnnnnnnnnnnnnnnnnnnnnnnnnnnnnnnnnnnnnnnnnnttggtgtgcaagacttagtgctcttaagcctaaatgccttagaaatgtaaactgccatatataacagatacatttccctctttcttataatactctgttgtactatggaaaatcagctgctcagcaacctttcacctttgt

SEQ ID NO: 6374 - DNA, 470 bp, Macaca Fascicularis
  misc_feature (1)...(470): n = A,T,C or G
gggaaggactccagcagtgacccaggtacctgggctccaatggggcacccgccttttctgctgccagaactgggaatgctggctcctatgcccctaggagagggcttggtataaaagctactttccacaagccaagatatgaggcccctgtgtggtgttgctgagctgggcaagaggcttctcttctttgaccccaagcctaaaatagctaagctagagattctccaggggccagggctcagagaactgttcctgtcgctgataatgatgtgccatcccagaacaggggtaccctaagtccctgccaaagtagcccacaagtgtcatgagtcataaatagagtgaccaatcatcctggttttccccggacacagaacttttggttttaagactgtgatgggccaggagtgcnnnnnnnnnnnnnnnnnnnnnnnnnnnnnnnnnnnnnnnnnnnnnnnnnnnnnnnnnng

SEQ ID NO: 6375 - DNA, 729 bp, Macaca Fascicularis
  misc_feature (1)...(729): n = A,T,C or G
tatgctactannnnnnntgtgacttnggtatgaacacaaaaagaagttcaagatgctgtacttggacagcctatccatgaatgcagagaagttattcttggttatgattatttggagaatgcttatgtacattttccacagttctgtggtgcagacgtacggatnnnnnnnnnnnnnnnnnnnnnnnnnnnnnnnnnnnnnnnnnnncccattaaaatacaaagagtacctcggattaaattggagaaactgaagtgtgactatgttagtacaagtaatggagaacatagatgtagtagagacagcatgccctctgccttcaannnnnnnnnnnnnnnnnnnnnnnnnnnnnnnnnnnnnnnnnnnaaaatgatcttggatnnnnnnnnnnnnnnnnnnnnnnnnnnnnnnnaatccaactatgaaattagaattcgcaggccttgtgaaattaaaaaaactgattgttgcaaagaaaacttagagaaaccagggagtccaggggaagttactggctttnnnnnnnnnnncagtccaggtgaaataaggtttatagaaaatcaggaaaaatatggtgaagcttccagaataaagattgaacccagtccattaaaagaaaatgctctaaaatcttgccaaatacatgtaaatggaagtcacagtgatcatccagaaattaactgccacaaagtttaagggatattctgttagagcannatacagagccac

SEQ ID NO: 6376 - DNA, 727 bp, Macaca Fascicularis
  misc_feature (1)...(727): n = A,T,C or G
cccacagagctttgtgtgagggatctcatcgctgtgactcctcggagaccttggcagcctcgcacgccggggcaccgcttgggtcagaaaggacctcggaaggctgaaaaagtgggtcggagacgggctcgcattgttcccgcatgctgtcagccgcagtcgccaactggcagcaggcgacgtgtagcagatgtccgggaggacaaaggcaggcacggtccccaccagccgcccgtaattgacggcctttgtcagccatggcagagctggcgctccacctcccatccccgagtcctcctcactgcagccccccagcctcaggcctagggggtcaggcacaggaggggagatggagtttgcagttccacttgcactcttttgtttattgtgttttatttttcaaaagtcggttgctttgaagtctcttcggnnnnnnnnnnnnnnnncgatnnnnnnnnnnnnnnnnnnnnnnnnaggnnnnnnnnnnnnnnnngagatcaaacccagccccctctagaaggattctggccacagacagcttgccagtagccaattagggtaattggaaacttctgccccggcgggggtccccgctggaatcctgtgttcctcgccactggcttctagcgcctgtnnnnnnnnnnnnnnnnnnnnnnnnnnnnnnnnnncaagttaaacctggtcctggccccaggggccttgtggcaaacagggcacagaacgagac

SEQ ID NO: 6377 - DNA, 701 bp, Macaca Fascicularis
  misc_feature (1)...(701): n = A,T,C or G
agtgggctcttgatgtgtcactgctgtgtcatacnttatgctacacnnnnnaattaatgcttttccactcatacccaaataggcaacgattaggtgctgaaagttgtttccatcacgtttagggctccactgcagtatacatcacaccattttctgctttaaactctttcctagtgtggagtccataaaaattattataatttaacaatagcccaagccaagaatccaacatgtccggaaccagaaccagaaccagaaagataatatttgaatgaaggtgaggggagagagtaggaaaaagaaaggtttggagttgaagggtaaaggataaatgaagaggaaaaggaaaagattacaagtctcagtctaagaggttttatgcctcagcctgaggaggaagaaattgtagatagaaggtgaaggagattgctgaagatttggagcacgtttaatgacaatacggggagaaaagaaaagttccccttttacaggaatgaatgtggactccatagtccatagtgtttccctggagcctcaaggcttggcatttattgcagcaacattctaagaaccttcggcatagatacctgttctcatgaggactgcagaagtagcaatgagatatcttcaagtggcattttggcagtggccatcagcagggggacagaaaaaaacatcatgccatatnnnttcagctgaca

SEQ ID NO: 6378 - DNA, 720 bp, Macaca Fascicularis
  misc_feature (1)...(720): n = A,T,C or G
ccagtcattnnnnnnnnnnnnnnnnnnnnnnnnnnnnnnnnnnnnnnnnacacagaatccgagaacgtgttgatttttcattgtgatttaaactacctcctggtttgtgtgtgtgtgcgcacacacagctagtgtttgggtggtttctaggaagaagattaagtctatgactttaaaaaccatgttattcaacctgccagtcaaatggaaagggatcgtggcaaaagcaaatatcgcatccttttcttccgcagaagcagagtcaggtcggcagctgtgtgcaaaggcctccgccttcggctcgggcactgttgtagataactggtatttattaagcactgtgagcagttttcctcagtcctggccccagttctagagctcctctttatgacttttggtgaaagtttggggttgggggtacacctcagaggttcagtagttcacccacctgaagtcccacgctgaacagagctggacccagagccacacgcccaaaagcacacactgtgctggggaggaaggaggcctaggagggcctgcaggtccaggcagctgtagagctgctagaagctggggtgttgctctccctgctttctcacagacaccacaggtactgtctgcctgttgtcacacagttcatatgctcgcttgagatggaatctgaacctcggtcccaggatctgtgctttttctcactttgcgacactatctaaggtggct

SEQ ID NO: 6379 - DNA, 729 bp, Macaca Fascicularis
  misc_feature (1)...(729): n = A,T,C or G
agcaagannnnngctcaagcccaggagtttgagagnnnnagcagtgagctctgatcttgccatnnnnnnnnnnnnnnnggtgacagaacgagtccctgtctcaaaagaaagcaaaaaaaaaaggctagtttttatgacttcaacctgaactttgaaatctcttcatgtgccttccctacaggcctttcactgtggtctctgggaaagaatcagtcagatnnnnnnnnnnnnnnnnnnnnntgaggagcgtttctatccaatttcctggaagaataaggactcttccttttcagattaaagattgtctgatttagaggccatggagatggacagagaagaannnnnnnnnnnnnnnnnnnnnnnnnnnnnnnnnnnnnnnnnnnctattttcctgacgggcacagtgctgctgtgctctacaagtgaccatgaaatacagcatgccatgactttaggacacagggatttttatgggaagagagtnnnnnnnnnngggactgattacgtagtagagacaatgcaggggaaatggtggccaccnnnnnnnnnnnnnnnnnnnnnntcctgtttagcaaagactgattaaaaagtactcttatttttgaaatggaagagagaacagttacatcagagtagagagtttaannnnnnnnnnnnnnnnnncatgttcttgagtaggattcatgtttaactnnnnnnnnnnnnnnnnnctgnnnnnnnnnnnnngtc

SEQ ID NO: 6380 - DNA, 679 bp, Macaca Fascicularis
  misc_feature (1)...(679): n = A,T,C or G
aggaaggaaaacaaaaccactttgttcatctagaaccatttatttctacctnnnnaagagtgannngnncnnaanntattagataaataaagggaatccctcaactaggttgaatcatntagaaanntgaatcattgattatagaacattcgtataatgcagtcagagagtcccattgattcatttgacacacgaagaatgtaaggtccaaagagttatttttaatcacaacccacagagcatgggtggacactcacggttttttcagtgatccatgcagcctgcttttggtcatatggatatgattttctttctggaaagaacggtttatatataagaaaaataattaaatgatttgttgaaatatataagtcagtgttttaaaatattttatcttgcgaagaagagagtgtgtgtgtgtgtgtgtgtgtgcgtgcgcacgcacgcgcctgtgtgtttgttgctgaagcttgcaaacaagaatcagtgttggcccataataatttagccacaagggagtgctctgtgaaccagtaagatggtcttctctaaacacagctgaaattaaaatgagccgacactgcnnnnnnnnnnnnnnnnnnnnnngcagagctatttccaacattttccatcatctctgatttctgattgtgcctcaccatctctgagagttgaaatg

SEQ ID NO: 6381 - DNA, 731 bp, Macaca Fascicularis
  misc_feature (1)...(731): n = A,T,C or G
gcctgttnnnnnnnnnnnacattgccaggaaaagctgctgatgcctgccctcctctcttgagtggagggtgaatctttctcctctaagcagtctggtcaggagccctggtttcttgagaggcccccaagatgcggcagctccagggctgttcctcctcaccagaaatccctgggcttccacaatgtgaactcactcattatcannnnnnnnnggagtgtttttgacacggtgacctgtctgggccnnnnnnnnnnnnnnnnnnnnnnnnnnnacaatggtgtgcatatctctgtgtgactgtcagtgttgcaagctggctggatccaaccatctcttctgaaataatgcatccaaagggttgatattctgggggaggtcactgcagaagnnnnnnnnnnnnnnnnnnnnnnnnnnnnnnnnttactgagctttctgcctcagagccgtgctggcagccctgggacagagaacggtgtggctttgannnnnnnnnnnnnnnnnnnnnnnnnnnnnnnnnnnnnnctgcaccagaaatgaggaagatcagggataacctgggaacagaagaataactttcaaagccagtgctcagcttctctcccccgtgctagcgtttacaggccctaactcaaaccagatgcctgtactagtttttagaccctaaatcnnnnnnnnnnnnncacagtttccagctnnnnnnnnnnnnnnntgccctacctacctcacagac

SEQ ID NO: 6382 - DNA, 794 bp, Macaca Fascicularis
  misc_feature (1)...(794): n = A,T,C or G
gccaaatgaactagtgattgtcagactggtatggcggtgactgctttgtaaggttttgtcgtttattaaagtgtgtcgtttttaatacagtcaaagatgtgctgattttgttttaactgtaacaagtaatggtttttggatagataattgatcggtgagaatttggtcaaggtgacagcctcctgtctgatgacaagacagactggtggtgaggagtctaagtgggctcagtttgatgtcagtgtctgggctcatgacttgtaaatggaagctgatgtgaacacgtaattaatgttataacccacttctatttactttgtgaaatatcgtgaatcttnnnnnnnnnnnnnnngtttggaacacataacttcaagaagtattctgccagaagtatttataagtatggaatcatgagctattgttggttgctaaatctgtgaatcacccaggagtgtgcccttgacattgtgacaggtcaccccaaagctccatgtcctttaaaaccagtcactctggacacaagagaaatcaacttcgtggttggatggggccggaacacaaccagtctttttgtatttattgttatttagacaaaacagtactcactgagtgtttttcagtttcccactggttgttttgatattgtttgtttaagatgtatatttagaatggcatcatctaagaagctgattttgctaaactcctgttccctacaatgggaaatgtcacaagaatgtgcaaaaataaaaatctgaggaaaaaacccacatgttcttaaagagaatgaatatttt

SEQ ID NO: 6383 - DNA, 2182 bp, Macaca Fascicularis
tatatccttcttcttgggggtcaagtcagggtctgaagcttaatacaggcccccagaaacaatctgtaactagagccagctgatgtggaggttggaaactgcctcctgaccatcctcacagccaaatctgccatggctctctcaaaccactttcctgaggctgcagcggtttttatgtggggcagggaagcaaagaacaggagactgagtgggcatatatccatgcaaataaagtcctgtgagtaagagcagactaacagcaatattttcccatcttcttccacaatgcctacagtataaagactgaagttctcagcaggcctttcgcgttccccacgctcccacccagtctgcctttctagcagatctccagcacccccgactgcacacacacactgtctgcattccaggcacacgggattgagtgctgcttaaaacccacctgtggctcttctaccctttgcttggtttttattctacctttggggccaccttcccccatgcccactcatggaaatctcccttcccactcaaggcctggcccaagggatggatgttttgccacaaaaccttctgatccacatggccagctgtgctctcacccacctcaaagccatggagcacttttttgtgtcttcatttagcttgacctgccctaagatcttcagtaaggtgaggacaaggaccttgtattatttacctttgtatctcctgcctgccaacctgtgctcaattaacatttgttaaaccaaattaaacaactcaagtagaagaaaaacatgtcacgtgttcctaagtttcataaaaaaccaaaaaactaaaagtaatttctaccctcagctttgatgtgacaaggagagagtagagaaagagggagaggaggactagggagcagggagagtggaggggaggggaaggcaggaagtggggaagcctagcagatcaggcacaagagacagtgtgttcgtccattttcatgctgctgataaagacatacgtgatactaggtaatttataaagaaaaagaagtttaatggactcacagttccacatggctgggggggcctcacaatcatggcagaaggtgggaggcaaaaggcacgccttacatggtggcaggcaagagagaatgagagccaagcgaaaggggtttcccctttaaaaccatgagatctcatgagacttattcactaccatgagaagagtatgggggaaaccacccccatgattcaattatctcccgccaggtccctcccgcgacacatgggaattatgggagctgcaattccagatgagatttgggtggggacacagccaagccatatcagacaatgagtctgtgacagtgtcagtgccagccttagaccaaattcatgacactcttttactccccccaaaaacattacagatctctgtacattctactttattttttactgttacacccttcattggatggagtacagaccacatacgaagattaatcattgtatcatttctgtgacccagttactttcttttgtcttgaaattataattcttatcccatttctaggcttcagttcccagtctgtcattttaataataaagtaacttctgcaacacctcagtatgaaacttaaaaaagatttagtgcagtcacagaggatcattcttaacaacctgttaagagtattggaaaagtaaaagatgactgatgatgtttattgctttagagatgcagtccatacagtgaaagcacatttattatgtttataacatgttaaaagttttaattgtaaaaagctggctttacatggatttttattaaacatttaatttttcaaactgttaccacatctagtatttcaatgaaacctttttgctcactaagataggttaagaaaatgatatcaccatcatttgaccatggagaaaagtggtacagaggttagatttgccgaaggtcacacaccttgttcctacaatagtgaaaactaagcccaggtgactgacttctagctctagcctgcacagcaaggaaataaccacattcagagccatacaatgccttaaattacttaaaatttagtgtccttagggacttcttgattgtttccttttcctttgttttcatttttctaaaaagtgcttagggccgctaaaaaagatagacttctaaaaaaaaaaaaaaaaaaaaaaaa

SEQ ID NO: 6384 - DNA, 791 bp, Macaca Fascicularis
  misc_feature (1)...(791): n = A,T,C or G
gttggctgccattctaaacccacctagaaaaggaatctttggtgttcttagggtgctgcagccgtctgttgatgttggagaccttgccttgtccctaagtccgtattttgaaggnnnnnnnnnnnnnnnnnnnnnnnnnnnnnnnnaaacacagaacaaggccgcaggcgggctgctcctctgtcagcagaaggaacactcgagtttctggaggtgatctctttgccccttggtgccttgcttggcgagattgttagctgatgtagccagggctgagaaaccactctggcttctgaggagttaaaagtctgagtttgaagcgtttaattctgtactaggatgtctccataacctggaaatcgcttacttgtgaagcagttacaagagccgtgccctgtggggagctccacttcgctacattcattcaccatcagataangagctcggcctgcctgcgtgcgggcccagagcctcgccctttgtgggaaacaggttcagggaggctggttcccatccctactttgcctctgtgaccttggcctgtcgactgcctgggatttgattttccatcaaaggagtgaattgcactaggccgatctctnnnnnnnnnnnnnnnnnnnnnnnnngagttaggtaatgctgtttgacttatgaatagacgtgtcttaggaaatgagcttcaattccttttcaattaatttggattaacacattcttgactttaataggaaaataaaannnnnnnnnnnnnnnnnnnntttttctgaaannnnaggtgatttatggcctag

SEQ ID NO: 6385 - DNA, 1226 bp, Macaca Fascicularis
  misc_feature (1)...(1226): n = A,T,C or G
atgcctcccgccaggcactgtnnncagcgaggtcnggtctagccctggcagtaactcacttgtaagaggctcagacaccaagctgggcctgcacagtaggacgcagtgactgcacaggtgtctacacacccgtaggtctctgaggcagcatccagggtacaggtgtgggtggtggggggtggaggcctgaccagggagggagaagcaggtttggagaggaccctgtggccaccctggctggccctgactgtattctctggctacattcaaatccccccaatggtgggggcagagaagtgggaccaggccgcccttggctccagagctggaagaacctaagactgccctctgctctcagggatgccacagagagcctgggctcagccttctgcatcaggacatggcctcgtccactgagcacacaacttaaacatctgacatcagaagctttatttgtaaacctcacacagataaggaccaagggctggcagcgtggccagaggacaggggaagttgaaggccccgtgcttgagcttggcagtcctgctccttgcagtgaagccgccgtgggtgaccgtccagcctcacccaatggcctgcacagtgagggaagggcttcagggccatctgcccctggggcaggggacaggccaccaaggacctttggcaagtgaaggtttacatttctgtagtttgttttagagcttaatttgcaggtttttagctattaaaaccacttgaatttttaataacctgatgagggcatcaggtaaataaaaggattttgggaagattcttatttctgattctaatatctgacacatgccatcaagaataagcattaatgtataaaaatactgtgtgtgtataaaacagtgccaaaccacatttcctacagcaaatgcactgtgccatttataaccctgacatcacctcccaaggctctcaaagaagatttgttttaaataaatagaactcccatatgatattgttcaagaattttagagggtggtggacatggtcttgtgaataacacttcccctgtcgccagctcatggtctattcatttggtttaaaaatgagcttgcattttgcagaagcccaacaacaacaacaaaaaagtgataaaagtnnngttggtataagttacaaaaaaaaaaaatacaaaataagtcataannnnnttcataagactactagtaaaaaatgttcaatcgatgccgtca

SEQ ID NO: 6386 - DNA, 1280 bp, Macaca Fascicularis
  misc_feature (1)...(1280): n = A,T,C or G
gcacatgctttccacnnnatttgctaaacgctgactgccaccaaagagnncctgggacatgagaggggccggcaggtgaaggtggaggacgtgttccaaaaacattcaaaggcaggattcatatcagtcagttctcttgttaaacagagatgggaattggaaattcctgataaagaattgacctggcnnnnnnnnnnnnnnnnnnnnnnnnnnnnnnnnnnnnnnnnnnnnnnnnnnnnnnnnnnnnnnnnnnnnnnnnnnnnnnnnnnnnnnnnnnnnnnnnnnnnnnnnnnnnnnnnnnnnnnnnnnnnnnnnnnnnnnnnnnnnnnnnnnnnnnnnnnnnnnnnnnnnnnnnnnnnnnnnnnnnnnnnnnnnnnnnnnnnnnnnnnnnnnnnnnnnnnnnnnnnnnnnnnnnnnnnnnnnnnnnnnnnnnnnnnnnnnnnnnnnnnnnnnnnnnnnnnnnntaaaaaannnnnnnnnnnnnnnngtgtaatctcaaagttaatgtttatttcacgtcagcagaggatgctttttcctgtcagagatattttggaattgtaccgattgtacattcttttgtgcctattgtgtttgtcaagtgagtcaagacttgcttttgtccattttgatgtacgtgtgttagtcggagtcttggctccgttttgaggcatgagcaaagtttcactggattagaggttaacctttagggaaattccttttcttggtatgtggcaatgctaataaagcnnnnnnnnnnnnnnnnnnnntccaggaacttttcacctgagcttttcttctgagaaatgctgcagtcagaagggtgtgctggtaaaatattttggtggcagctgccatcgtgatcatnnnnnncatacaannnnnnnnnnnnnnnnnnnnnccttatcctcataaaacaaacacacttcgtcagaggcgtcggggctgaaaaaggagctgcctcactggagttgagggcctctctcctgggcacggggcagccatggggaggcagggatgccaaggcctggagccacnnnnnnnnnnnnnnnncgaggtctgcagaggtgccacagggcccagaatctgaccttacctgaccttttgtagactctccctgatagtttttgatggagcatgttggtaaaaccactaccctcagagaaagccaaaaatacagacgaggcgaggcgcacccctcnnnnnnnnnnnnnnnnnnnnnnnnnnnnnnnnnnnnnnnnnnnnnnnnnnnnnnnnnnnnnnntgtnnnnnnnnnctat

SEQ ID NO: 6387 - DNA, 727 bp, Macaca Fascicularis
  misc_feature (1)...(727): n = A,T,C or G
gtgccaccaggccctnttctggnnnnnnnnnnnncagatgactncccggnngcacgaagnnnaagctaaacatttnnnnnnnnnnnnnnnnnnnnnnnnnnnnnnnnnnnnnnnnnnnnnngggtggctaagttcaaatccaagggaaggatctggttttgggtctctgccaaatcctaggaaagctctattttcacctcctccttttctgctccccaagctccccaccaccatgcccacccctgccagcctgcccggatttttggcttggtgaactccctcaccaaggggaagggacccgtatgtaactagaagcaggagggcggtgtcagaggctctgaggggtgataggaaggaaacagtgccaagcccaccagtcaccctcccagaaatgaacttctaagcaatagcagactctcctccagagaaggagaaacacttnnnnnnnnnnnnnnnnnnnnnnnnnnnnnnattagaccaggcaaagctcaggnnnnnnnnnnnnnnnnngcagttctggtggcctttggaagggttggctgggatgtggcttttttcattcccgatgtttaagcctagcctggagccaggactatgcagaacaagagcacacagaaggcctctggggaggcttaactatctagggacacccctcagccctgtctnnnnnnnnnnnnnnnnncccttgaagttgtaagcagagcttaaatggagtgtgacctccgaa

SEQ ID NO: 6388 - DNA, 2066 bp, Macaca Fascicularis
  misc_feature (1)...(2066): n = A,T,C or G
atctcatgggtgatgcgtatcctattcctttttatttaccaatattttaagtaattgtttttttcatttggagggatatcagatgactttaggtatactatacttatatttcttagtctgaatgtgttccaagctttatattaaatatcaaagcaatcataaactgtcttaagacagacaggcagacacatatacatacacacctctgcacatccaccccaggctctttttttctgatgcattgttcatatgaaacctcttgagtttctgagcccatgtggctaggggagcagatacttcagggaagtaaaggtgtacttaagagagtagcaaaggaaggtttgtagttgttgctttatcaaggtttgagatggttacttcttcattctatgtcctatgttcttggagttatccagggactaaatcagatcttgttaatacagttgtcattatacaccaagagttgcagtaattatgttgctgttaccataaacgtctttcaaccttgttggtggagcattgtgttaggtggtacagaacatcagccaatatatagaattatgttaatatatttaatgaaaggtttcattttatcactgtgtttctgccctaatatggaatagttttaaaactacctgtgggtgtcacatttctttaacctttattgggtgaccttgcttagctaaaatagaagaaagaatcgatttcaactttgtcaaatgctagactcaaacatctctgaagagaccttttccccttcattattagtcagatcttcactcttagaggtctctagagaaaacattctgtagtttttttctatttataaagtatatcattctaacaccagtttttaccattagtagacttttttttttcctgaataaataactacacatttctggaaatgagaaattgagagaaaatctggttttctagatgaaggaggaggaaactacagcttatgggccaaatctagcctggtgcctacttttggaaataagttgttattggaatgcaacattgcccattcatttaagtattacctgtggcagatttttcactataagggcagagttgtataattgtgacagactgtatgactcacaaaacctaaaatattttactgtctggcacttcacagaaaaagtttaccaacccctgttccagatagataaagacattcacaggtgggtctccttttgagatagtttaatatgcaagtatccaactttggaaaacaaaatctagaattttgtttctagttgcagagtatcttttactgtgccattgcagttagtgcacatagaaaagtactagtgaaaacaaatttcagaagtgggcaatttgttgtagaaggtaagatttattggcttatgattagtattttagagctctctcttctgtacaatattttgggcagtaaacaatgttattttctgctatcaaaagttaggatggtatttacaaaaattggttttgtaggtacatgatcttgatttgttatttcatatattgtttactttgataatcattttcagtttcttaaaattacttcatgactatgataatcacttcagtttttttgtttaccatatatgcttatgcagtatttttgggagtttttttctccgttgaataatttacttttacagaatatttttgacataagaattactgaatttttcttaattctgataatttcgaggggtgtaagtatgctccacagagtaggtttaaatagataataaataggaattgaattttaaaactggataaaggccnnnnnnnnnnnnnnnnnnnnnnnnnnnnnnnnnnnnnnnnnnnnnnnnnnnnnnnnncacaaggtcaggagatcgagaccacannnnnnnnnnnnnnnnnnnnnnnnnnnnnnnnnnnnnnnnnnnnnnnnnnnnnnnnnnnnnnnnnnnnnnnnnnnnnnnnnnnnnnnnnnnnnnnnnnnnnnnnnnnnnnnnnnnnnnnnnnnnnnnnnnnnnnnnnnnnnnnnnnnnnnnnnnnnnnnnnnnnnnnnnnnnnnnnnnnnncaaaaaaaaaaaaaaaaa

SEQ ID NO: 6389 - DNA, 1750 bp, Macaca Fascicularis
taagagggggtggatgttgatgggaggcagatggagttcattagtagagactgtggttgaggatgctctggtgaactctagatcagggcttctcaacagtgctattgttattcagggctcaataatgcttcattgtgtggggctgttcgtgcattgtagactgtttagcagcattcctggcttctatctcctaggtgccaatagtgttttttatgacaaccagaaagtatccagacactgccaaatgccaaggcaggggaagtgcagaatccatagttgagaatcactgctctagaatctggacccttccactaattaaatcttcctgcacctgcttccttagcttacctggtatgcaggtgagtgaacacctgcccctcatcaaatcctgcatataagctggtaagaagtggtgctttctctcgtttcctgctacagatcctagcgcagaggtgatgagcagtaaagctgcagattggaggggaggggctggtgaaaacagtggtgcggtgcagatggggagggattctagtagtagacatcttagtcagacttcagttggtggtggtggcaatggtgtctgtacccgtccaagaccgcatggcaggaatacaattttatgtttaatagtgatcagcatggatgttggtgcgtcacattgactcagcagtgtctaaacctgggcatttagagcaaggcgtcacagaatcttctggaagtgcttcagactcctttccaaacctagttatcagttgtcgtttgtaaccttcccatgttaggcctgggtgtatcccctcttaatgctgttctttagggaaatattttttatcttcatatcacttcatctgtcattcattctcctattccctgttggctgcatggggcagattaaaacagactccgattggactaattagaataattacctcaaggctaattgcttacttgctgctatctttaatcactgctgcatggtctgtggtggggtggccacatgcccagagacccaggcctaggccagccgtctgaaaatgattgtgtatcacccaggcacagggcatgcactggtgagctcagcctgtgactcttccagttaacagttggtattgggtagagtgggcacccctgtcagttctggaataagtctgattttgttcagctggtgaaagcaaaatttagctttctggcttaaaatagttgggaaagtagggcagataggtcctgggccacatctcttgtgtggactcttctgattccactggagggggaggaaccacaggatggagtcagagctgtgcaccgtcaggaggagctctgggccaggggggttggctgcccttgctgctgccaaggcctgacaagaagtcagaggatggtaaaagaaaggaagctagcagtgaaccatggtgttaatcatgaagttcagagcaagcagagaataaataggccataaaaatttcagagctggctgggctcggtggctcatgcctgtagtcccagcgctttgggaggccaaggtagatggattatcaggagtttgagaccaacctcaccaacatggtgaaaccccatctctactaataatacaaaagttagccgggcgtggtagtgtgctgtgtgcctgtaatcccagctactcaggaggctgaggcaggagaatcacttgaacctgggaggcggaggttgtagtgagccgagattgagcaatccactctggtagagtgaaactccgctcaaaaaaaaaaaaaaa

SEQ ID NO: 6390 - DNA, 769 bp, Macaca Fascicularis
  misc_feature (1)...(769): n = A,T,C or G
agcnnnnnnnnnnnnnnnnnnnnnnnnnnnggcttctgtcccagacttcaacactggtttcnttnnagagtttcgaaggattgatgacttcctcagcgccctcgccggcaggctgagnnnnnnnnnnnnnnnnnnnnnnnnnnnnnnngnnnnnnnnnnnnnnnnnattagattgtcccgctgctgagacctgtagggcagcttctaacannnnnnnnnnnnnnggagaggagcagtgacaagtcgtgtgtcggaattggatttgagaatgctctgagtgacccctggaggccaagggggcaggcttcgggcgtgaactgaactccagacccctctttgtgttgggcggtgtcatcttgcttacaaactgtaagacacattttctttggtgtttgtttttgttgttgttgttttgcagcactcacgcctctgacagtcttttgggaaagagtaacacctacatacagaattggtcacatccagagtagcgnnnnnnnnnnnnnnnnnnnnnnggcctccgggagggttttcctttttatagttaaagtgttacttttctgtatgatgtgcatgcaagtttaccgtaacttttcttaaactttttagtgccgtttctagtatattcctgtaaatgtcagttannnnnnnnnnnnnnnnngtaagtagtttagcttgtttattgcaatgctggcctcaacacaacagaataaaaatggtnnnnnnnnnnnnnnnntgtttctggtaatcatggacccttctcctggggcat

SEQ ID NO: 6391 - DNA, 726 bp, Macaca Fascicularis
  misc_feature (1)...(726): n = A,T,C or G
gnnnnnccattttgttaaccacactagtgaaatttatgtgatgcttaatggagaacagagannnnnnnnnnnnnnnaaatgtgtnnnnnnnnnnnnnnntttctgtatgagattaagaagcttttcccacctctcacccctgtttcctataaggatatccagagaagccaagctgttctgtgtgtttgggaatggtcgtttcccgggaagatgcatttggatcgatgactaaacctggcccttttctctgggctgtagtgaagccgcattttcatgctggctggctgtgtgctgagnnnnnnnnnnnnnnnnnnnnnnnnnnnnnttctgccctgcctgaggatgtgnnnnnnnnnnnnnnnnnnnnnnnnntttgtgcggcgggaggaggctaggtgaggtgtcgggccgttgtggggaacttctgagagtattacagactggtagannnnnnnnnnnnnnnnnnnnnnnnnnngctttggtggaactgtgtgtctgtatctgcctgtgtacgtgcaagtgtgcaggttcctttgtgtgcatgtgtacgcgtgggaacctgtacttgtcatatttttcttcttttcacgaaggcttttnnnnnnnnnnnnnnngtaataatgcctttgtttcaagaacacatgaaattcttttaacaccagattagcatgttacccaaaatgaaccgttatagccctctgttaagaaataaagggaccataagca

SEQ ID NO: 6392 - DNA, 691 bp, Macaca Fascicularis
  misc_feature (1)...(691): n = A,T,C or G
ctctgctcgctgcaatctctgcctcctgggttcaagcgattctcctgcctcagcctcctgagtaacatgggattacaaggggcctgccagccatgcccaggctaatttttgtatttttagtagacggggtttcaccatgttagccaggctggtctcagactcctgacctcaggtgatccactcacctcggcctcccaaactgttgggattacaggcgtgagccactgcgcctagcccataagttgccttttttaaaaagaaagctctttgcatcagattgcttgacctgaaggttctctctgccattctctgccatttccctggctcctggacagacgcccctacacctctttcatctggttgcggtcaccagttcaacacttctgctctgttttctggaaacgctatcgcttcaaactcttaccctttatggtcatatagattctagcacttttgctgttcaactttatctattcagctccggtgagtggcagccctgcaggcaaggacagaggtggtctcatgatgactctggggagagcgtctttagctcgccaccccaagctaactgttgacatgttctctctagcactatttggccatgagntnngatcaaacctcaacttctgctatatcctcccattaaaatattcaatataatcacttcactaaacaccagcaatgccagctc

SEQ ID NO: 6393 - DNA, 706 bp, Macaca Fascicularis
  misc_feature (1)...(706): n = A,T,C or G
gggannnnnnnnnnnnnnnnnngtatgttcccccgattttgaatccctcttggnnnnnnnnnnnnnnnnnnnnnnnnngatggagnnnnnnnnnnnnnnnnnnnnnnnnnnnnnnnnnnnccagacattttgttcttgaatctgtgagacccagaaggggcccactgagcccacccactnnnnnnnnnnnnnnncattgtcccaggtccccnnnnnnnnnnnnnnnnnnnnnnnnnnnnnnnnnnnnnnnnnnnnnnnnnnnnnnnnnnnnnnnnnnnnnnnnnnnnnnnnnnnnnggccctgctatttatttnnnnnnnnnnnnnnnnnnnnnnnnnnnnnnnnnnnnnnnnnnnnnnnnnnggggagggtctgtgggtaggggctggcttctcttggnnnnnnnnnnnnnnnnnnnnnnnnnnnnnnnnnnnnnnnnnnnnnnnnnnnnnnnnnnnnnnnnnnnnnnnnnnnnnnnnnnnnnnnagagcaaggatnnnnnnnnnnnnnnnnnnnnnnnntccaagctggccagttcctggttctgtgtcnnnnnnnnnnnnnnnnnacctttctgagcctcctattcctcatccgacacnnnnnnnnnnnnnnnnnnnnnnccagggtttgggtgaggattcatgggctgttatagaggaaaactgcacaaggccacacacaaggccagaaccagcaggcactc

SEQ ID NO: 6394 - DNA, 807 bp, Macaca Fascicularis
  misc_feature (1)...(807): n = A,T,C or G
tcagatcatgtgtanggggntgcagactgcaggcnnntgnggggagcaggactgtgtnngtcagcggtggccatgggctgtgcacacggaccctcagccnnnnnnnnnnnnnnnnnnnnnnnnnnnnnnnnnntccatcctgtggcgagagcccggcccggccagnnnaggcagaaagtgtcggccaagtggccccgacccatccagaggcctctcagctgatttttatccctctgtgccccatttgggggtttgcttcctccacctggacactttgcccgggaggtcatcagagcccaaccccaggctctgcccggttggagaggggatgaatgtgccatcacctgaccttcctagggtactggtctcactgtcagcagggggtccgttgtgtttgtacaatatggggtttgtcacccaaaagctgatgatgagaaaggtctccatggggccccgcccgcaggcatctgagagacctggtgttccggtgtttctggaagtgggtcgcagtgccgccggctgggaagctgtcagatcaatcacgggaaggtcttgacggtggcggccacctggaaccaccctatcctgtctgtttacatttctctatcaggttttctttgggcattacggtttgttcccgtacaacagtgacctgtgcattatgttgtggcntgctgtgtatgcacgtggctctcagtgaggtagggggagggcgtcaccctgcagaacggtagannnnnnnnnnnnnnnnnnnnnnnnnnnnnnnnnnnnnnnnnnncagcatcacttcctnnnnatgctttactc

SEQ ID NO: 6395 - DNA, 2315 bp, Macaca Fascicularis
gattaactctctgtgggtccatacgtacccctcttaatatccctgtggtccctttttagtcctcttgtaaaaacttgataatattaatctctgccaaagttgatgcagttgttgtgagtggtgggacgcaagtgtgttgatttattcttggagacagcagaaacagcaactgttttgtcatgagcatcttgtatctataattctgtgctgtcagaattaatattattttgttaattcaggttattgtgaaaatctccacaggaggttacttaagcaagtaacaaatgtacgattctgtttgtagaaaaactccagctcatctagccagctacattattccagggctgcatggtgtcagcatagggacgaggctcagagtagagaccaagtgtgccattcccctccctttccccccgttaattgcctatccacccaggggtaccttctggtcctggtaggatttccacatggttcattagaattcatttatttttttttccatctgtatttctttttgttgtattctctggatcattatttttagatagttcctttttacatgcattggttaggtttttcatgtaatctctcagttaagtgtactggaggatgagtgacctcagtatttaaatttttcataggtaggatgaaatgtcttttctgagtgtgggtatttctgttccattcttcttttccaggcaggctttcattccgtgctgcggtttggattcagggagtactgacacttctgtcagggtcgctactgctgtgaagtatggaagggcattttgatacatgaggcataactggaattacccggtggggcttggtttgtgctgttttccaccttttcatcatattttgaaaaaccgaggccaaaagcaaagttcattttccctttaaaagctttttaaaaaaatgatgaaagagatttatttttgaataacccagaaaatatttcttattgttgataatctgcaatttgcaagtgcagcgaatcttgtaggtagatttaccttgatacgttttttgaaatggtagaatttaatatattaaaacatttcaaggcataaaacatgaatgtcaagcaaatggaccagaagatctcaatcgggcttgtattgctgaaaaattaggtggatccttaattgtagcctttgaaggatgccctgtgtaggtctttcagtgccacaaattgaaagcttccatgtttaatgttatcctcttgctatataaataaagcaaatatatttaggccagggtctcactgagggggagctgtctcgtcatcttttagagtaaacgaaatattctgtaaacatatgcaaacagcccctaaataaagtctaaagttttattggtgtgaaattaaattcttattggccatatgcctgttttgatgagttgatttataaagaattttgttaagctcaggattttaaattatgcagttcacaaaacagtaaaggccatgtgaagagaattattacatctttattaatctcagcatttactttgtttcttttgcttagaaaattgctcataatctggttataattttggcccaaattctttattcttccttgagctaagcagaataatggaatataatatgtctttataatataacaacactaatacactaatagtaagattaagtcaggcagtcttttacttctaccaaatgtgtaatggagattgcctcaaaattgtgtccacataatccacgctgatcttgcaaaagcactatttcaagcacatcattggaatacaggaagtagccctgcacctgccggtgagctcaccattcgctgattgggagagtgacctggcatcttggaaatcatggtgtgtcttcaggagaatgtgcagtgtcttgtaacaaattataatgcaaattagggctacattgtaatctgcgttgttaatgaaaatggtaaaacaatattgacaaactaggacacctgtggtatctttagttgtatctccttcagaagtttgcttcttatggtataataaagtatggaagaatatcgagtatatgtttactctgggcctgggagaacttaattttctagagcagtttgttgactcgtgtgcaatggggagaggtaccatgatgacactcacagggagccactgttcactgacattgggaagtggtcattgttcatatcacgggcgtaacacttggaacgatatagagatgcaccaacagttgaacttagaagtagcagtattggctttgtgtaataaaggaagcatttttgacttaaaaaaaaaaaaaaaaaaaaaaaaaaaaaaaaaaaaaaaaa

SEQ ID NO: 6396 - DNA, 2066 bp, Macaca Fascicularis
gcagcctcaccccgcggcctctagcagacagaggccacagggagagcacagccacccggcgcgaagagccctctgttccccgcttcctcttgaggccctcggaccgtccaggaaatgtctgggagtccgctgcggagggcatagggccgaccctcgccccccgcccaggacccgaatgaacccggagagcggataccagccgcggccctggcgctaggacaggaagggccgccagacctctcaggatcagccttcctcgccaccattctcacctctttgtccgctgccttctcctcaatgcctagcagcgcgtacaggtccatctgtaagagctccttggtcactgccatggttctggcctgacggattcgtactacaactcccaagagtctaagcgcgcgtggggactgccggctccgagtggcgcctagccctctgggaattgtgttctgggtcggcttgactgactctgagggaggctggcagtcgtgaatgaactacgactcccagcagcccccgttgccgccgctgccgtacgctggctgcaggggagcgtgcggattccccgctgtaggtcgcggccggacagagcaggcttctcgaccccggacccaaccccgaaggacacagcctgaggcccaggatgtggaccccaggcctgaggctgaggaagaggagctcccctggtgctgcatctgcaatgaggatgccaccctacgctgcgctggctgcgacagggagcactaattccaagaagcaggccagctggtccttggaggcggagaagagcagactgctggctgaggcagcacttgagttgcgggaggagaacacgaggcaggaacggattctggccctggccaagcgactggccgtactgcggggacaggaccccgagagagtgaccctccaggactatcgcctcccagacagtgatgacgacgaggatgaggagacagccatccagagagtcctgcagcagctcactgaagaagctgccctggatgaggcaagtggctttaacatcccggcagggaagggaagggcggagctggggtgagggtacaaggggcctaggacttggccggcgtgacttcaactctgcagatcctgcggtgctgggagccaccatggagagtaggtgctacggctgcgctgtcaagttcaccctcttcaagaaggagtatggctgtaagaattgtggcagggccttctgttcagactgcctaagcttcagtgcagcagtgcctcggactgggaacgcccaacagaaagtctgcaagcaatgccacgaggtcctgaccagaggatcttctgccaatgcctccaagtggtcaccacctcagaactataagaagcgtgtggcagccttggaagccaggcagaagcccagcacttcgcagagccagggactgacccgacaagaccagatgattgctgagcgcctagcacgactccgccaggagaacaagcccaagttagtcccctcacaggaagagatagaggcacgactggctgcgctaaaggatgaacgtcagggctccatcccttccacccgggaaatggaggcacgacttgcggcgttgcagggcagagttctaccttctcaaaccccccagccggcacatcacacaccagacaacaggacccaagcccagcagacacaggatctgctaacgcagctggcagctgaggtggctatcgacagctggaaaggaggagacccagctgcctctctccagaatgacctcaaccagggtggcccagggagcactaattccaagaagcaggccagctggtccttggataggccccttcctgagctttggtgtccctgaaatgaggaaagattctctattcgagaagatgactgggagggccgagggaagaagtcggggccctcctattagaagcccagactggaagtgagaggcatgatggggagagaccagactgaatctacgggtgagccctgtaacctggctctggggcacagggccctcccctggcacttagtggatctaataaagtatgttgattcattgaaaaaaaaaaaaaaaaaaaaa

SEQ ID NO: 6397 - DNA, 758 bp, Macaca Fascicularis
  misc_feature (1)...(758): n = A,T,C or G
cagannnnnnnnnnnnnnnntgtggatcccggcacacagcagatggtgacacgaacaggggagctctacacctggggctggggtaaatatggacagctgggccacgaggacaccaccagcttggattggccccgccgtgtggaatactttgtagataagcaactccnnnnnnnnnnnnnnnnnnnnnnnnnnnnnnnnnnnnnnnnnnnnnnnntggagaaagggaagagctgacgtgtgtatgtattatgtatatnnnnnnnnnnnnnnnnnncccattcaggtcaaggaaaaccattgcctgcaccccaagggccccgtatttgccccttcccatcacagtcctgcctttcaccctcaagcaccatcctaaaattgtctgcactttagaaacacctggagaaagttgaaaactctgctgcctaagnnnnnnnnnnnnnaaacaatgaaatcaatgaaacaatgaaatcagagccnnnnnnnnnnnnnnnnnnnnnnnnnnnnnnnnnnnnnnnnnnnnnnnnnnnnnnnnnnnnnnnnnnntgtagctgagattggggcacattccaggtcatcttcctttgtcagtcactttcctgctttcgtttgaattttctcagccttgcatgcatccttatacaacatagttgtgcttgcttttgagtattagataaatggaaacctgtatatgcgcttttgtgtcgtttttgtcactcagcattgtgtgatccatccttgttgggtcctggagttctttc

SEQ ID NO: 6398 - DNA, 299 bp, Macaca Fascicularis
ccatttggagctgagatgtgtaagctggtacctttcatacagaaagcctccgtgggaatcactgtgctgagtctatgtgctctgagtattgacagatatcgagctgttgcttcttggagtagaattaaaggaattgggattccaaaatggacagcagtagaaattgttttgatttgggtggtctctgtggttctggctgtccctgaagccataggttttgatatgattacgatggactacaaaggaagttatctgcgaatctgcttgcttcatcctgttcagaagacagctttcatgca

SEQ ID NO: 6399 - DNA, 727 bp, Macaca Fascicularis
  misc_feature (1)...(727): n = A,T,C or G
tccccacatgcacacagannnnngacacaggatcagctgcacttaagaaatcatcccagctcagttcattattcctcatggggtggggagatggtgaaggggtattgtatatccnnnnnnnnnnnnnnnnctcaatcagctggatttgagttctggaacacacatcatccccactcctcccccagcgtgggctctccattctgagtcctttctcannnnnnnnnnnnnnnnnnnnnnnnnnnnnnngtctgcgtcctgggtctgctaggtttgatgatggtgaactcatatctgcatccagtgcaagttttagctggcaaaggtgaggccagtggtgctggtgtgcctttgccaactacagccagtctggagacttgataaaatatttcagtgagaccagcttttcatcaacttgggcctggcatgctgggcctgaaagtcacactacatgcactgccttggggagttagctcactccctnnnnnnnnnnnnnnccttgccagtgtgaaggaggcttccagctacttcaccctgtcaaccacctctgaatccccaccaggtgccttcctgggtggattcgacaagatgattttgccctttcccagttctctccttcaccttggcatcagttgttnnnnnnnnnnnnnnnnnnnnnnnnnnnnnnnnnnnnnnnnnnnnggttagagccaaaatggatttgaggatgagtatttttttttttttggtt

SEQ ID NO: 6400 - DNA, 2056 bp, Macaca Fascicularis
  misc_feature (1)...(2056): n = A,T,C or G
acatacgcaccgtgaagatctctagtgttttacatttaatacatttagcttttctcaaatcttcaatatttgaagaattctctttgttattctgcaaaacggtggaataactgtattattgccatgatgaggattgttgtttctattttaggtatgtaccaaatgaaatacaactatgaacagatttcatgacctttatataagatataaggagaagacataaggatataatccttatagaagaatgaagtcacattattggggttctatctcttcctgtacataattcagaagtttgtaatacctcactaaattcaataacttattgcagtcaatcacactacatattatgaccccccaaaaaagataatgctaaatctaacagctattttataagcgatgctttccaaacaacttttttttttctttttcactgcggcatagcaggagaaaacaaggttagatagtggctggcagaatttaggtatcaggatccctggcaccaaaatgtggatggaaagagcctagcatttgcttgagtctcacaattctagatttgagatcaaaccttcataattttagccatgtggtctcaggcaagttatttcaccttcttgaatctcacatggctcttctctaaaagtgacctaatgctaatgttcagatttgttgatgtcattatttgagataatgcattttaaatgtccatccaaagtctataatatagcatcggctaaataagctttcctcctctgttttcaattacaacattaatagaatgtttcatataacgtacgtgtatgtgtgtattgcttgtgtgtatgtttctgattatatatgtgcatatgcatacatacatgtgtatatataaatgtttatatgtgtgtatatatttgtttgtacatacataaagaactactcaatatttagactgacctcaaatatgacatttctttgaagttcatttaatcttaaaaatgtgtgtacttttatatttctacattatattttaatattaaaataatatatccacagtcatcacttgttaaagtgaaattgtccactccagaagataatgttgattttgtagcttcttgtgccttttgttcaccgaagtgtatccaagggaaggggtgcataccacagtttttaaagtacaacatcaagtgatattttcaggatgttttgtgtgcaaaatttttctaaagatgtaatgatgtacaggattaaagatgtaaggatgctattgagagccacgtgctctttacatacctctcatagacacttaaattgttttcttgggagtgggtttttatagaatcagaatcataatctggaaaggaagttaaattgtttcattcatgctgaatttgcacagtgcgttttgggaaaagagtttctttatattgttaaaaattcttcatttattcaatgagatttcatggccttgcagaaatgttttctgtatgtcattttttataactcttagtttttcaattgttaattttgcactcctgccccctccataatggatgacatgcgatgtacctaatctaacggaaccttagaatctaagggtatcctaaagggtaaatcacattataaatttttctgtccaggagaatgctattttagtcctggcctgatttcatatacataatatttttatatacatatagtatataatacacatacccacaaacaaacatacactactcacacactcttatgttgaaaatctaaaagcggccgggcgcggtggctcaagcctgtaatcccggcactttgggaggccgagatgggcggatcacgaggtcagnnnnnnnnnnnnnnnnnnnnnnnnnnnnnnnnnnnnnnnnnnnnnnnnnnnnnnnnnnnnnnnnnnnnnnnnnnnnnnnnnnnnnnnnnnnnnnnnnnnnnnnnnnnnnnnnnnnnnnnnnnnnnnnnnnnnnnnnnnnnnnnnnnnnnnnnnnnnnnnnnnnnnnnnnnnnnnnnnnnnnnnnnnnnnnnnnnnnnnnnnnnnnnnnncaaaaaaaaaaaaaaaaaaaaaaaaaaa

SEQ ID NO: 6401 - DNA, 731 bp, Macaca Fascicularis
  misc_feature (1)...(731): n = A,T,C or G
gatcacagagcacgatgtctacccttcaaatgtcccttcaagccgagtcaaaggccaccatcaccccatcagggagcgtgatttcgaagtttaattctacgatttcctctgccactcctcaggtttttgacacctcctccgccgtggtcttcatatttgtgagcnnnnnnnnnnnngtgttggtgatcttgaccatgacagtgctggggcttgtcaagctctgctttcgcaagagccnnnnnnnnnnnnnnnnnnnnnnnnnnntgggcccgccgggcctggagggtgatcctgagcccgctgctttgggctccagttctgcacattgcacaaacaatggggtgaaggtcggggactgtggtctgcgggacagagcagagggtaccttgctggcggagtcctctcttggctctagtgacgcatagggaaacaggggacatgggaactcctgtgaacagtttttcacttnnnnnnnnnnnnnnnnncaagannnnnnnnnnnnnnnaactgacgatttctgaagaaatcccccttcctctaaattccctctaatctacnnnnnnnnnnnnnnngaactcacactcnnnnnnnnnnnntagaggaagtggaagtgcctttaggatggtgatattaggggnnnnnnnnnnnnnnnnnnnnnnnnnnnnnnnnnnnnnnnnnnngaggatttggagaagtgattgagcttttcaagacatggaaacaaatagaac

SEQ ID NO: 6402 - DNA, 1854 bp, Macaca Fascicularis
agcaaccactttcaacatttctgcaaagctagagaaggtatcttctaatttaaatttgtttaagaattatctattgtgtaatatactgtcaacaggaggtcagttttaaaggaatactactgatagcctgaaagactgtggaaaagaaattatttttccccctttacacactgatagtttttgtatttgcattcctgcaattcatatatatttttcaaaaaaaaaaaaaccaaacattggattagcagcaagagagttgaaaatggcagaagttgggaatgactgctatttcttttttaattccacatgcataaagggttcccagtgccgattccgacactgtgaagaggcccttggcagtgacactgtgtgctcattatggagagagaggaaatgtttagatccactttgcagatttagacacatggaaatgcagcaaaactgcagcatttcatgcttctgggaaactcagcctcttggttgtgtgaagatcagctgtatcttttatcacagcaaacctcgaaatatcaatggattatttttgccaccaagtagatgaacaaaatgatgcttctagtttatggacaaagacccctgaagaaattgaagaaaaaagagcaataaaggagatgtgttataaatctggggaatactacagatttcatactcctccagatattttatcatcaaaaagcatggcacctacagcagaaaaagagttagaaaagcctttggaaaatggcagtgaattgcaagaaggagatagtcttacagttccgacaaaacttagccaatatgaaaggcaaggtgaaataaaaacatcattgcacgggaaaccaaagactgacattgctgcttttgaaaatggaggaggtgactgttatgttccacagagggtcatatttcttggagtcgatgaaagtgaagctttaactgaagagaaagaaatcaccatatcaaaatgttcaaatactaaagataacaaggacagtcctcatccaaagcgttccctaactacccgactagtacctacaacgcatgtattaaatgctactgagaatatcagtatgaagtgcagagaggacccctcttcaatgaatgatgtccagccagtgaagaagcctcatttcaaaggtgtgaaaaaaagaaaatggatttatgatgaaccaaagaactttcccgactctggaatgaggagagcagtacagaccccaagtccccaaaataaaatgagttatcatcgcaacaataaaaatcgaaatgctgagaacgcatcctatatccacgttcaaagagatgctgtcaggactgtcgcgttgaatgcacctccccacagcaggcccatgcatggatcctacaataaagtccatgttaacaaggaacccaaacccaacctcagtccagacaaatatatgtcaacatcatataatgattcagcctggcgaaaacgaattcctttttcaaaaacatattcaaaaagtggaaagatatatccagagccaagaagaaatgggagcaagtaaacctggaggttgaaagaagagaaaaatgagaaaaaagtgccagacatcatctgatttacaatcaaaaatgaaaattccaagaatgagatactcaagtactccatgctacatagtggatagccaaagatgataaaaatgcaaattctgaaaataagatgcaggaagtacattgtgctctttcaaaactgataaaaatgcaaattaccaacagctgccagtgtatttatgtaggtctggaattcattccgtacattactccaaacattttaataaaatttaaaagtttgaaaaaaaaaaaaaaaaaaaaaaaaaaaaaaaaaaaaaaaaaaaa

SEQ ID NO: 6403 - DNA, 736 bp, Macaca Fascicularis
tgaagctcgtttcagaggctgagtccccacatcagctttagttcttggacttccctatattaagcatgaattaggagaatgactgtccccgcaggcgcctgctgtaaatcctgagctctctggcacaatccgaaacttctcttctgttttctttggctgtgtcggccgagccaggagaggcctgggctgtgactaaggagaaagacatcaggggtttctgagagtagacggtggctttgtgggtgcagggcttttgtggaaattgtcagcctctatgggaagtgtccggcatcccctccccagactgcctgctgtcaccacagagctactggagcctgccttgcccacgggccatttccacccgggcatgttcgtctctcacgacttgggcagaggcccccggtggtcctgagtttcagtttctcgtccaggaaggtaaccatgggcattagcagtgggtttccatatggcttggatccaaattagagttgatctttgttttcactttccatagttaataacatgcaaaataatgaaacgaatttactttaaggggagagctgtattggtccaacattgcctgcttattgtcagggtacagaattttaatactttcttaatccagtttttcaaacttctccttgtagaccataaggatgaattccacgataggatcctttttaaaatctattttaaattgttgtctggtcctgccgaggttattatctgcatctgc

SEQ ID NO: 6404 - DNA, 770 bp, Macaca Fascicularis
  misc_feature (1)...(770): n = A,T,C or G
cctttactagtgtttcatttaccnnnncnattcccagattggatagaagtgcttgacatgcctttttaaatgattatttaaagaatacatgctagttataggaaaaaaaatcaactgaaatttnnnnnnnnnnnnnnaagatcacttaaaatcctaccactcgtcaaaaaactattaaaannnnnnnnnnnnnnnnncatgttagggcatctctgtatgtatatacagatagatagaatggattttataaaaannnnnnnnnnnnnnnnnnnnnnnnnnntaagaagtatggaattttacctcattctttaaattaaatttgggtggcattcagaaagcccttttaaaaccttctaataaattggatcaactgagtttagacttgtaatttattttttaaaatacagagggcatattaaatgagtaagttggaaatacttgagatgaataaataacatctttgccaacttcctttttctcctgatcagtcttgtgagtgacccttgataacttttcttaaaagcaatatgagtcaaccaaagaataagattaatttttgaggatttgtgataaccagaagaaagcactgtaggctgtgacagcctgtgatggccaagagaaatacaggggagccaactggtgatccacatannnnnnnnnagagtggtagtatttttgtgtcagcttattacatgcctgaacctctggattgcagcagtgttgtcnnnnnnnnnnnnnnngctcagactaatcagagtctgattaccctc

SEQ ID NO: 6405 - DNA, 2051 bp, Macaca Fascicularis
ataaaacttaaaatagcacacacttaagagaaagtggtaattttcaggaaatccccacagacatctctagcaatggatgaccaattatgctattattgctgatgatacagctcattcgcttaatactttcacaaagtaaaaattagtttcattcttaactgtgatgtcaagaagtgcaattttacatttttaaaatggatgtgtagtgtgggaaaggtaaactgtttagctgagaaaggcttatgtatggtttgcagataaccacaggcgggaaggaataacacaaatagcaaactgcaaaactctggtaatttagaaaagcaattaggaagaaagtaggaagaggttcaatgggggcagggcaagatcagatatacttaggaagaaaaaagttctcatttgtaggagacactgagacaactattctaggttaactctcttttgtgttggattttttgctctgcttcaaaaggcaacagaccatactcctgcttcagacaggcagcctgcctcctgtgagcaatctgggcaagtgtttatagatggctttggatcaaagcagtgttctagggagggcagagaaccgcagggggaaaaaaaaggatatgcctgccctggaacaccaatgatcctcaagagtaatttagaccatttcttttatattaaaaatgaaacatctatatgccacagagtagaatgtaaacttaattacaaaaatagggatttcaaaggaattccgagcctatgcttagataccacctcaaagccatgggttgactcatttttttctgttttctgtcatttggggctcttggggggaacaatcagagaacgcctgctctgcagactgtatcagggacaacaactttgggacaatttgagtggagatgaccaagccctctcctagttagcaaaggcagtggctagcagatggaagtactaacaacttaccttttccccacctacagatgaattggaacagtcagccatctctgtgtcctacactttaggtaagagccccaggcaacttctccacctgtgctctggctccaattccactctgcagggacctcactctattcattacttttatttgtccctggccatatttcctcaactcagggatgacccctctagttgtctctttccttccctgctcagtcccacaactttcctgtcacttgcccactggaggcaaactcctctggaaaaggtcaccggggtggcgggggagagagacagagagagacagagagacttttctggccacatcccatctcatatgttggcgtttcccagttttaccttcagctctctctacgctctttctgagccattttggccagtccgagctcagttaacatcacaaggtgactcctaaagtgtggctctagctcctcttaagtttcacaccatttctgaacatctccatatgaatatcgcataagtaactaaaatctgtatttatcaagctaaactcattacatactgctctcctgcacccttccttaaacatattcttcctctgtcagtatcctctcaagatatggaggctgatcatctgatcatgccactctcctacttaaaaacccccaaaaactcccattaggctttgggttaaagtccagagcacataaacccttgtatgccctgaccccattgtctcaaacctcactcttgtcccggctcttgttcacaacttaatacccaaccattcagatacacctgcaggtcctggacggtcatgctctttctccacctagaccctcagatatgctgctgcttttctagcagaaaagcactttcccttccctgtctcagtcatctgcgaactacgtttcatccttcagccctcagtttgggcaatttttcttcacagcctattgtgatctggtccctttcccttgctgggttgcatccatgccatcctaggtgtatatctatcacagcacctattctctgtgttgctttctgggtgacagagcgagactctgagactcagtctcaaaaaaaaaaaaaaaaaaaaaaaaaaaaaaaaaaaaaaaaaaaaa

SEQ ID NO: 6406 - DNA, 786 bp, Macaca Fascicularis
  misc_feature (1)...(786): n = A,T,C or G
tgaagtagcattgcctccactnnctggatgaggaaactgagtcactgacctggaatcattttatcaggactacgggctggaccaatattgagggacctgggatgcgagcgcagatttgccccaccccagagcccaggcgggcgtggagaactgcagggaaagagtacgctcagcgataagcaagttcctctttctgatccgggggacttacttttatcccgagggactcgatttctctctccaatgaaacaaaacaaaacggcaacaacannnnnnnnnnnnnnnnnnnnnnnnnnnnnnnnnnnnnnnnnnnnnnnnnnnnnnggtactggtattgaacccagggagcgccggggacggccgtcgggtgcactgtcgggctcaggcgcccacctgagagcttcgtgcagggaagagcagagtggtcctaggggttggaagccctctaaatccgggcatctttgcctctaacataagacacttttggccctcggtctccgggtacggagactcatccaaaacaacgcttcttttggaagggtcacggaaaacggcctcgcctgcgtcctcagctttgggaggaaagaggagacccgaccacggtgggagccagtggtgggtnnnnnnnnnnnnnnnnntgaggcgtcaggtgggcggcgcttgnnnnnnnnnnnnnnnnatattggccaggggtactccgaattgtctcccacgctctaggttctgttgcctgagaaagtcagcttgagaagacattcttaaattaaaaataaaacaaaacnnnaa

SEQ ID NO: 6407 - DNA, 570 bp, Macaca Fascicularis
  misc_feature (1)...(570): n = A,T,C or G
tttaaagttatatactctatgtttaaatataccccttaaaaagcctgagctatataacaatctggatgtgactgtgttaccncttttcccacaagataggagggaatcccctttgtaaaactatgaatccaaataaatgtttacaaagtggctcttgtggtaactggtaattaaacgattatcaattttatttttgaaaatgcaactgtaatagtgtatgttgtcattgccctgagtctgatgtgagccagagtctagtttgacctgtcttctacccaaggcattatcctttgttgttgatatggtacctaagaggcttaaacaatctctaggggacaaacttgcaggttataacatagaactgctttttttctttaacttaaattttagtttttttgagacatgnnnnnnnnnnnnnnnnnnnnnnnnnnnnnnnnnnnnnnnnnnnnnnnnnnnnnnnnnnnnnnnnnnnnnnnnnnnnnnnnnnnnnnnnnnnnnnnnnnnnnnnnnnnnnnnnnnnnnnnnnnnnnnnnnnnnnnnnnnnnnnnnttaaaatattttgtagagatg

SEQ ID NO: 6408 - DNA, 636 bp, Macaca Fascicularis
  misc_feature (1)...(636): n = A,T,C or G
agctagttttncnnccagatannnnnnnnnnnnnnnnnnnnnnnnnnnnnnnnnnnnattgctacataatttggttcttctggaatatttttatgtagctcttggaagtacagctatgaaaattaacaactgttaaaggaaatacctctttttttcatgattttttcctcgaagaaccaaagtattttttcagctggttgttgaatagggttaagtccgcttggattagctgtgcctttcattactttgttacagaaatgcagtgacttatactaagataatgtatcgttaaaaaaaaaattggcaagacaacgatatggttaagaatttccagtatgaccacacccaataactgtattagattgttagtggattattgtgttttaggtgacatagttaactgtaaagtaacctggctcagtgtagttactggtaccacagtgaggtgaataaaacgggattttcagaagttagcctgaatttacctgtacttttaaatttaacctctattaactaagcatcttttctttgtggtagggtctaccttctgcttccctggaaaggatgaatttacatcatctgacaagcctattttcaagttatttgttgtttgtttgcttgtttctgtttttgcag

SEQ ID NO: 6409 - DNA, 693 bp, Macaca Fascicularis
  misc_feature (1)...(693): n = A,T,C or G
ggaggttttgcctggcatccaatggtgaccatggcctttggtcaaactcaacagatagtacccaaacactacccttaaggaccactgcagttctcttagggtctcctcaatctaaaattgtgcctctttcaggctaaactttcttcatttttttttttaatcataagaatactaactagtatgcctattatctaactggcacactttcaccgaggannnnnnnnnnnnnnnnnnnnnnnnnnnnnnngcttttgacnnnnnnnnnnnnnnntctttgggaggtaccttaaaacaaaannnnnnnnnnnnnnnntgaggagattgtcttgtttttctcaaaatgagataattttgcttaacataagtagtatccctttccattcttnnnnnnntgataagtactgnttttttatcacacagcttgataaaattttcaagggtccaaattactgtctaaaccctttaccactctttgtgtatatttgtcaaaatctgcttttctgtatcaaaacttctctctcaagacctgaggtaaataattaataaggaatccttggaacactggaaattctaaaataagagtcagatacaaaacactggtcactaaaattcttacctttatatattagaatggcaatcaattaaactgaaaatgtctttggatattatttctgtttattttctgcttcaaaa

SEQ ID NO: 6410 - DNA, 746 bp, Macaca Fascicularis
  misc_feature (1)...(746): n = A,T,C or G
cagtcccagnnnntnnnaggctgaggcaggaggatcacttgagnnnaggagattgaggctgcagtgagcatgttcacgccactgcactcccgcnnnnnnnnnnnnnnnnnnnnnnnnnnnaataaataaataaataaaacgagtccctgaggacacatcacacagtctgctatagctaagtgtctaggaagaaataaaaactccagacccttcagtggatgaggacaaggaggtcgccgaaaggnnnnnnnnnnnnnnnngaacagctgaaagctggccagaccctcctgtatgcctctgcccttgtcctgtggcctgtgggttgtgaggtctgannnnnnnnnnnnnnnnnnnnngaagcgaggcnnnnnnnnnnnnnnnnnnnnnnngtctttccccagctctgtccctatagttgcctgccggtgggcgagggtcctctccccgggagaagcactcccagccccgtttatcagaagcaggcagggaaattggaactgccacccaaccggcatggtggctcaatttgttggttgcgttgtcagttgtctnnnnnnnnnnnntttttaataagtacgtttggcataatgtattttaatgggtttgtaatatcgtaatggtnnnnnnnnnnnnnnncttttcagctggtgcttttacttagggaaaaaaagacaatttgtaaatacagaacattgtttaaaagacgtaaccatagaacatagcttcctgtttgtggatttcgtttc

SEQ ID NO: 6411 - DNA, 751 bp, Macaca Fascicularis
  misc_feature (1)...(751): n = A,T,C or G
cnnnnnnnnnnnnnnnnnnncaaccgagaccagaggaaagcagggcnnnnntcctggaagaaggcagcgggaggcctgcggtcgcagggcggcttgcggagcaggagcgccctcnnnccgccgagctatcccgcgccttccagcatcccacctggcggactcctcttcctctctcttctcctactgcgggtcttctatcctcgtgttccttgaatgcctgtcttccttttgtgcctcggaacctctcacgcccgccacaagttactctttgccttggttgttctgaacttgaaataaggtcatgcagnnnnnnnnnnnnnnnnnnntcaataattgtcatctgtgattattttcatcagtaacatctgaatcatcagtgttgtctacttttaacagctgcgtttttcattgtccgaatatagtcacatacatttgaacattttataattattgaataataaattcattctgctattttacaataaaaaataatgctgcagagagcattcttacacatatatcttggcagatgtaggccaggggctcttcttttatccgtcctgtggccaacctatcaatgtatacacctttaatgagattttgccagcaatcaaagccttcagggaaaatgtccctagtctttactacattggatcaaggactctggacgattggcacaacggtcctggaatagctgaaacagagacattattctctgctctcctctgttgtctttgtctttcacaatgtc

SEQ ID NO: 6412 - DNA, 717 bp, Macaca Fascicularis
  misc_feature (1)...(717): n = A,T,C or G
ccagggaattnnnnnnnnnnnnnnnaaggtaccagctggacggttgattaaggagcctacaagtttaatggatattttaccaactgtcgcctcagtgtcaggaggaagtctccctcaggacaggnnnnnnnnnnnnnnnnnnnnnnnnnnnnnnnnnnnnnnnaacgccaggcactcggaacatgagtttctgttccactactgtggctcccagctgcacgccgtgcggtggatccccaaggatgacagtggggcggtttggaaggctcactatgtgaccccggtgttccagccaccagaagctggtggctgctatgtcacctcgttatgcagatgtttnnnnnnnnnnnnnnnnnnncacaacccccctctgctcttcgatctctccagggacccctcggagtccacacccctgacacctgccacagagcccctccatgattttgtgattaaaaaggtggccgacgccctgaaggaacaccgggaaaccatcatgcctgtgacttaccaactctcagaactgaatcagggcaggatgtggctgaagccttgctgtggggtgttcccattttgtctgtgtgacaaggaagaggaactctctcagtcccaggctcctaatgagaagagataattacaatcaggctaccagagaccactatctttggtgctttcaagtttgcaaggagtgcatttaagagccaataaattaatctacca

SEQ ID NO: 6413 - DNA, 739 bp, Macaca Fascicularis
  misc_feature (1)...(739): n = A,T,C or G
gtcctgaggaagtaattgaataatngcccaaagattatatgtacaaggctgttcatcccagcactgtctaagctagtaaaaattggaaacaatttaagtatctagcacattggattggttataaagtaaggaatgtttacacagtaggataagtatgctgatggaaatctatattgccaggaaaagctattcattatgcattgtgaagtgagaaagaaaaaatgggtagatagaagtatttgaagtataattccattttttaagactaataaaacatatgtttaaaaggannnnnnnnnnnnnnnnnnnnnnnnnnnnnnnnnnnnnnnnnnntatctttgggtagaaggataatgaatgatctttacttttttactttttattcatctatgtgtttttatttatctaaaatgggtattgatttttaggaagtttttgagaaagaaaagtgatgggaatgaagcaagtgattgattggaacacatattgaatggaagaaatatttagattaaaaatgaggtaggttgaatttcttctctgaaatgatagataaggcttattatgaggattcaatgaggtaatatatgcaaagtacttacaatgttctgcaacatagtagttaattaagaaaattgagcacccttaattacctagaatgcagggttgatagttttttggttgacttttgttttgctggggcattctgccatgttttagcgtcatttaataaataatagta

SEQ ID NO: 6414 - DNA, 697 bp, Macaca Fascicularis
tacacagttcatgaattgttttaaatgcttcttaaagcctggctttataaccgtttaaaatcaacaatgttgattttagataaccaagtaagtattataatacaaaataattttaagtgtaggaaactaaagtataatcaaagtaaattcagatattgtgatttgtggtattgccttgccttgcataatgctggggggaaaagagaaaggaaattgttttctttttgtgcttttattcagcggaggggaaaaaagcatgtattgggccacaggaagaaaagctaataagtaggctggaagtaatattctaccagcaggaactcaacagctccagttaagtgctttgatatagtggctcttttgcagagccaaaacaagatttattaaatttccttcaaagtgtttatctttaaaacaaataaaaggttttaattatactgctgaagtgaatgtgaatgccaaagactaagttttacagttttgctttcctcccaataaatattaatgtatgtaattctagagggtaaaaatgtaaataggtttgaacaatatttgcacccttgtttgtgttatgaaaaaattttttccaaggcgagctggagagaaagatgtttggcatgccaaattaacttgcatgtttgttaaaaaaacaaacacatgttttgaagagaaaccagatctgaacatgtatttgtga

SEQ ID NO: 6415 - DNA, 685 bp, Macaca Fascicularis
  misc_feature (1)...(685): n = A,T,C or G
gcacggtcttganncnnngcaacctttgnnncctgggttcaagtgattctcctacctcagnnnnnngagtagctgaaattataggcatgtgccaccatgcccaggtgaaacagtcacaaatggaatatcaagaaacatgctatcaccaggtattatctactgnnnnnnnnnnnnnnnnnnnnnnnnnnnnnnnnnnnnnnnnnnnnnnnnnnnnnnnnnnnnnnnnnnnnnnnnnnnngatacactgcctctaggactgggacagatagccactgagtaccagcttcaaatcaccctgcacattttcttgttggaaagataaccactgnnnnnnnnnnnngttaccttcagcaaaaatgaaaacaaatcaagacattaagaatgccacagtggacagcagtnnnnnnnnnnnnnnnagaggaagttttnnnnnnnnnnnnnnnnnnnnnnnnnnnnnnagaaannnnnnnnnnnnnncttttcatctcagctgctccttaaatcagtccaacccctccaaattaatgtgaattgaaatatgcattgcttttcaacttaattgagtacttactatgtgtgaaccactgcacaaaataggggaagaaaatgagggagacaaagcctgccttcagtaaatttacagttagtttcagggtacattgtttttcttctgctgttaattagg

SEQ ID NO: 6416 - DNA, 2315 bp, Macaca Fascicularis
ggttactctgaattcctcacaggcgaaggacatttgaaggtgtctggagaagccgatgaaactcagattgcagaagcactgaagcgttacagtgaacgggcattctttgttcgggaagctctatttcatctttttagtctgactcatgtgatggaaaaaacaaagccagaaattttaaagcttgtggttactgggatgagaaaccaccctatgaatttgccagtgcaactggctgcaagcgcctgtgtatttaacttaaccaagcaggatcttgctgcaggaatgcctgtccgactcctggctgatgtgacccatttgctactcaaagccatggaacattttcccaatcaccagcagttacagaagaattgcctcctttcactttgcagtgaccggatccttcaagatgttccatttaacaggttcgaagcagccaagcttgtcatgcagtggctctgcaaccatgaggatcaaaacatgcaaaggatggcagttgctatcatttccatcctggctgccaagctttctacagaacaaactgcacagcttggtactgagctcttcattgtcaggcaacttcttcaaatagtgaagcagaaaaccaatcaaaattcagtggacactacgttgaaatttactttaagcgcactttggaacctcacagatgaatccccgaccacctgtagacactttattgaaaaccaagggttagagctcttcatgagggttctagagtctttcccaactgagtcatccattcagcagaaagttctaggacttttgaacaatatagctgaagtacaagaattgcattctgaattaatgtggaaagattttatagaccacatcagtagtcttctacacagtgtggaagtggaagtcagttactttgcagctggaattattgcccatttaatatccagaggtgaacaagcttggacattgagtcgtagccagaggaattctctgctggatgatttgcattcagctattttgaaatggccaactccagagtgcgagatggtagcatacaggtcctttaatccatttttcccattacttggatgtttcacaacaccaggagtccagctatgggcagtttgggccatgcagcatgtctgcagcaagaatccttcaaggtattgcagcatgctgattgaagaaggaggactgcagcatttatacaacatcaaagatcatgaacatactgatccccatgtccaacagattgctgtggccattctggatagcttagaaaaacacattgtgcgccatgggaggccacctccctgtaaaaaacagccccaagccagactaaattgatagccataagtattggataattgaattacaggaatcctttttgtgattggtccatttggaatatcttaccctccgtgatgttttgggggtttctatgaccggagtcataaaatcagtttgggattggtaatgtatagtactgcccatgtgaacagtccctaatttgtcttgtgatttttaacttatgagtcaagaagggtctcttcctttatcattgccttttaggaaattttccacatctttcagtgtttgaacttacttgtgcttgagattctacagttttatggtaaagtttgcacgaaccctcaggccagacttttcgagtcccttccagtcaatttgcagcttcacataagctgttgacctgatttctgacactgcttcagttgtaaattttatactgcttctgtataaaatggctttcttctctatctgtgtatcttttataagatgtccttcttagtgtgaaagaagggaaatgtggatcatcttgtggaagctaatcactggcaggagcctggatggctggcggaaagatgtatgagaaagaaaaactatggaaggagaacggagtgtaggaactgggaattgctttcatggtgtagattttaaaatgagacaggctacccttcaggagtctacctctcttgaggcagtgagcagaagcttgttctccatatttatacctagaagcgtggactgctgcttcctgcacagactgctggttattctctaggaatatttccccaagcaccacagtataaaatgttacagcactctgtgttaaagactgtctacatctccctatgtcgtattgttgtgaaaatgtgattttaaaaaattatcgccagtcaaaactggctattctcttcctctatttcaaaatcatttttgttcagtggaatagagtcaacaacatggtgttaacctctcagttaaaatacaattgacaccagtaaattttgccatgaaaagttaaaaaaaaaaaaaaa

SEQ ID NO: 6417 - DNA, 729 bp, Macaca Fascicularis
  misc_feature (1)...(729): n = A,T,C or G
attggaatgccaggnggaggnnnnnnnnnnngccagtggggacannnnctggaggcagctggtcccccacaccgnnnnnnnnngagcctgcccctggattggcnnnnnnnnnnnnnnnnnnnnnnnnnttcatcttcatgggaaatttgctgagcccccaccagggaaccggatgatgaaacagggatacctcacagcgctgccatttnnnnnnnnnnnnnnntcccgggccgacgctagagaagacagacttccccttcctcccagcgccagcagtgcagagcccacctggaagcgtgtggggggcgtgcagggggcnnnnnnnnnnnnnnncctgggaagcggcctctggatgctgagtggaaggacccagtgagcacagcaaggcaccaaagcccnnnnnnnnnnnnnnnnnnnnnnnngcggccgtcgtcagggtcacagcagatggcgcgtgggtggggaaggggctctgggaccagacccccacannnnnnnnnnnnnnnnnnnnnnnnnnnnnnnnnnnnnnnnnnnnnnnnnnnnnnnnnnnccggcagaggccccgaggcctcacttttcggatcttctctcccagatcctgctccctcccggctgagcctgggttccctggcattggcccnnnnnnnnnnnnnnnnnnnnnnnnnnnnnnnngccgcacactgcnnnnnnnnnnnnnnnnnnnnnnnnnnggnnnnngggccccacctc

SEQ ID NO: 6418 - DNA, 715 bp, Macaca Fascicularis
  misc_feature (1)...(715): n = A,T,C or G
tgaataaagtggaatggtaacttttcagtggttcagaattgaattagacttcttgtgattgtgatgtttggtttccattcaaatatatgaagtgagannnnnnnnnntgaatatagtttctcttccccaattannnnnnnnnnnnnnnnnnnnnnntaaagattaagaacagagtttctctaaattcctctcattattccactaaggcacattaaaataattttgggaaaccagacatcacagatttttccatgaagtcctaaatctttaaagtcagaataggtatcttagttactgacagtattcaggttttttcctcccttggtgatatgtcattgcatcagtgaaaaaacatatttctcccaggggtaagaaaggtactctggtaatacattatcatcagtccttaaacagtaacagtgttggtacttatcataaaaccgactcatctcttaaaaccagaaagattatcttagactgtccttcacattatactttacttactgccttgtaagaataagagttgctcactgtgtttatttgctgtcctccatattctctgttgcaccattggtgtataatgttgagtttcattgaatattatttgaagtattacagaaggcagcttgcttcttaatctatgcatctttggggtttctgaagaaatttaattctttgatgtaaaaaggaacggttaaaagagttggaaactctg

SEQ ID NO: 6419 - DNA, 765 bp, Macaca Fascicularis
  misc_feature (1)...(765): n = A,T,C or G
gacactgcagacacaaacagcattcactgatgaccaactgcttgttctcaccgatcttcttgtgtcaccatgctattatgcatagaaagatgactagtcctcacttcaggctcttttcatcaaaaattccacaccntcaggtaccatctgtggtggctctctgcaagttttaaaactgcctctgctgagctctcatcattttggtggtttctgtgttagatctcattagtgtgcattccacagcttctcagttgccatttgatttcctaacttgtccggaagtgtttccagaatactgatcacttttttttttttgaggcatctgacaaagtcacaaagtctcagactagaaataattacccagtatgatcatggcatccaagaccagagtctcggaactcattaagaaacagttgacttggaatggagaatgcccatctgtcacacaggtcctgtcatttcattcttctcaagttattttcaattcttcnnnnnnnnnnnnnnnnnttagttggtagtagggctgtgggccataaatctgaagccttgagaaccttgggtctggagagccatgaagagggaaggaaaagagggcaagtcctgaacctaaccaatgacctgatggattgctcgaccaagacacagaagtgaagtctgtgtctgcgcacttcccacagactggagtttttggtgctgaatagagccagttgctaaaaaattgggggtttggtgaagaaatttctgattgttgtggtattcaatgtg

SEQ ID NO: 6420 - DNA, 742 bp, Macaca Fascicularis
  misc_feature (1)...(742): n = A,T,C or G
gcacatatatgtgtattatttttcagtccatttccttccatttccgggttctctgtgcaccaatgtggcattgattctgtggccttgtgcagtcagcttatgctcagcccattgattctaccacatccctgatggaggggacattaattacctgtctttgtgaattaagcagtttatgagcagcaagttactgaggaccgtaaataaagtcatagagagctcaaggaagtaatagcttcggtttaatnnnnnnnnnnnnnnntgccaatttttatatactactatatgtaatgatttgttctaaattgcttgttccttttgaaaaaaaatttaaggatgttttatgaaaatgaccatggaggtctcctgcttaaccaatatactttatagttagaggacccctccttgattgatttgaatgaggagctggaannnnnnnnnnnnnnnnnnnnnnnnngtttgtgttatctctgcaagccaaaaggtatattagcagtcataatacagcactttacagaactggacttttttaaannnnnnnnnnnnnnnnnnnnnnatattatttagcactttgaaagttccccttttaaaatatatatatatataagaataatcagatgagaaaaatgtactcataaaaacacaaaatgtgtttcttctgaatgtttcaaatgtattctaaaacatggtttctatagataatattatggtagataactggatagtacttttcttttttact

SEQ ID NO: 6421 - DNA, 320 bp, Macaca Fascicularis
  misc_feature (1)...(320): n = A,T,C or G
tagtctgtaacacccttcatcagtggctgctaaatgaagatcaaatcgaagagaaacagattttttcctcaatcgagggttatctttaaagaaagaaccttcccattctttaataacttcatccactttctctgtcctgaaatgataaaataaaccttttaataatgaagtatgggtctattaaaaatatgtattatgtatttcatatctatggaaaaatcaagaaatttgtataatttatggtgttcacagtttattatgtatttgtttggacacccttatncntagaagtgcaatgnnnntgnnngnnnnttgtcttt

SEQ ID NO: 6422 - DNA, 1878 bp, Macaca Fascicularis
agctggggagaaaaaacctatccattgcaaagcatcattaagccctcaaggcctttactaaattctgtgattagtcagtaaagttattcagcctgtggtggccacacaggtagcgagttattagagtagtcttagtgtttgtctcctaggagcttagactgagtggagcctacaccctaaggagagaggctgaagagtccccacctctttgttctggtagaccagtgcagtacctgtaccaacccacaccatctggctgggggcaggaaaagatgacaacagggtgtccagaaaacgcggcagtggatgcttctgttctgcaatcatggcagcagtgaattccccagagggagcatctgtagcctgtggtggtgcttgtcttctcacatctccaccagcatctggctgaggtgtccaggtaatctgactcacctttccttccttgccagagctgggagaacagtgggttctggagtcgactggaatacttgggagatgagatgacaggtctggtcatgaccaagacaaaaactcagcgtggccttatggagcccatcactcacatcgggaagccccactccatccgggtggagacaggattaccagcccagagggacgcttcataccgctacacctgggatcggagtctatttctgatctaccgacgcaaggagctgcagaaaatcatggcagagctggatttcagccagcaggatattgatggcctggaggtggtgggcaaagggcagcccttctcagctgttactgtggaagactacacagtgtttgaaagaagtcagggaagctcctctgaagagacagcatacttaggcacattggcaagttcctctgtgaatgccgagctcttaccgcgctttaggagccccaccatttctgaacctcaagtgccccagcctgcgaatgaggccctcagggaatcgggatcccagaaggccagagtgggaaccaagagtcctcagcagaagagcatcatggaggaaatcctggtggaggaaagcccagatgtggacagcgccaagagcccctgggagccggatggccttcctctgctggagtggaatctctgcttggaggatttcagaaagaatggtgcccatgaccctgccaggcagtgatggtgctccctgatgagaaccagagagaggatgcgctgatgaggctcaacaaagcagccctggagctgtgccagaagccaaggccattgcagtccaacctcctgcaccagatgggtttgcagctatggcgagatgtgattgacagcctggtgagccattccctgtggctgaggtctctgctgggcctgcctgagaaggagaccatctatttgaatgtgcctgaagagcaagatcaaaaatcacctgccatcatggaagtgaaggtacctgtggggaaagttgggaaggaggagcggaaaggagcagcccaggaaaagaagcaactggggatcaaagacaaagaagacaagaaaggagccaggcaggaccgtcccaacagcaagaagcacagggcaaaggacgacaagaaagtcataaaatctacaagtcgggacaggttttccttggaagaccctatgcctgacatcaacctcccttcacaagaacccatagaccccctggtcatggagaaatacacccagaggctgcacagcgaggtccatgggctgctggacaccctggtgaccgacctgatggtcctggctgatgagctcagccccataaagaatgtcgaggagcctttgcgtctctgcacgtgactctcgggcccaagcaaccttctggaaaacgggttaataaataataaagaaccttcaagtttctgctaaaaaaaaaaaaaaaaaaaaaaaaaaaaaaaaaaaaa

SEQ ID NO: 6423 - DNA, 352 bp, Macaca Fascicularis
cctcacccctgagacttaccctgaactccctaatcttgcaaggccataagtgttttccaagcagaatgcctctcccatcctctctcaggaaacttctagagaccttatgccctccagagctccaagatataagccctccaagggatcagaatctccaagttcctgtcttctgttttatagaaattgatcttccctgggggattttaactcgtgacctgtatgcagctgttggagtaattccacttctcttgaaaaaaaagaggaagatgatggagactgagaatatacacatatatatatctgcgtgtgtgcgcgagtgtgtgtgtgtgtgtgtgtgtgtgtgtgtaaagcc

SEQ ID NO: 6424 - DNA, 728 bp, Macaca Fascicularis
  misc_feature (1)...(728): n = A,T,C or G
gatactcactgncnngcagctgctgcatacaaagtggagtcaagggaccgnnnntgcccccaacgccctctactcagcactttgcttgcagttaggagctcgtccnctgccccaccacaaggctgccccggtctccctagtctttggagagttggaccagtctgcaggggctgttcccggagcgactggccgagatttctcgctgctccttccctactcaaaaccttaaccctgggctggacagccctgtttttccccagcgtctggtggtggctctgggcttttgcaagttacagtgggtcttttgatcttaagcgtcaccttcccagtaaacggaacaaagaagttacagacagcagctaagtggggagaggggagctaaggagagaaggtgggaggcgtttctgcctgcttgcagctcagaaatttaggtgcaagtaggatgcgggtgttatgctgggcaactgtccgggaagcagcgcgcctcctcgggtcctgtcattaccactctaagtcgagggagggaactcagtcccccgcattggaaacgaggcagtgtttccagttcaacactgtgatggttctcttttccctctaggggcaggagtgtttcccagtccagaagtttgacctcttattttaatacaacacccgcctcttacaggcaacagaccagtccagccaggtcaacgtgaaatatgcgggagttcccccccttcttattaata

SEQ ID NO: 6425 - DNA, 726 bp, Macaca Fascicularis
  misc_feature (1)...(726): n = A,T,C or G
atggatgctgcttntccnntgcccaaaaccatccncnnnnnttgggccctttagagattgtgggagctgggagcccccagggcctgggggcttgtgggcagagccagtgggcgggggcccagcattcagagccagagaagggtctcaggtggcaccatctccgcagaggcagacgcagaggcagagagaaggcacccccccactctgacccatcccccccaggcaagaactgcaggctgtggacacctcccctggcaaaggatggccaacagagactccgagagtcctcactccccgcccagaaggagacgctgccnnnnnnnnnnnnnnnnnnnnnnnnnnnnnnnnnnnnnnnnnnnnnnnnnnnnnnncaacccccacatcgtcatacgcatcctctccnnnnnnnnnnnntcccctctcccagcaccctcctccctcagcccggagacccttggatggaagacggggccagccagagtgggaggcagaaccagcgtgtctgtgagcacatgtgtgtgcctgcagacatgcccccagaccccagagatgccccggccccagtcacatggtgtcagagttaccttggcaactggcctttttggttcagagtaaattgggaagtgaagcnnnnnnnnnnnnnnnagaaacgcactnnnnnnnnnnnnnnnnnnnnnnnnnnnnnaaagacttttttttaagttccaaaattatgatgggattttt

SEQ ID NO: 6426 - DNA, 426 bp, Macaca Fascicularis
  misc_feature (1)...(426): n = A,T,C or G
gatttcatacataaccccgtgggagcttttgcagtctcaatatagaaatttctctagtgcttctgattaaaatacagaatcaagagctatagtaatagctcatccattcagttcaatgaaggattggaggcgagttttgtataggttgttagaaaacgggagctagggccgggcacannnnnnnnnnnnnnnnnnnnnnnnnnnnnnnnnnnnnnnnnnnnnnnnnnnnnnnnnnnnnnnnnnnnnnnnnnnnnnnnnnnnnnnnnnnnnnnnnnnnnnnnnnnnnnnnnnnnnnnnnnnnnnnnnnnnnnnnnnnnnnnnnnnnnnnnnnnnncagctacatgggaggccgaagcaggaagctcacctgagcccaggaggtcaaggctgcagtcagtaatctatgattgcaccattgcactccag

SEQ ID NO: 6427 - DNA, 687 bp, Macaca Fascicularis
  misc_feature (1)...(687): n = A,T,C or G
cagcactgaaaannnntttgcattaagagatcattgcaagagcannnnnnnnnnnnnnnnnnnnnnnnnnnnnnnnnnnnnnaagctgttagtacagaccagatgctttcttggcaggctcgttgtacctcttggaaaannnnnnnnnnnnnnnnnttttcagtgctggcatattttggaattctgcacattcatggagtgcaataatactgtatagttttccccaccccccacaaaatcacccagttaatgtgtggtggtgttttttttttttcaggtagacattactacctgtaactttttttcttagtcatatttgaaaaagtagaaaattgagttacaatttgattttttttccaaagatgtctgttaaatctgttgtgcttttatataaatgtttgttttttatagtttaaaattgattctttgggaatccagttgaagttcccaaatactttataagagtttatcagacatctttaatttggccatgtccggtttatatagtttacaaaatatagcagatgcaagattatgggggaaatcctatattcagagtactctacaaatttttgtgtatgtgtgtatgtgcgtgtgattaccagagaactactaaaaaaaaccaactgctttttaaatcctattgtgtagttcaagtgtcatgccttgaccaatctaatgagttga

SEQ ID NO: 6428 - DNA, 737 bp, Macaca Fascicularis
agtgattatatgacaatttctccttacttttgctctctttataaatttagcacactgaagaggtctgagaatgcaaattttgacagaagttcaaggtatttcacatactaaacatcatcggatggtttttcttaaattagaatttcaaaagggaaatgtactggtgcgtaggaaaaggtgattggatccagggtcacagttgttgtcataaggtctccgtctccttttctcttgttagcgtcccttctgggcaggtctctcacatgatgacttcccagatctacaggcctgattcccagcagcttccagtccaccaaaacaagaactgatttggccttgcctaggttatatgcccactactgagacaggccttgtggtcagagagatagcctgcccagaaggagatggcatacctccccagagctggtagaattatggagtgggaaggagacaggagaggtgggcaggacattgacctgagtcctatggactaagacaaggagatggaaaatttccaaagggaaaattacactgtcattaccagaaaggtgaatgcatgttgaggtgacaaaaacaatagccgctgtagagaaagaaagagtgagtaaaagatgagttacctcttgatcctttggataagtttgcatacatcttggttcctgtaacatgcctagatccatgttttcaaagtgtgtgaaaaactggatcactctggatagggtatgataaaagaggag

SEQ ID NO: 6429 - DNA, 562 bp, Macaca Fascicularis
  misc_feature (1)...(562): n = A,T,C or G
accagaaaagtaacaattgtcatacttaaaatagnncttttaaagaatnnnnnnnnnnnnnnnnnnnnnnnnnnnnnatattatcatatcatttttgannnnnnnnnnnnnnnnnnnnnnnnttaaannnnnnnnnnnnnnnnnnnnnnnnnnnngtagtctcaaaatccacaattatattaannnnnnnnnnnnnnnnnnnnaaagagtatacatcaccnnnnnnnnnnnnntgtttttctttttctctttgtaaaccagattgaaaagnnnnnnnnnnnnnnncccaaaaaagaagtgatcaaggaagagtttaaagtgaatgaacggccttggctnnnnnnnnnnnnnnttcacaactcatttacccttggatgnnnnnnnnnnnnnnnnnnnnnnnnnnnnnnnnnnnnnnnnnnnnnnnnnnnnnnnnnnnnnnntcatggtccccatggcctgggggcctcagggcagcctgcctggagcactttgaagatgtcatcccattgtcttttgacctctgtaattgccacggagagatctgctgtcagtctgcttatcc

SEQ ID NO: 6430 - DNA, 612 bp, Macaca Fascicularis
  misc_feature (1)...(612): n = A,T,C or G
catgaagcaggaagtgtttaaaggagggaaggttactggttaaattaggataggaagaaccttccgtaactagttgcaaaagtgagtgctgggtgggttgaggaatgggaaaatgggggagcaaggtgttttgtgtagatggaacaaaaggcaaaggatatattttaaggaaggccagataaagcttggagtagcatgagaacttgaggaatagtatgatatggggtgtgcagcaggcannnnnnnnnnnnnnngctgaaacatgggtgttaggagcagaccatgaggtggcagacccatcatctatagtaaatcaggtactatgctataactattgataaggaaacagctgactgacactggaagaataagcagtttaaggggactagctccgatgggagacaaaggtcagaaatcgtagtatctgatgaagatattttgatgagcaggtgagaagaaagataaacatggccacatggccaaggcctgggataaatannnnnnnnnnnnnnnnnnnnnnnnnnnnnnnnnnnntaagatcggggagagcagcaggaagatacagtattatgtaaataatagcatgttgtattagagattaattaggatatg

SEQ ID NO: 6431 - DNA, 767 bp, Macaca Fascicularis
  misc_feature (1)...(767): n = A,T,C or G
ggagatgaatgccctgcgaggccaggtgggcncgtgagatcaatgtggagatggacgctgccccaggtgtggacctgannnnnnnnnntgaacgnnnnnnnnnnnnnnnnnnnngaagatggcagagaagaaccgcaaggatgccgaggattggttcttcagcaagacagaggagctgaaccgcgaggtggccaccaacagcgagctagtgcagagcggcaagagcgagatctcggagctccggcgcaccatgcaggccttggagatcgagctgcagtcccagctcagcatgaaannnnnnnnnnaggnnnnnnnnnnnnnnnnannnnnnnnnnnnnnnnnnnnnnnnnnnnngatccagggactnnnnnnnngcgtggaggagcagctggcccagcttcgctgcgagatggagcagcagaaccaggagtacaagatcctgctggacgtgaagacgcggctggannnnnnnnnnnnnnnntaccgccgcctgctggagggcgaggacgcccacctgannnnnnnnnnnnnnnnaccggtgaccacccgtcaggtnnnnnnnnnnnnnnnnnnnnntnnnnnnnnnnnnnnnnnnnnnnnnnnctcccgcgagcaggtccaccagaccacccgctgaggactcagctccccctggccagccccccaggaggcagggaggcagccgccccatctgccccgaagtctccggcctctccagcctcagccccctgcttcagtcccttccccatgcttctctgcctgagaca

SEQ ID NO: 6432 - DNA, 737 bp, Macaca Fascicularis
  misc_feature (1)...(737): n = A,T,C or G
agctaacactgctggctagttggaaaaaataggacaacaatagaatcattccgcgcaccnnnnnnnnnnnnnnnnnnnnnnnnnnnnnnnnnnnnnnnnnnnnnnnnnnnnnnnnnnnnnnnnnnnnnnnnnnnnnnnnnnnnnnnnnnnnnnnnnnnnnnnnnnnnnnnnnnnngtnnnnnnnnnnnnnnnnnnactcgccttgtggggatggatccagaacaannnnnnnnnnnnnnnnnnnnnnnnnnnnnnngaagtagtggctnnnnnnnnncttttcctatcaaaccacttagtgaatcaaaaaaccgtttgttggacagtgaatctcagtgnnnnnnnnnnnnnnnnnnnnnnnnnnnnnnnnnnnnnnnnnnnnnnnnnnnttatagactgatattttcaattttcatttggaagaaaatnnnnnnnnnnnnnnaacaattgaagtataacagaagatatattttttaaaaaagaagctttgtacagtcctgggatccacagacgcnnnnnnnnnnnnnnnnnnnnnnnnnnnnnnnnnnnnnnnnnnnnnnnnnnnnnnnnnnnnnnnntacaaaagtgacttaacgttattctggaaataatactcacctgttatgnnnnnnnnnnnnnnnnnnnntcatcacattttaacatgcatatgnnnnnnnnnnnnnnnnnnnnnnnnnnnnnnnnnnnnnnnnnnnatacattctcactctaaaaacaca

SEQ ID NO: 6433 - DNA, 666 bp, Macaca Fascicularis
tgaccacatggatgatgtggatgatgaagatgatgatgaccatgtggacagccaggactccatcgactcgaatgactctgatgaagtagatgacactgatgattctcaccagtctgatgagtctcaccattctgatgaatccgatgaactggttactgattttcccacagacctgccagcaactgaagttttcactccagttgtccccacagtagacatatatgatggccgaggtgatagtgtggcttatggactgaggtcaaaatctaagaagttccgcagacctgacatccaggtaaatcctttaacagacacacctgatagttctgactagagctcaagtctaggaaaccacagtttgcatattcattcattcattcattcattcatccattcatccattcattcatccattcagcaagaattcattcatattctactttatgatcattgaatacaaatctttttctgctcggtggtttttgtaagtacataatttctctctagatttgattctcaaacacaattctactttttgaaatcctggatcacttatttttagattaaaatgaatggaaaacaccaattatttaaaaatatataatggtcatgtttcgaagttaaatacctaagaggagttgtagttgcaaattacactgaatcctt

SEQ ID NO: 6434 - DNA, 1037 bp, Macaca Fascicularis
  misc_feature (1)...(1037): n = A,T,C or G
tccctccctccccactcccctgccctggagcctggacccctctggccccatctcagatgactgtgaaaggggtgtggcagggcaggggggtctcatgaaggcacccccactcccaccctgtgcctttcttatgggcagagagggagagaggggctccccaggcctacacccctccctcctgcatctcccctggagtgttcacttgcaagccaccaaaatgtgatggcctgtggttcttctgctgagctccttaaatgtttagaccctgaaaggagtctacagctggacaccccctccccagacacaactgccctccccacgcacacatctggaaggagctggcccctcagtcccttcctactccccaacatggggctcaccgtccccaaagaaggagctgttggggacccacgatgcagcccctgtcccggattacagcgagttctcatttctggctccgaggctgcctgtggggcgagtggagacctcccgccgctgagacagaccgcagaccactagtgcctttcccagacacctggacgttgcctcccagagcaggccccagctctttccctctctacacagaaatatttttgtaaggttctggggcagggagggagcgtgaagtacgaggaaaacttgaattccagatttttaatgcaaagtatttatcatttctaccagaaataaacattttaagtttttatttgacaagacccagagtttggagaaaacttttggccaatgctgccacctggtgtcagaagtgtccccataccgtggcagtggcctgtcttaacaacaacttctaaagcannnnnnnnnnnnnnnnnnnnnnnnggaaggaaggaggagaaggaagatattactagagaaggatgagataaaacttctgcacccaagacaaggagnnnnnnnnnnnnnnnnncatagtaagccagtcagaaatagccagcgcaaaggtaagagatgggatggagattggaaccccgcttcagatccggnnncannnnnnnnnnnnnnnnnnnnccatgggt

SEQ ID NO: 6435 - DNA, 2023 bp, Macaca Fascicularis
aatttaaaaggatgcagagagaagagttgcttttgcaatgagcagttcctgcttcacaggttctcttccctgctgagttgtgaagaaggcacctgcttcctcttacaccgtgattgttaagtttcctgaggcctccccagccttgcagaactatcaggactcagagactacctagacgcccgccgacaacagaccagaggggtccaacagaccagaggggtccggctaaatggttttcacctgagaaggcaacgggctactccactgtaagaaaaccatctgtatgaaagaatcttgaggcctaattttctactctgggacctgtcgtctgtgtcagtaactcctgtctgcatcccggatgtgctgtgtggttcccaggtgctccatctacattgtggactgcactagaattaaatggactcacttcaatggaaaaagtcaaatggcagatttgaagagtcggagttgggatttaaagagactgaaaagcaagccccctcctgctgtatatgatctagccgttaccacctcccacccgtggcagcagctggggcaatgggccaagagcagaatctggtgacaaagtagccttgggtggcttggttggccacacacgccactgaaagcacctctcccaggcatccagtcgcctccagtgcctgctgaagcaagaaagcgcgccaaaggccgactccagctgtgtctgcatcataattaaggctgcaaaaccccagaatgaatgaagtctccccagctaatgcgccacttctaatttaatctaattggcctctgaaagagagccctggcctgcctcagaggcaaaaatcttccaaatgaagtgaatttaaactaatttaagctcactaattacaaactggggggttctgtcacaagaacaattgttactgttctttgattacttgctcaactggattatttgctcattacctttagagctgctgggactttcatggggtgccccttgccgcacatcaataaggcagcctggagtggagggtccccaccccagatgggcatggagctctgaggattagcttggctttctgagtgtttggagaatcttaaagcgaacgcacagcatgtgctgctcactcaacctgcagctaactacacctctttttggagacataagtttttctttcgctttgggatgtaggttttgagttttgacgtcgtctgttgaaccaacctctttatcgttcaatggttctgaccttgagatgcagcccggtatacctgggtagagatctggagcaaaagtggggagaaaaaaaagacctgtagccaagcctgtttctcagcagctgcgtgaggtggctggctgccgcacctctctgagccacaggcagagatctggtggaaaaagcatgaaatctgcagacccatctactgctgcttcatgtttgagcttcagttccctcctcccgggcatgttaaatttagcctacagctgcctccttactcattttaagagtaacaaatgttatgttacatttgggacctgtgtggctgaaggtttccctgcacaaagggaattgtcccctaacgggatgtggaaggggctgtaacctactcttgtggcaagtagccgcacttcaacccctcacaggcggccgacgcttcagactgtgtccgagtgcggccaacgcagaactgtaaccagtctggctgtttctctgcctcactttccgttctctgcccgtaaagcgtctctcgccgcacagcagcaccagacacgctctgaacctgttctgtcaggggctgcccgattcccaaatcattctttgctcagttaaactctgttaactgtagtttgcctcagttttcctttataacaggcagaaacgaccacctcgcagaactgctgtgaagaccgaacgtgatcactctgtgacaacatttcataaactgtgtgtcgcttgcgaatgctgttatttttctcatctgtaaaataaaggaattcagccagggaaaaaaaaaaaaaaaaaaaaaaaaaaaaaaa

SEQ ID NO: 6436 - DNA, 757 bp, Macaca Fascicularis
  misc_feature (1)...(757): n = A,T,C or G
gcaagtcgctcctgccttcacggggctacagaaacctgaaaagcacatttgaaaaagagttgcataaanagttcatgggaaagaaacaagaaacaaacaaaaaactgggactagggccgatnnnnnnnnnaagcccaccaccatggcattatcagcaccacgcgcccaccaactgagccaaccgaccacccgaccacctagtgttgccccagcgtctannnnnnnnnnnnnnnnnnnnnnncccgcgactgactccttacagaccccacgccactggctgcctcccgtgtggccccagctgcgacttttgacctcctcactgtcatccccattgggtgnnnnnnnnnnnnnnnnnnnnnnnnncttcaaggagaagggaggcggcttcctacagggaaccgcacgctttcacagggaaaatgcaaattgcacatgggaggtttggctctgcagtgaggttttcaaacattccaattcaatgctgtttttaactctgaaaatcctgcgnnnnnnnnnnnnnnngtatcatgagtcttttagcatggttaaatcaagctcagaaaacacggaaaaccaaaggccaaaagaaccaccgaattccctatcgccaaaaaataacggctgcagggggtcttgacctccttcttgtcgattgttttttctttcactgtccatgtgtatttcaatatatatacatggaatcctnnnnnnnnnnnnnnntggctcatgcctgtaatcccagcactccggaataaat

SEQ ID NO: 6437 - DNA, 642 bp, Macaca Fascicularis
  misc_feature (1)...(642): n = A,T,C or G
agcccgaggtgctgacgtcgcaaaaaaattggatagtaagtgtcgannnnnnaaaaaccagccttgcaacaagaagtcaacgtttcccgttgtgaaaccaaaaataatgagaggaagaaatgagaccatagaacaaatagagaactggagaaggaccaatctggtcacttaatctccattaaaaagggcctgtgggtctaaacagtcttgttctctctcccctaccacctatctcttccctgccctgctgcaggcaaagagagggtggagggagggccagcaagtgaggattttgatggttaacccttggtaatccagccaatttccagactgccaaagccatacgtgtttatataaggaggaatggttaccttcctctggttagcagcagtcttcgaaagggttaatgagctcacatacaagagatggtggatcttgtggcccagaagtaccacttctttgtgtgtgagacaagcagggtgcctttcaatttgccagattaataagcaatctgtacataaagattgcagggtaaggagatgggcagagagaaataatagctcgctataactttttaaatgactgttaaatcctctcaattttaatgtaatttgtttggggtatatttgtgtggtaaaatag

SEQ ID NO: 6438 - DNA, 659 bp, Macaca Fascicularis
  misc_feature (1)...(659): n = A,T,C or G
taaaaggaaaagcatttctggactttgctggcctcgggctccatgaaggaaggcagggctgctggcatcatcgggaggccaaggggatcctgccagccttgggaagaaagggagagcacgcagttaaatgagaatttcagatacacaaatcattttggggatacatgtgtcccagcaatgtttgggacacattgaactctaaaacttcatccgttgtctatctggaatttcaaatttccatttcctgtattttatctggccaccctaccttaaacggattttaatgcccaatgagtctccaaacaggctgcccccaactccctgagctgcctttacggaaggaggaacaactcttcaggatgcgggtctgttatgggcgatttcatttgcccggtttagttttatttgaatcagttcacaagtacctgtgattagaaaaggcttaagatgggaggccaaagtgggcaggtcgcttgaacccaggagttccagaccagctgagcaacatggcaaaaccccatccctacaaannnnnnnnnnnnnnnnnnnnnnnnnnnnnnnnnnnnnnnnnnnnnnnnnnnnnnnnnnnnnnnnnnnnnnnnnnnnnnnnnnnnnnnnnnnnnnnnnnnnnnnnnnnnnnnnnnnnnnnnnnnnnnntc

SEQ ID NO: 6439 - DNA, 728 bp, Macaca Fascicularis
  misc_feature (1)...(728): n = A,T,C or G
tnnngcnnnnnnnnnnnnnnnnnnnnnnnnnnnnnnnnnnnnnnnnngccaaacgcaccaccaaggtnnnnnnnnngctgctgcacgtcnnngcgctcgtcatcgccctggttggcttggtcgcagtgttcgactaccacaggaagaagggctacgcgnnnnnnnnnnnnnnnnncagctggtgcgggatccttgtctttgtcctgtactttgtgcagtggctggtgggcttcagcttcttcctgttccccggagcnnnnnnnnnnnnnnnnnnnnnnnnnnnnnnnnnnnnnnnnnnnnnnnnnnnnnnnnnnnnnnnnnnnnnnnnnnnnnnnnnnnnnnnnnnnnnnnnnnnnnnnnnnnnnnnnnnnnnnngttctcagcccggaagtcaaacaccaaccctttccagcgaagctcctgaagttatccacgcgtgtaggaggcaaacgcacatgtccannnnnnnnnnngaccctggtctgagccccacaccctcctgctacatgcactaccctttggctttctaagggacaggtgagaaggtgtcctgtaaagtccaggaagatgacatcnnnnnnnnnnnnnnnnnnnactacggagactagagggagagggnnnnnnnnnnagacttgggttcaannnnnnnnnnnnnnnnnnnnnnctcgagtgtatgatgtattctcatccatacctactcnnnnnnnnnnnnnnnnnnntgtgataca

SEQ ID NO: 6440 - DNA, 2575 bp, Macaca Fascicularis
agcctttgaaaaagttttcttcaaccgtctcatctcacagatagggaaactgaggcccagaaaagttaaaagacttgctcagaaagtcccatactggttagttaacagagctagtgctgaagtgaaatctgtcttaccctggtatattttcattacaccattattctctattttaagacttattacatttgaaaatcaacatgaaactaaatattacaataaaccactaaccgtttccaaatatctagatgtttggcatttagtcattaaaattgacattttcctgcttttcagttgtagtataactatttgatattttatatgttgctttagcagtcatttggctaacaatagaagagaatatggcctgtaagcatgttttacaagtgaaataaagtgccctgaaaaattgaattagaaatttagaacatttcttgttctaaaggttttcatcactgtttctccttggactgactagaccggccatttgaataagcatagaaagaatgatgaagatttaaaaattaccattttgcaatcaccatagtaaaaaagtgactcaaataagaatgatcaatggatgttaactctgaggaggagggcagtttgggaacaaggtatttacgtagcatcaaaatgtcatccataaattacaaaagaaaaaaaggaaattttcaatggctaaattggataacaccttaactaagtcatcaaaatcaacatcaccaataatggacagatggagcatgtgcctctggatatgatgctctgaaaaagagacagcatcactcaggtaataattgtgccaaaaatgcacaacctgactctaattatgagaaaacagacaaacccaaaatataggttactctataaaataaacagattgtgtttttccaaaatatcaatgtcatgaaaaacaagaaaaagctgagaagccgttgcaaattaaaaggagaccaaagagatatgacaactaaatgcaatatataatcctagactggatcttgggctaggaaggaaattgctgtaaggacacccttggcacacgctattgaccagaactcgaatatggacttttgatcactattatatttgtttttacatttttgaactggatgactatactgtggctatgttaaaaaaaaatccttgttcataggatatatgcatactctatgaagtgataaaaagcatggtgtgtatatttaataaccttatgtgtatgtatgtgtgtgtatatatatacagagagagagagggagggagaaggaatgaaagagaatgataaagcaattcagcaaaatattaaaaactgctaaatctggggaaaaggcacatgggagtccattgtactatttttgtaatttttctgtaagcttgagagactattttaaaacaaatgatgttagaaaaaaagtacactggggcactggcagacttctagatctagcctaggggtgaagggtccagggaacaggcaggggcagagcccaagtcaagccctgaacaggtcagtgtggactccactgctgccttcacagtacaaagaacagcagagcttggtgcactggttccgccactaccccgctgctgctgctgcccacagaaaccccacgttagagcttcagtggctgcccttactgccaagatggactccctaccatggctgcttgtctgtgtccaaaatccctgtttcaaaatggagggcagatatggctgattggtggagctgagccacactttcatacctgggctccaagatagtctgtaaaagtgcatattggcttctcactaagactaagagtgtgagcagcttcccaaatgtagaaagagagtttagatttggggaagtttttttaagtgaatgtccatcgtaacatgttgagacattgcttgaatgtaaaatagacaccttggtctctatcgtgaattgactagagtccagcctggcttgagagataagaattgaaaggaaataattctctttaagcctgtgtttatttagtactacctgccattagagacaggactctaagagaatatggtagaactagcttatattggcttattaaatcatgtagcagagaagagtagaatggttcctctatcgttgatcagtgtccatctgctgctcattcctcttctttttgagatattagaaagagccatgtaaagagttcagcaattaattagagaattaaaatacataacatgtaccttagtgataagaacatctttttccttcatgtgcaggaatttaatgtaaaatattgggcacattcatgtttcatattcatccaaaggatgatgataagatgccctgtgcatttgagtcattaatattgatatatagtctcttatgtaaccctttatgaagacttatgtaagacaaaaagaaagtgttcttaagcttggggaaagattaaattaaaatggaatcttggaggtataaaggtctttagagttcacatagcacaacttggtcatttcacatgtgaggaacctgagggctaggtcttgatggctcagatttcttcaattaattgcctagtccccaaaaaaaaaaaaaaaaaaa

SEQ ID NO: 6441 - DNA, 720 bp, Macaca Fascicularis
  misc_feature (1)...(720): n = A,T,C or G
taatttttgtgtctttataggactccagttggtggaagaattcagttggctattgccattgtaatcacacttttcccatttatttcatgggtctacatatatattaacaaggaaatgcggtcctcctggccaactcattgcaagacagtaatttaaataaattcaagaactttgtttttaaaatgaatattttcaatcaattttttataacattagaggaacaagccagggagtttattttaggtaatttgggctaatagagtttttttaaactacaaataactttttaagggtgcatataatttgatataagattggatgggacaagtcagagacagtctgatattttcggaagactttctgcagggtcttgtgtcataatgtggtggaaaaggctagagaatagaagtttaaaaatacgagttctaactcaactttgtaactatgtaatttgggcaaatatataaacctcttagtggatatttctttataacataggattaatgccacatctacttacttatacagtagcaaggatcaatctagataatgtaagaacactctgaagatataaagtattcggaaagattacggagggctgtccatgattaaaataggggggagcagggattgggtaatatactgaaatagaggttcaagagagggctatacctcgatctttctttctttcttttttttnnnnngtctcactgtgttgcc

SEQ ID NO: 6442 - DNA, 746 bp, Macaca Fascicularis
  misc_feature (1)...(746): n = A,T,C or G
gaaaactatgaaaattatttcgtcaaagcacagaaagtgagacgcctcattgctaatgactttgtaaatgcttttaactctggagtagatgtcttgctaactcccactaccttgagtgaggcagtaccatacttggagttcatcaaagaggacaacagaacccgaagtgcccaggatgatatttttacacannnnnnnnnnnnnnnnnnnnnnnnnnnnnnnngtatccctgttgcactctcaaaccaagggttgccaataggactgcagtttattggacgtgcgttttgtgaccagcagcttcttacagtagccaaatggtttgaaaaacaagtacagtttccttttattcaacttcaagaactcatnnnnnnnnnnnnnnnnnnnnttgaaaatgaaaagtcagcctctgtctctctaaaacagtaaacatatcttacaaattaaaatgactcttaggccnnnnnnnnnnnnnnnnnnnnnnnnnnnnnnnnnnnnnnnnnnnnnnnnnnnnnnnnnnnnnnnnnnnnnnnnnnnnnnnnnnnnnnnnnnnnnnnnnnnnnnnnnnnnnnnnnnnnnnnnnnnnnnnnnnnnnnnnnnnnnnnnnnnnnnnnnnnnnnnnnnnnnnnnnnnnnnnnnnnnnnnnnnnnnnnnnnnnnnnnnnnnnnnnnnnnnnnnnnnnnnnnnnnnnnnnnnnnnnnnnnnnnnnnnnnnnnnnnngtgtctcaaaataaataaaataaaat

SEQ ID NO: 6443 - DNA, 1689 bp, Macaca Fascicularis
ttatattgataaaggacaatatcttcatattcctcgagcacaggtctctgattcagcaacatatatgtgtcatgtagtgaatgttgctggaactgctgaaaaatcattccatgtggatgtctatgttcctccaatgattgaaggtgacttggccatgcctttgaataagcaagtagttattgctcattctctgacactggaatgcaaagctgctggaaacccttctcccattctcacctggttgaaagatggtgtacctgtgaaagctaatgacaatatccacatagaagctggtgggaagaaactcgaaatcatgagtgcccaagaaattgatcagggacagtacatatgcgtggctaccagtgtggcaggagaaaaggaaatcaaatatgaagttgatgtcttggtgccaccagctatagaaggaggagatgaaacatcttacttcattgtgatggttaataacttactggagctagattgtcatgtgacaggctctcccccaccaactatcatgtggctgaaggatggtcagttaattgatgaaagggatggatttaagatattgttaaatggacgcaaactggttattgctcaggctcaagtgtcagacacaggcctttatcggtgcatggcaacaaatactgctggagaccacaagaaggaatttgaagtgactgttcatgttcctccaacaatcaagtcctcaggcctttctgagagagttgtggtaaaatacaagcctgtcaccttgcagtgcatagctaatgggattccaaatccttccattacatggttaaaagatgaccaacctgtgaacactgcccaaggaaaccttaaagtaagtatacagtcttctggtcgagttctacaaattgccaaaaccctgttggaagatgctggcagatacacatgtgtggctaccaatgcagctggagaaacacaacagcacattcaactgcatgttcatgaaccacctagtctggaagatgcagggaagatgctgaatgagactgtggtggtgagcaaccctgtacagctggagtgtaaggcagctggaaatcctgtgcctgttattacatggtacaaagataatcgtctactctcaggttccaccagcatgacttttttgaacagaggacagatcattgatatcgaaagtgcccagatctcagatgctggcatatataaatgcgtggccatcaactcagctggagctacagagttattttacagtctgcaagttcatgtggccccatcaatttctggcagcaataacatggtagcagtggtggttaataacccggtgaggttagaatgtgaagccagaggtattcctgccccaagtctgacctggttgaaagatgggagtcctgtttctagtttttctaatggaatacaggttctctctggtggtcgaatcctagcattgaccagtgcacaaatcagtgacacaggaaggtacacctgcgtggcagtgaatgctgctggagaaaaacaaagggacattgacctccgagtatatgttccaccaaatattatgggagaagaacagaatgtctctgtcctcattagccaagctgtggagttactatgtcaaagcgatgccattcccccacccctcaaaccctcaaaatactctacaaccaaaaaaaaaaaaaaaaaaaaaaaaaaaaaaaaaaaaaaaaa

SEQ ID NO: 6444 - DNA, 839 bp, Macaca Fascicularis
  misc_feature (1)...(839): n = A,T,C or G
agatatactgacatcatccatatgaaatatgcaggtcattagcttactataatttgactatttacttttgacttaatggggcataaataaaactttcatagtacacatgaggtggatatttgatacacagaacatttgtggtgggctttctgtgggttagatgtaaagcccacatattttaatattcactattttaaatgagcaatgcatgaggggaatgcagtgtcagtacctggcctatttttaaactagtgtaatcaccctagtcataccattcagtatgtttgctttttaaaataagtaaccacaattaagttgttttagcccttgcacttcaagagatctagtctttactttcagttgtctgttaggtccattctgtttactagacggatgttaataaaaactatgtgagcctgaacgaattctcggccaaatttagtcttgtctctcatcttgattggattaattccaaattctaaaatgagtcagtccacaatagctctaggggatgaagaatttgccttactttattgttcactcagttcctaagactgtgagttgtcaaatccctagactgtaagctcttcaaggagcaagaagcgcattttctccgtgtcatgtaatttttctaaggtgcttggcagcactctgtaccctgtggagtactcagtaccttttgtttgatgttgctgacaagacctaaaaaataatcccttaaaaaaacgattaaaatgtagcaaaacnnnatgtattattttttctcttttctcatannnnnnnnnnnnnnnnnnnnnaannntgataatttatatgaagcatcgnnnnncttcacataa

SEQ ID NO: 6445 - DNA, 1852 bp, Macaca Fascicularis
agctgagcggcggagggcgctggcgacaggtgtgggtgtgccctgaggatgcgtggcgacttcccggagcagcgggtctgtgaggcaacgatggaagacactgcattccacagcatagcagcaggccctgccctggatggctccaagtaaaagacagttccccagaagccgtcggccgccggcgattcgcctcctccggcgccagaccccgcctttcccccagactaccggtgccatccagatgccccaggcgggaccccagctcacgaagcccactggccgaagctccccacaggctagagagccgctccttcgaggccaaacgtccgagaggcggcctgcgcctagcacgcaggcgtggaaagctaggcgccagcctcgatctgaccgccgccacctgcctcgggccgcgccgtccgccgtttactttcgaacgagcccagcaatagttcccattggccgatgccgcgcagttgaaagctgcctgcagactgcgcctgcgccgcgaggctccgggcggccccgcccggcctgggcacctgaagcccttcggggcggaggagggcggggactcggggcgactctcagcatcagccaggagtcggtggctctctgtttcggcgctgtggagtcgcctactccgcctcctccccgcgaataagaataaaagattctggaggagttggagagagtgtattcagtccccaaaccaggagatcaacaaagtaggaaatgcacaattttgaggaagagttaacttgtcccatatgttacagtatttttgaagatcctcgtgtactgccatgctctcatacattttgtagaaattgtttggaaaacattcttcaggcatctggtaacttttacatatggagacctttacgaattccactcaagtgccctaattgcagaagtattattgaaattgctccaactggtattgaatctttacctgttaattttgcattaagggctattattgaaaaataccagcaagaagaccatccagatattgtcacctgccctgaacattacaggcaaccattaaatgtttactgtctactagacaaaaaattagtttgtggtcattgccttaccataggtcaacatcatggtcatcctatagatgaccttcaaagtgcctatttcaaagaaaaggacactcctcaaaaactgcttgaacagttgactgacacacactggacagatcttacccatcttattgaaaagctggaagaacaaaaatctcattctgagaagatggtccaaggcgataaggaagtcgttctccagtattttaaggagcttaatgatacattagaacagaaaaaaaaaagtttcctaacagctctctgtgatgttggcaatctaattaatcaagaatatactccacaaattgaaagaatgaaggaaataagagagcagcagcttgaattaatgacactgacaacatctttacaagaagagtctgcacttaaatttcttgaaaaagttgatgatgtacgccagcgtgtagagatcttgaaacaaagaccacttcctgaggttcaacctgtcgagatttatcctcgagtaagccaaatattgaaagaagaatggagcagaacagaaattggacaaattaagaacgttctcattcccaaaatgaaaatttctccaaaaaggatgccatgttcctggtctgataaggatgaaaaggaaattgaattttttaaaattttaaacattgttgtagttacattaatttcagtgatactgatgtcaatactctttttcaaccaacacataataacctttttaaatgaaatcactttaatatggttaaaaaaaaaaaaaaaaaaaaaaaaaaaaa

SEQ ID NO: 6446 - DNA, 766 bp, Macaca Fascicularis
  misc_feature (1)...(766): n = A,T,C or G
agaggaggttagtgtgtgagtctgggtggactagtnnnnnannatctgccctcaatagtggtgagcaccatttaatcatctgggggcccagaaaaaacaaatacagaaggtgaattggtctctctctgagaggtgtgacaggtnnnnnntctgctgccttggacatcagaactccaggttcaccagccttcggactccaggacttaacaccaggttttacccaggtcccaaagcttttggtctcagtcagagagtaacacagctggctgccctgattctcaatgtaaaaacatggaaaattcctcaataaatgatgatacgtcctttttgtacatctgcattgttaaaaataagatctcttgagaatttccatgtaacacacacatcctcccatgtactttaaataatctctgattacctataatatctaatataatataaatgctatataaatagttgttattccatattgtttaggaaataatgacaagaaaagatatgtggaacctatggatatggagggctaagtatctatatatagtcatttttgggaaatgtaatctgacataaacactcagcacccaccatctagcgggtctttgatgattgcttgttgctcatttgttgttttactgannnnnnnnnnnnnnnnnnatgaaagtggtagtaaaagtagtaatgataacaataactacaacaaccattcattaagctcttattaccctgtgaaggacttgttttaaaatttcccttttgattgaagtat

SEQ ID NO: 6447 - DNA, 166 bp, Macaca Fascicularis
gaggaaaatcaattccaactagactttcctgtgatggaagatgtttcctcttgaaaaaatgccaatacagatttttaaaacctattattttccaaatgcactttgtaagtttttgcgtttaaaatagcttcttggaaccaattttattgtatttgtacttaatttt

SEQ ID NO: 6448 - DNA, 726 bp, Macaca Fascicularis
  misc_feature (1)...(726): n = A,T,C or G
taggtttcaccaggtgccnnngcaccaacgagactactnnnnnnnnnnnnnnnnnnnnnnnnnnnnnnngcctcagtaagcagggttttgccaaccctagaagcttgttatatnnnnnnnnttatggagccagaatccccnnnnnnnnnnnnnnncctttccaagtcaccccattacttccctctctgaggtcctgctgcttctnnnnnnnnnnnnnnnnnaatggaggtgggtacttgttactctttgacctccagtctcnnnnnnnnnnnnnnnnnnnncactctctcctcttcgttgacttcaaaaacttttctctctcctctcnnnnnnnnnnngacnnnnnnnnnnnnnnnnnnnnnnnnnnnnnaatttcataaaagtctagaaatgcacttggcttcaaacatcctctgnnnnnnnnnnnnnnnnnnnnnnnnnnnnnnnnnnnnnnnnnnnnnnnnnnnnnnnnnnnnnnnnngagggaaggagagggccaggcgcgnnnnnnnnnnnnnnnnnnnnnnnnnnnnnnnnnnnnnnnnnnnnnnnnnnnnnnnnnnnnnnnnnnnnnnnnnnnnnnnnnnnnnnnnnnnnnnnnnnnnnnnnnnnnnnnnnnnnnnnnnnnnnnnnnnnnnnnnnnnnnnnnnnnnnnnnnncagctactcaggaaggcnnnnnnnnnnnnnnnnnnnnnnnnnnnnaggtggaggttgcggtgagtcg

SEQ ID NO: 6449 - DNA, 874 bp, Macaca Fascicularis
  misc_feature (1)...(874): n = A,T,C or G
agtgccagaaaagacagctttagtgcagacctagatcacagctagttttcttgtccctgtgggggtcttacagatgtgtctctgagtagtaanggcttagccctgttccgttttgttgtttttttggaggggaaggttagtcaggcctgagtattcatgtaacattctaaaattgtgcaagcgagcnnnntgannnnnnnnnnnnnnnnnnnnnnnnnnnnnnnnnnnnnnnnggtaaagggttggttggacacagcgcttagtgcacgnnnnnnnnnnnnnnnnnntaatcagttgtgaaannnnnnnnnnnnnnnnnnnnnnnnnnnnnnnnnnnnnnnnnnnaattgnnnnnnnnnntgtttactacggggcctggctcacaggaagtgttcagtaaaagtatgaactattannnnnnnnnnnnnnnnnnnnnnnnnnnnnnnnnnnnaaatagttnnnnnnnnnnnnnnnnggaaggaaatgtgcatttattagctattactcaactttacaatgcaaacatcatatttctcatctnnnnnnnnnnnnnnnnnnttaattgaaaagtattctgagactgcaaaatgggatgttaaaaaaatactgcaattacggagctgtgtaaaccagtttctcattgcataagatacagatgtaaattgcatggagaggttgatatgcacctgtacagtaattcacttccccatttcagatctttgtcagagaatagttcttgttcatactgagtgttctaaattgaagttatatatacaaattaaaatattttaaaaattctgttgtcttctcatttttctggcatgtataaacatttttagccnnnagtaaactctgtccttttttcttatgaaga

SEQ ID NO: 6450 - DNA, 261 bp, Macaca Fascicularis
atgattccagcagtggtcttgctcttactccttttggttgaacaagcagcggccctgggagagcctcagctctgctatatcctggatgccatcctgtttctgtatggaattgtcctcaccctcctctactgtcgactgaagatccaagtgcgaaaggcagctatagccagctatgagaaatcagatggtgtttacacgggcctgagcaccaggaaccaggaaacttatgagactctgaagcatgagaaaccaccacagtag

SEQ ID NO: 6451 - DNA, 765 bp, Macaca Fascicularis
  misc_feature (1)...(765): n = A,T,C or G
actcgctgttatgannnctcnnntaaagtcttgagtacatgctaatcaataatccccactcatgcattcctactgcttggagtagctgtactggtaaatactattgtaggagtatctgcttgttaaaatggaaaaatgtgtctttagagctcagtattctttattttacaaacacaacaaaatgtagtaacttttttccagcatacattaggcacattcagggtggtccaagatggctcttttttctatgaaaggggcctgttctcagtaaagatgagcaaacatttggaatttacatgtgggcagacattggtataacaactttcatcaccaatcactggacttttgtgaagttgagaccagctaaagctgcttaaaataagttctgatcattatataagaagggaaatgcctggcagacaccatgtaagttataagtgtctgtcttatctttactacacatattgtaacaaattcaatatcctagtcttcatttgtatgaatggtttgtattgtacatagtttaaccaagtgttatttgagctgcttattaatattaacttgtacttgtctctctgcttgttattggttaagaaaaaaggatatgaggaattcattttatcgatgtagctgtgaactccattaaaaagacaaacaatgtacagagcatttattcagatcaagtattgttgaaagctattacatatacaannttacagtctgtctgtatttagatattttatttctggacaaaatgaaatgtac

SEQ ID NO: 6452 - DNA, 498 bp, Macaca Fascicularis
  misc_feature (1)...(498): n = A,T,C or G
ccannnnnnnnnnnnnnnacatnnnnnnnnnnnnnnnnnnnnnnnnnnnntcatggaaatggcctcccctcaggtcaagtcacccaggcatccaaagagtggtgtgggccaaggattgtggctgggtctgaggggccacatccatcttcattagtggactcgggccctggcctcaggccagttctgtctctctctgacctctggtaggtttggagtctttatnnnnnnnnnnnnnncaggcaggtctgtcccttatcactccaaccaggctaatacctggccccagcccccaaacaagggcagtttggttcagcctggaggaggtgtgcagctcatccagcannnnnnnnnnnnnnnnnnnnnnnnnnnnnnnnnnnnnnnnnnnnnnnnnnngacaaggcccctcagtcgaccaccggggcagcttccgggcttggcttccgtccctatgtccctgcagcggagccacaggagtcaggnnagggagaagcatcaggc

SEQ ID NO: 6453 - DNA, 731 bp, Macaca Fascicularis
  misc_feature (1)...(731): n = A,T,C or G
ggtgacagagatgggaaccagggaagctgtgatntactggccagcacaagtcagaatgggtgagggttgggcaaagggcccttccntnnncctcaaccctgtggtctggggccatggcctcaggcctgtgtctatcacaaaagcacaaatttgccctaacccacatgggcctggcagtggggaaggtggggacgcaggtccctgagctgtctctgctgctccatagggtggtgatgggcaggcaccttggcatctgtgcagagacaacccagtctagccaaaccctctttgtctcctctgctctaccttctcctgtaccaggcagccccttaaaggaggacannnnnnnnnnnnnnngtctgcctgtcttcccccatatcctcagctcggagccttccgcttccagggccaaccccagccccctttgctgcgttgtgtaagggcttggggtcataagagctgctctttagcccagatacacatactcttttttgtctttgtgcaataatccgtgttcctggcagagcctgggccaagctgcagcctactgaggaggtagaggccacctcctccaggaagccctcggcctgggccgccaccgtgactctagcactctnnnnnnnnnnnnnnnnnnnatggtgtgaatgaacttccctcctagttgctgatggcgctggtacctgctggcccagatggcccgggtgtagagaaaccaagcggcagccaccacc

SEQ ID NO: 6454 - DNA, 651 bp, Macaca Fascicularis
  misc_feature (1)...(651): n = A,T,C or G
acacccaggttttctgttaaggatngaatcattctttcatgaaagaacaattggcaagaaataatttaattaccttaaaaagtaagaattaagaggcactccagccagataacacctcccaacaacatgaaatttagttagtgcttagtgaaattccttaaatatatatgtatatgttttattcaacattatttaatatcataactactgcttttgtatttttnnnnnnnnnnnnnnnnactnnnnnnnnnnnnnnnnnnnnnnnnnnnnactgggcagctgaaaataaaagagaataaattctattccactgtnnnnnnnnnnnnnnnnntcagctttctttgtatatcagtaaagaacaagaattgtttgaaaataattttaagtctgataggtatggatagcatgttacataagcttttaatatgtacactttgatgtttgatcgtgtgcatggaagagacaatannnnnnnnnnnnnnnnnnntgttttgtggtgggataatacaaccctccccnnntttcccannnnnnnnnnnnnnntaancgttttnnntagaaaatagagatgttttgggtgggggtggtcgcacatgcgtgtagtccganctacttnggaaggtgaagcaggaggatcactagagcccagat

SEQ ID NO: 6455 - DNA, 2348 bp, Macaca Fascicularis
ttataacatgaccccagaccgacacttggggtaagtagtccgagatgtcttttgtcccatgggcccccctggcgctcaggaccctggcgggtatcggcgtgccagccctcgagcggccagcccagcagtgtctcccatgtcccgggtggcctggagagccccttccttctgggcccagatgcgcgaaggcacagggtccaggcggggtcctctgtccctcctgtctcttcccaaggtctgggcggggtcctctgtccctcttctctcttcccaagtgtgctgcccacagcattttaccagctggctctttccagccagagtggcccaggaaggcgggtgggctgtagtactggggcccagcttgtcagacctagccctgcagctgtggggaccgtgcactgtgactcacaccccacccccgtgtactagagctgcctggattgacaagtgccgccccaacctgctcatcacggagtccacgtacgccacgaccatccgcgactccaagcgctgccgggagcgagacttcctgaagaaagtccacgagaccgtggagcgtggtgggaaggtgctgatccccgtgttcgcgctgggccgcgcccaggagctctgcatcctcctggagaccttctgggagcgcatgaacctgaaggtgcccatctacttctccacggggctgaccgagaaggccaaccactactacaagctgttcatcccctggaccaaccagaagatccgcaagactttcgtgcagaggaacatgttcgagttcaagcacatcaaggcctttgaccgggctttcgctgacaacccagggccgatggttgtatttgctacgccagggatgttgcacgccgggcagtccctgcagatcttccggaaatgggccggaaatgaaaagaacatggtgagggcgcggtgcggtgtgggaacctggaagctggaggctggcgggttgtccttcctcccgtgccgtctgtctccgctcttgctggcctcgcgctggccgagggacgtggctgctgctgccaagggacgggggtgacatcgcctggagctgctcggtctccctgtgacgtagcccgtccacctcgggctgtacagccccagcccagccccggacagtcttgtggcaaaacctgagtcctttggcgtctgcagccaggcttggtcgggcactgctggcaggtggaaacagctcccaggggttcaggtggggacatcccagggaaggccctgaggtgccaaggctggggtcccgtggctgtgagctctgtgcctgcccccaggtcatcatgcccggctactgcgtgcagggcaccgtgggccacaagatcctcagcgggcagcggaagctggagatggaggggcggcaggtgctggaggtcaagatgcaggtggagtacatgtcattcagcgcacacgcggacgccaagggcatcatgcagctggtgggtcaggcagagccggagagcgtgctgctggtgcatggcgaggccaagaagatggagttcctgaagcagaagatcgagcaggagctccgggtcagctgccacatgccggccaacggcgagacggtgacgctgcccacgagccccagcatccccgtaggcatctcattgggactgctgaagcgggaaatggcgcaggggctgctccccgaggccaagaagcctcggctcctgcacggcaccctgatcatgaaggacagcaacttccggctggtatcctcagagcaagccctcaaagagctgggtctggccgagcaccagttgcgttcacctgccgcgtgcacctgcacgacacgcgcaaggagcaggagatggcgttgcgcgtctacagccacctcaagagcgtcctgaaggaccactgcgtgcagcacctcccggacggctccgtgactgtggagtccatcctcatccaggccgccgccccttctgaggacccgggcaccaaggtgctgctggtctcctggacctaccaggacgaggagctgggtagcttcctcacatctctgctgaagaagggcctcccccaggcccccagctgaggccggcatctcacccagccaccacctctgccctctcccagctggacagagccgggcctgcacttcaggactgtgggtgccctgagtgaacagaccctcaggtcccatccctggggacagagaccgtgtgtcatgtgcccacccaggcagctgtttccagctaaagaaaaactggcctccgggctgtcttgcctttattcctgctcctgggcccccaaacgatggttagggcagggagtcccggacagcagtttccagtaaaagctgaacgaaaggctacttggtaccttcaaaaaaa

SEQ ID NO: 6456 - DNA, 809 bp, Macaca Fascicularis
  misc_feature (1)...(809): n = A,T,C or G
gaccggcagnngntgatganaccnnnnnatnnnnnnnnnnnnnnnaacgtagnnnnnnnnnnnnnncngaagactgcctggggccagcagctgatttagcagctaacgaagcnnnnnnnnnnnnnnnnnntcagttgttgtgcnnnannnnnnnnnnnnnnnnnnnnnnngcnnnnnnnnnnnnnnnnnnnnnnnnnnnnnnnnnnaaaagtgctaaaatnnnnnnnnnnnagnnnnnnnnnnnnnnnnnnnnnnnnnnnnnnnnnnnnnnnnnnnnnnnnnnnnnnnnnnnnnnnnnnnnnnnnnnncacatgacctgggtgcagccccgagtgctggatttgcagcagatcaagggaatgaaggaccgcctggagttctggtgcacggatgtgaagagcatggagatgctggtggagcaccaggcccatgacatcctcacctagggccccccggtcccctgtcgtgtctcctttgaccacctgagagaggcgtttgnnnnnnnnnnnnnnnnnnnnnnngacggtcgacattgaatttgggtaggggttgggatcctgtctgaagtacagactgtnnnnnnnnnnnnnnnnnnnnnnnnnnnnnnnnnnnccaggccacagggagaagacttctttgtgggtctctcctgcagtgggtgggggtctctgggtcttaggtgataagggagagagagaacgcgtgaggcaggaagtcccctaaagtccgtgtcctccaaggtgatctccatccccatccacctgtacggacatcttttccattgtggttgagaatgtccnnnnnnnnta

SEQ ID NO: 6457 - DNA, 687 bp, Macaca Fascicularis
  misc_feature (1)...(687): n = A,T,C or G
cccnancnnagaaacatgtaagggttggtaccatgctaagccctttatannnnnnnnnnnnnnnncccatatcaaccttataaggatggtgtttgtagannnnnnnnnnnnnnnnnnnnnnnnnnnnnnncctttttctaaggcacagagctggtaaaatggggagtaatagtgaacctaacagtcacagacaggcagcatgctcttaactagtgctcttcctcaagttcctttaatgtccttttgagattttgagccatggaacttacttgttcacctggttaagaacacatggccactgtggaaatcttggctggggagtcaaagaaactgagcctggggcaaatgaggcttcccacactgccaggggagcctcactgtgaggtctaggctcagacaggcttcaacaaacctattcacaccaccatcatcctaacctaaccattccccagtcatcccaggaacaaccactcacagcctgacactgggcagatgtttttgaagatcctcaaccaattggtgtttttcagaagtgttccagtattatgaattctgtgttgtggagaaaagaaaccatgcatttactggtcaaggccttcttgtatacgtaattcaatacttttatttttaatatcctcaccttatctgatctttgaattttgtcatataatttattgcttcgttaag

SEQ ID NO: 6458 - DNA, 721 bp, Macaca Fascicularis
  misc_feature (1)...(721): n = A,T,C or G
tttttgnnnnnggnnnnnnnnnnnnnnnnnnnnnnnnnnnnnnnnnnnnnnnnnnnnnnnnnnnnnnnnnnnnnnnnnnnnnnnnnnnnnnnnnnnnnnnnnnnnnnnnnnnnnnnnnnnnnnnnnnnnnnnnnnnnnnnnnnnnnnnnnnnnnnnnnnnnnnnnnnnnnnnnnnnnnnnnnnnnnnnnnnnnnnnnnnnnnnnnnnnnnnnnnnnnnnnnnnnnnnnnnnnnnnnnnnnnnnnnnnnnnnnnnnnnnnnnnnncagctnnnnnnnnnnnnnnnnnnnnnnnnnnnnnngttaataccagtaagagcactttgaannnnnnnnnnnnnnnnnnnnnnnnnnnnnncgagacaagttttgttagcaacttcattttacagatgaaaaaacaggctcgggtggtaagtggcatgcccaaggtagtggcagagcctaggtgttccaatccaggcagctgggttcagccgcactccgatcctctccagatgcctctctgttacagcgcagannnnnnnnnnnnnnnnnnnnnnnnnnnnnnnnnnnnnnnnncttgagtacccgatgacctggtttcctcatcggtagatagcgaaggttaatattggctaccctgtagagttatcgggagaccaacgcacaaaaagggtttaataccgtgctcagcacatagtaagtggtcaatacatgttaattattgatattcttgttattt

SEQ ID NO: 6459 - DNA, 718 bp, Macaca Fascicularis
gactcaagtgctgattgccagtggttagatactctgaggatgcggcagattgcatccaacacttctttacagcgttcccagagcaatcctattctggggtcaccattcttctcataccttgatggccaggattcctatgctgctgctgtgagacggacccaggtgcccattaagtatcaacagattacacctgtgaaccagtccagaagctcctctcctactcagtatggactgaccaaaaacttctcttccctgcatctcagctctagggacagtggcttttccagtggcaatactgacacctcttcagagaggggtcgatactcagacagaagcaggaacaaatatggacgtggtagtatatcactcaattcttctcctagaggaagatacagtggaaaaagtcagcattccactccttcaagaggaagatatcctggaaagttctacagggtttctcagtcaccactcaatcctcaccagtcgcctgacttcaagagaagccctagggacctccatcaacccaacaccataccagggatgcctttgcaccctgagactgactcaagagccagtgaagaggagagcaaagtcagcgaagggggctggacaaaagtggaataccggaaaaagccccacaggccctcccccgccaaaaccaataaagagagagccagaggggaccaccgtggatggagaaacttttgatgaattgaac

SEQ ID NO: 6460 - DNA, 745 bp, Macaca Fascicularis
  misc_feature (1)...(745): n = A,T,C or G
aacttttatatagtatggtaacagtatgttaatacacacatacatatgcacacatgctttgagtccttccataatacttttatatttgtaaatcaatgttttggagcaatcccaagtttaagggaaatatttttgtaaatgtaatggttttgaaaatctgagcaatcctttcgcttatacatttttaaagcatttgtgctttaaaattgttatgctggtgtttgaaacatgatactcctgtagtgcagatgagaagctatcacagtgaatatgcggtttctcttatgtcatccaccttgacacgatgggtcagaaacaaatggaaatccagagcaagtcctccagggttgcaccaggtttacctaaagcttgttgcctttttttgtgctgtttatccgtgtagagcactcaagaaagttctgaanctgctttgtatttgctttgtactgttggtgccttcttggtattgcaccccaaaattctgcatagactatttagcataatggtaagttaaaaaatgttaaaggaagattttattaagaatctgaatgtttattcattatattgttacaatttaacattaacatttatttgtggtatttgtgatttggttaatctgtataaaaattgtaagtagaaaggtttatatttcatcttaattcttttgatgttgtaaacgtactttttaaaagatggattatttgaatgtttatggcacctgacttgtaaaaaaaaaaaactacaa

SEQ ID NO: 6461 - DNA, 212 bp, Macaca Fascicularis
  misc_feature (1)...(212): n = A,T,C or G
agagtggaggctccanncagacccgccagatccttgggcacctggcattcaagcactttgcacgatgtctcaaccaacatctgacatctttcccatggagcaacttcctgctccacgggaaagagttggatggatttacccctggacccataagtctgttcatcctgctgaagtcctctccccattgctccttcaagccaaaactacacttt

SEQ ID NO: 6462 - DNA, 2578 bp, Macaca Fascicularis
agatgctgatgatgcctccagggtgtggcaaggtgaaactgagccagtttccaagtcctcacctccccatactctttccaggccggggtgagatggtctgaagctcaacctctggtcaggtcctctaccctgtcttggatcacttagacccacaaactctgcctctgcaatctcagttcagggccttgaaacacctcttcagagactctctcctccccaagctctgtcttctggcaccctgcctggttgccgtggaaacaggttccactgcggacaaaggagggagctgggtcctgcttcctcctggtcttgtcgatgaggatttttagaccttggagactgcgctgccctgccctgcacctaccctcactctccgtgttcccactaaggtggaaattgccctccctcactactgacaagaccatgtgtaaaagcgtgaccacagacgagtggaagaaagtcttctatgagaagatggaggaggcaaagccggctgacagctgggacctcatcatagaccccaacctcaagcacaatgtgctgagccctggttggaagcagtacgtggagttgcatgcttcaggcaggttccactgctcctggtgctggcacacctggcagtcaccccacttggtcatcctgttccacatgttcctggaccgcgcccagcgggcgggctcggtgcgcatgcgcgtcttcaagcagctgtgctacgagtgcggctcggcgcggctggacgagtccagcatgctggaggagaacatcgagggcctggtggacaacctcatcaccagcctgcgcgagcagtgctacggcgagcgcggcggccagtaccgcatccacgtggccagccgccaggacaaccggcgtcaccgcggagagttctgcgaggcctgccaggagggcattgtgcactggaagcccagcgagaagctgctggaggaggaggcgaccacctacaccttctcccgggcgcccagccccaccaagcctcaggatgagacgggctcaggctggaacttctgctctatcccctggtgcttgttttgggccacggtcctgctgctgatcatctacctgcagttatccttccgtagctccgtctaagattccctgggtgggcccagagcctgtcgagggtgccagtcagctgatgggaaggtagaagagagacctgggttgggaacagtgtcaacttctagtgctggtgatgccactgactcagtggggatcttggacaaattatacagtttttttccatctataaaacttagggtttgggcaagatcattggtttatcatagtgaaacccaggaccccaaagttctgcgtaggtgcctcagggacttttggatttggaaagtaggctaagctagtgggtgtctccaactcctggtctaaccacccatcctccaactcctgcctcctcctcttgcttcgatcatatcagctttactttagatggagttccatttaagatttttgtacaaaaaaaaaaaaaaagggtttaactacttttaaaaagtttgaaaattagaggactgggtgatctcaaaagggctttccacagtaatgagctcgaccttgctcttattagtccctcacccctgcacctcatgatctcccactttctctagctgcagccttaaattagcttctttgcccaccctgtgagcctcatccatgattctgccttcaccacgcagcagaggtttccgttgaagtgcacgaggggggagatcaggctgttccttcgctgctgagtacacagggtctcttgcttttgtttctcagattccagcttctttccactcaggccagattctgggatctgccggcctgaaagatggtggttggggtggggtctcgtggagctaggcttcttacccactgcgtatgaactggcagagaatttaggggagatttagaagacagagttttagaagcaaagcacaagatctctgggaagcattagaatggagggtcttcagagttcagggaccaagtctagcggattctcagccaaaatacaggagcaggggcctcgcctcctgggttctttgctgaaattgtagttgaatggctttcccacattggccaagcttgaggcctcttgccaaagatcagctgtccccctaaagccacagggatggggtatcttcagcaagagagaggatgttaaagatgtaaaatgctttgtccatgggaaagtgcacagatacgtgagagaaccttacaaggccctaaaatgagatgtgatatggcttgaaatgggaggagagaagactttctgacagtgggggtctggaatggaattggtggggagaggcagcaagctgcacttttcaggggcctcatttaccccacttctgttaatatcttgactccctctcctccttccctgcacttttgaggggcctcatttaccctacctctgttaaaaacttgactactctcctctttactagaaagtcaccatcatctgtagtgatggaggaagggggcgtcacttatataaagatgggacactttaataaagacaagatatcttcaaaaaaaaaaaaaaaaaaaaaaaaga

SEQ ID NO: 6463 - DNA, 725 bp, Macaca Fascicularis
  misc_feature (1)...(725): n = A,T,C or G
ctcctgtaacaggtaacaggcaaggcttngnnnagctgggcctnntgatgccgtgggcaggcaggagctctgtgccactctgcatcttcagtggtatccattttgtttacgctatcaaccaaactttctatgctaaaaaaatcaagatgcagaacgggtctgatagaagagattcaatgttgggctggaactcagaccaggattctagtcctaagtgtggcatttgtgtgacttcaggcaaatcccttcatgccctgggcctggtttcttggctataaagtgggaaagttggaagacaggtnnnnnnnnnnnnnnnnnnnnnnnnnnnnnnnnnnnnnnnnnnnnnnnnnnnnnnagccaagagctgagggcagaggctctgggctttactgggacctcccagctgcaaagatactgacagttcttcctgtgggggaaaggcggagacaggaaacgtaggtcttcctacaccagtccctccaaatcctctccctctttatccctgcttatgaaaattgatctcaggatcnnnnnnnnnnnnnnnnnnnnnnnnnnnnnnnnnnnnnnnnnnnnnnnnnnnnnnnttcagggagaacgagacatgaacctatctannnnnnnnnnnnnnnagagaaacctctcccagaaaactaggtcaggtgaaaatgacggcttgctttccttctcgactcttaaggacagctgatcacagctccatggaagtg

SEQ ID NO: 6464 - DNA, 752 bp, Macaca Fascicularis
  misc_feature (1)...(752): n = A,T,C or G
tccatactcaaataatagtctttgatgtctgtcttccttgacccgtgttcgtgcaaagattcaaagtctgtgtgtggcttctactaggctgatgttacaccaggtgggtttattgagatatcatgtgtctgttcctccccctgtcctgcattcactcctgtggaggaannnnnnnnnnnnnnnnnntaaagaaagctttgtcctgagctcttcattcattggctaacccctacctagctcccttttcttctgccctttcacaccaggagaaataattttccattttgttcctattgctttggccctgtgtactattctacccccttagtccnnnnnnnnnnnnnnnnnnnnnnnnnnnnnnntcttacctctgacccccagctttcattgtggctgttagcaacatcctggggttttaactccacccacgcccgatctggctgtctagagggattctacgcctgcgtgctgctgcctccccaagaggcattcgggttattggagaactaatctcatctcaaggggccagacaccaagtcccaaagcctannnnnnnnnnnnnnnnnnnnnnnnaaacctggccccgnnnnnnnnnnnnnnnnnnnnnnnnnnnnnnnnnnnnnnnnnnngattggagatgatgtacagtttttattcccctctggcttttgaggaannnnnnnnnnnnnnnnnnnnnnnnnnnnnnnnnnnagcctcgtggacactgagactggaaggagaataaaggatgc

SEQ ID NO: 6465 - DNA, 251 bp, Macaca Fascicularis
aattgggagaagatatcccaggagctcgtgagagagtgatgacagaccccattaatgaccctatcttggtgtgtagatttcccggggagatcatgtctttatacatgcagagatgtcgtgaggattcctgttttagtgtatctgtagacgtggtgatgcccaatgttggtgagattgtgggaggctcaatgtgtaccagagatggtgaagaaatagtggcaggttataaaagggaagggattgcccgtgct

SEQ ID NO: 6466 - DNA, 739 bp, Macaca Fascicularis
  misc_feature (1)...(739): n = A,T,C or G
agtacatgtnnnatttggtcaagaccaaatcaagaccatcctcgttctgattttgtttctggatatttactgaggaggcttttgtgtgggtcacgacatcgggnnncggccttcccgcccgtgctgtgagggccagttcctgaccagccgggaggtgctgtgttctcagaaacagtgagaatctgtcagatctgtgatgcaggagtgaaggggacaagttctgnnnnnnnnnnnnnnnngnnnnnnnnnnnnnnnagcacgtctgcccacagctgtgcttcccatcattagctgcttttaactttttccaacttaaaaaacnnnnnnnnnnnnnnnnnnnnnnnnnnnnnnnnnnnnnnntcccattggtatcattaggatcgaattatttaagaaggttgggggtaagatgctatcgagtagagcagaaaagccgtgtacctcactatttattagggaagggcccccgggtcaccagtgnnnnnnnnnnnnnnnnnnnnntgggtggtcagagctgcagagctgtgggacatgccagaccccaccccagcagaacccagagaaccttctcccggggagtcccacagcccaggccaggctttggcattcacgctgccggagtgtgggccctgccctccaggctcagttgccgagagcgaccaggtggccacgctccagccagctcatgaaaccgagccaccagcctaagcgccctgcatttgtttacgnnnntgtaaaa

SEQ ID NO: 6467 - DNA, 705 bp, Macaca Fascicularis
  misc_feature (1)...(705): n = A,T,C or G
acttgacttggaatngnntgaagactacacaggaatgcatcgttcccactccccatcccacttggaaaactccaagggggcgtggcttccctgctcacacccacactggctgctgattggctggggaggcccccgcccttttctccctttggtccttcccctctgccatccccttggggccggtccctctgctggggatgcaccaatgaaccccacaggaagggggaaggaaggagggaatttcacattcccttgttctaggttcactttaacgcttaatgccttcaaagttttgtttttttaagaaaaatatatatatatatttgggttttgggggaaaagggaaatttttttttctctttggttttgataaaatggggtgtgggagtttttaaatgctatagccccgggcttgccccatttggggcagctatttaaggggaggtgatgtcttaccgggctgggggtgcctccccccaccccagggactccccttctctctggctcctcccccttttctatgaggaattaagatgctgtaactttttggaacctcagttttttgattttttatttgggtaggttttggggtccaggtcatatttttaccccttggagaaaataagatgagggagaaaggaaaaggggaggaaacttctcccctcccaccttcacctttagcttcttgaaaatggcccctgcaga

SEQ ID NO: 6468 - DNA, 772 bp, Macaca Fascicularis
  misc_feature (1)...(772): n = A,T,C or G
ctgtgagcagttggtnnngnaaagaaannnnnnnnnnnnnnnnnnnnnnnaagtgggcttcttaagagagaataagctgaaatcaatgactagaagacacggacgtggagaagaatnnnnnnaggcaaactttttgtgtgccagtaacagaaaccctcttctgtgtgatcacatgcaaagtataggatgtttgcaatatagccgtggggaggagtgcagggcccaagggtagattctagccaggcctcccaggaacagnnnnnnnnnnnnnnnagcccggagaagctagagctgcccctccagccctctcggatccacacggtctgtgttctctagacccccctgcatgttagcggtgttctctcnnnnnnnnnnnnnnnnnnnnnnnnnnnnnnnngtccacccgaaagctcctgagtttatatcatctcagccctcacaacccacaaaagctgtgtctcctagtcannnnnnnnnnnnnnnngaaaaataaatgaccggccaaacgtggagcaggtgtccnnnnnnnnnnnnnnnngttagaacaggagacaagatcccacaaannnnnnnnnnnnnnnnnnnnagccccggggcaaggggtcaagttcttgtcagagaaagaggaataaattggttctcagaagacaccacaagatacatgtgttcccaacaatctctgatctctgctgatcttttgcttagcagttaacttgatgcatcattgggaaggtgtttctctcatctccatcctaaggcttaataagtcata

SEQ ID NO: 6469 - DNA, 7300 bp, Macaca Fascicularis
agaaaacgcactagagagtgggagcatccccaggctgaagcacacccaggacatcacatgtcaacgtgtcctctctggcctggggtccccgcgagtctgggaaacgaggggctggcaagggagggcaggctggggcggcagagaaggcccctggcgcagggggcgcagacctcgctgcgctgcgcgctctaccgccgggctcgcagcgcttggctcagcgcttgcgcctccctcagctctgtcctccgccccccttcgccctccccctttccctccctttctcctcctcctcctgctgccgcggccgctgccagacttcgccagatcagacccacggggctgccctcccctgcgcactcccctcgctgcccgggcccggagcgcagcgcggccgcgcaggtaggagcccctgacggggtgtcgccccgagcgagcccagtgctcacggggccgcgcgcgggagagtgagtgaggtggggtgacctgaggggtgctgagtactcgagaactgccctggactgtgcagggtgtctcgggcagagagggaggtggaggtgtgcagcctcggaatgcgatctgtcagcaagtgcgagcactcgggtgacatctgttgggatgggcatgtgtgtgcgcgcccacaaccagccggcagggctttgcccataaacgtggttttgaaagtttaggggaccagtgtgcaagatttaagccgcacctggattccacaggagctggtcagaagctgggacggtgagcacctccatcagcctctcccactctcccttcctcgcttgtgttccctgctaaagttttgttactttccccgcagcagatactaaatatcagtttgtcctgtattttctttgagattcacaatgttgaaagcccttttcctaactatgctgactctggcgctcgtcaagtcacaggacaccgaagaaaccatcacgtacacggtaaggggtgatggaatttgaaataagtacggttcagcgggattctgtgaccaaaaaaaaaagattttacacacccctgccagtgtatttggcctatactgtgcggagggtgataaattaaacaacactttattcatgcttcatatctaagattcgttgtaaattgcccccttgatcctttcgaaagttcactgggctcaccacctaagatagggaccaacatgtaatcatttgtgcaagtctaaaaatgggatccggtactgggcaactgtaccaaaaacaacagaagagtttaggcagccgatgattgagaatggacccctgaagttgtccaatgcacagagttgtcttttaaaaaaaagcgatagaatgttaaaccacccgtctcatcatatatctaggactttagcgcaaggattgttgccgtaagaatgaagcttttagagtgatttcttagggaatggacacaccaattaactgtctcctggccccacctttgatgttttctttgcagcaatgcactgacggatatgagtgggatcctgtgagacagcaatgcaaaggtgagccagcttcaaaacttcccatgtgatctttggccttctgtctccatctcttgtgtcactcttcctatcctgtctgtgtcataccaaaaaggcatgagcattatatttacatgttcgatttttccctcttagaagattcctgacttattttattactgaccacagatattgatgaatgtgacattgtcccagacgcttgtaaaggtggaatgaaatgcgtcaaccactatggaggatacctctgccttccgaaaacagcccagattattgtcaataatgaacagcctcagcaggaaacaccaccagcagaaggaacctcaggggcaaccaccggggttgtagctgccagcagcatggcaaccagtggagtgttgcccgggggtggttttgtggccagtgctgctgcagtcgcaggccctgaagtgcaggctggccgaaataactttgtcatccggcggaacccagctgaccctcagcgcattccctccaacccttcccaccgtatccaatgtgcagcaggctacgagcaaagcgaacacaacgtgtgccaaggtaggaataacttattttcctaaccatcgaaagcttttgcccaagtgcacctcgtggtgaggatgataataattcacaattctttgcattctgaaatttgcaaataaaaatgtatacgtacatgttaccctgctgtttgtaaaaacaaacaactacagggaacgtataatattaaaggttgattacactgttattgcttagaaatttgtcaatgaaaattatctcaaatacaatatattggatggaaaaagcaagtatcatacaatctatttaaatgttttaacatacaaaacaatatcatatgttctaatggatgcatccctgtctaatgaaagtacaaaaacatctcagggaaggattccttcctactgagacagtggtaggtgacgggtcaagggatgaggatggtgtgaggctttagctgtatctgaaatgtttcttaacaaaacagagtgagccaagaccaacatggcaaaatgttagcatttgttaaatctgagcagtacttattggtatttgcaaaattattttctgaacacttgaaataatgtataattttaaacatttccaatgtaagaacattataagcttttaagaataaagtaaaaatttagcttaagaagtggcaaaatggaggcaatatcaacatcttcacaactgacaattctttctgtgttgcgtgtctctgacagacatagacgagtgcactgcagggacgcacaactgtagagcagaccaagtgtgcatcaatttacggggatcctttgcatgtcagtgccctcctggatatcagaagcgaggggagcagtgcgtaggtaagtaccacagtgcagtgagcacggtcctgtcttgagtaccttaactgtttcaacctcaagcattccaatgaaagcattcatatttctttggagagtggtagccaataactccttattctttcacagactaccaatccattttccacaataacaagaaacaaccttaaaggttgagcctattctggataacaaagtgttggctaaatgttagacgaagcaagagcagaaatttggggtatgaatgggaacataaaaacaaccacaaagaaatttaaatttgctgttttgggggccattgtgctagcacactggtactgtgggcttcattcaccatccactgctgcagagcatagcatagcacagcacataaagcaaatggtggagttgcattccaagcaccaaccccagttcactttgagaccttaacatcttaactgcagaatatgaagtatatttaaaatatatatatataccctaattttaacaaaacagagaggaaagtattccttttaaaaagagattttctctagataggttttctagataatgctttacagagaatttgaaagcaaacagcaatgctaattcaatcattttgttctctttgtgtatgtgcctgataacctagacatagatgaatgtaccatccctccatattgccaccaaagatgtgtgaatacaccaggctcattttattgccagtgcagtcctgggtttcagttggcagcaaacaactatacctgcgtaggtaagccttttgagaacttgctgatttctgtcttcacaaaaggaaaccccatgccatgttgcagtatttccagttttctatgttcttgagtaaatagtttccatcgacttcccttcagcaatcataaagcttaaaagataataaccaatctgtgtcttaaaacacatcaagatgtgaatggaaaactttttaactttgtttttagttctcctttgtggctatatcgacaaatttaaaactacaaatcaattgatatacatacaccaattagtcaaaagtgtgtgatataatactgaaagtgccaaagaggttactaccagttcaagtatataaactttccactgcaagtgcatctgatttttacatgcttcttctcccctttcagaatgcaatgtcacggcacacaattaaaagattggcatgacttggaaaaaatctagtgtaggaaaaatgccttttcacaatattttcagtgctttagagcattgcaaaactccgtatgggtctcaaaggcttatgttataattgtaatggaatttaacagaacccatttaaaaagtaataaatagcacagataaatcttcagtacagcatgctgagagaccatatcagtgtaagtgtcttatatcaattatttatagaactggcattttgtatctgcacaacaacaaaagaaaatagatactggaatgtatatttattagaagcattaaattcctttggaaagattcatcaaacatcaaactaactgtcattcctagaaaaaatattttggtatttccaaaagaaatatatgacagacgtttgaagttgttccaacaaatatgaaacctaaatggatgttctccagtgagcttctgcagggcaaataattcagctagggaattatttatcagcagatgacataggtacaaaagagcaaggatgtgtttaaagtctctctctctctctctctctctctatatatatatatatataactttttttcagatataaatgaatgtgatgccagcaatcaatgtgctcagcagtgctacaacattcttggttcattcatctgtcagtgcaatcaaggatatgaactaagcagtgacaggctcaactgtgaaggtaaaactcttcccagatagtatggaataaagtccaatccctgtgattgctgttgttttatctgattatgtacccatttatgaaccaaagtagtggtgcataagcttttcaactctgtgtccttgctcttgtctgattcgacagacattgatgaatgcagaacctcaagctacctgtgtcaatatcagtgtgtcaatgaacctgggaaattctcatgtatgtgcccccagggataccaagtggtgagaagtagaacatgtcaaggtaagtttaatttttttttcataaatctgcctagaatgtgtcagctctatctgtcctgaatgcaatgcaacgaacacccaggcttgtgtctaaaagcaggttgaacacagtccagatgccctcacacctccttccttgcaaacagaatctgccagtaatatgatttaattagatcagttaattagtttagttagtaaactctttgaccctacatctctacagatataaatgagtgtgagaccacaaatgaatgccgggaggatgaaatgtgttggaattatcatggcggcttccgttgttatccacgaaatccttgtcaagatccctacattctaacaccagagaagtaagaaaaatcagaacttttgaaagtgaggattttctggtcttaccaagccaaactgctaactacttttgtttgtctctgcagccgatgtgtttgtccagtctcaaatgccatgtgccgagaactgccccagtcaatagtctacaaatacatgagcatccgatctgataggtctgtgccatcggacatcttccagatacaggccacaactatttatgccaacactatcaatacttttcggattaaatctggaaatgaaaatggagagttctacctacgagtaagtatcctgaaggcagccttaactattgagaaagatgggagtttgttgttgttgttgttgttgaaaccaagaagggaccaagtagtggctcttgtataccaccctcaaaattctcccaattcttataggaggtatactaacaaagcatagaaactccaatgcaaggaaaattattctttcctttctcttttttcttttattttagcaaacaagtcctgtaagtgcaatgcttgtgctcgtgaagtcattatcaggaccaagagaacatatcgtggacctggagatgctgacagtcagcagtatagggaccttccgcacaagctctgtgttaagattgacaataatagtggggccattttcattttagtcttttataagagtcaaccacaggcatttaagtcagccaaagaatattgttaccttaaagcactattttatttatagatatatctagtgcatctacatctctatactgtacactcacccataattcaaacaattacaccatggtataaagtgggcatttaatctgtaaagattcaaagtttgtctttattactgtatgtaaattagacattaatccactaaactggtcttcttcaagagagctaagtatacactgtctggtgaaacttggattctttcctgtaaaagtaggaccaagcaatgatgatcttctgtggtgcttaaggaaacttactagagctccactaacagtctcataaggaggcagccatcataaccattgaatagcatgcaagggtaagaatgagtttttaactgctttgtaagaaaatggaaaaggtcaataaagatatatttctttagaaaatggggatctgccatatttgtgttggtttttattttcatgaccgccaaaaggtggttgttcattacatagtaataaatcattgttgtacaatatgctggtttctgtagggtatttttaattctgtcagaaattttagattgtgaatatttggtaaaaaacagtaagcaaaattttccagaattcccaaaatgaaccagatatcccctagaaaattatactattgagaaatctatggggaggatatgagaaaataaattccttctaaaccacattggaactgacctgaagaagcaaacttggaaaatataataacatccctgaattcagtacttccacaagatgcagaacaatatgaataaaaggtatttcactggagaagtcttaatttctaaataaaatttaaatcctaacacttcactaatttataactaaaatatctcatcttcgtacttgatgctcacaaaggaagaaagtgatgatggtttttattcctggcatccagagtgacagtaaacttaagcaaattaccctcctacccaattcttgggaatgtttgatacatctccttgtttaaaatgtcactgcttcactttgatgtgtcatatttttaaataaaaataaatattcttttagaagatcacccaatctttggaggtttttcagtgtagtcaacagcccccagtataatttttatatctgggaaaaacatcagttgtaggtgccagcgcaagaactactattagattttttttaataaataaactgggagatgaggaagcaaaaagacagttaaaatcatgccacaaaacaggcaactttttctta

SEQ ID NO: 6470 - DNA, 803 bp, Macaca Fascicularis
  misc_feature (1)...(803): n = A,T,C or G
tgcaagcttcaaatgagnntanctgtgctgctagtnnctagcgggaaatcagaatnnnnnnnnnnnnnnntgtgttattacacaggtagaagcttctagaactatgccgtagccaaccaccatgtgcagacagcgctgtctggactctagaagatattctgattcaagaggatgtaaagaaattctctaagtcaataagaaaaatagaagaaacccaaatgggcaatgagtgcatgggaactcacctcagtggaaaggagggaatggcaagccagcccaccgaagcccactggcaacataggacaagcctgcaaagcagagacagcccctccaggaagagcagccaggccttgggaggacatggcctcaggaccagacccagggnnnnnnnnnnnnnnaacccctggctcatctggcaggtgtgggcagcagccaggcccgtggcttcacctgctccccctgatctctgccttnnnnnnnnnnnnnnnnngggtcgagcacctatgcaccagttttatggcaggcagagatgcaccacccacatcccctttccaggtagggcttgctcccctggctgtagcgagtgtgtcagcagatggcctccagctatcagcaacttcagagagctgccttgcctgaggtcccgtcccttctggggaagctcctgtctgccagaggggctacaaaagcacagtggannnnnnnnnnnnnnnntttggctcatgggagcaccactggtggctgaggcactgttgggccacatagcagttgactttgccctctccaccttctttcacaagagt

SEQ ID NO: 6471 - DNA, 2666 bp, Macaca Fascicularis
atgcctctttgcactggcccagcgcagcatgccacaggccccggctttacactcagtcctggacgggtctcttgtttcaaggtgggcacatctgattgactcaatgttgggcctggggtcctgctactcaggcatgcttattgacgactgaatcctgcaaagctgagtgacagttgtcagagaagatgatgatccctgggcagacacccaggcagtagtagccacttgggactcctgtcctgcctcccagccctgtgtcctcgctctggagtcgcctgtgctagggagaccacactctaagctgctgagcctctgagtttaccaggcatgttcttaccctactctggtctctccggggtggagtgggttcttacagctctgctgtttcctgttggagcaggagaattctggaatctcagcctttccagaatctcagaatcttctagttcaattgccattcaaactttttgttggtgttagccagtaacagcttgactcggtgcacccgcagaaatactgtaacctaaagtttgaggaaacagttttttctatgtagtaagtatatagttgtattttatattctgctgttttgctttttaagatgttggttgcaacccatcagattgatgatgtgactcattgctgggtcatgacttgaaaatagtaaaggctagtctagctgctctgtgcctgtgacatggcaggtgcctggtctgctgccagcttcctataagaatgtctccctgcagcctcgtttctatacagagctcagccctgcctcatggaagcttttccaggcagtgtgggctagaggagcgcttgggaaggcaggttctgcagcagacggcagtgacggcccagttctgcaccttccttgctgagtcattgtgggccagtgacttgatctgagattgtttccccatcataaccatgaggttccttggggctgttcatctattcacttgacacacacacatctgcctttctataccagctgcagcgccaactgctggtaccgtgagcaagagccgagtgcgcccacggtcccggtgtcttgcagtctggtgggagaggcaggtaggggtcgactcagacaggtagcaaacctgaaactccggggaaaggaagcatttctgcaactgtgagtacataggactgtgaggagaggcttctggaggaagggatgttcgggctagccttaagggtgagtgggagttcgccagagaaggaaggggagaccagtccagggcaaggagaatgcgcagactttgggaaaggcctgggacgcacagccaggggctgcggctcacacactagcagggcccactcgctgcttctaccaccggttgacgaggagtttggacctcaggctgggggacgccgccagaggcttctaagccgatcacatttttgggtggaaagagctttagcttcgggcttgtgtgaggatgaggatgattggaagggagggatttgaggaggctgtgaagtgcgctgtggttaatatgatgcgctttggggtcaaatgtgggttccagtaacggctgtttcctagcgaatgccttgtgtgagttacttaaggaagatgtggctgtcttgtgatgggagtgcacgggatgaactgcagagggggacccggccctgtgaacactaagccaggggctgcctttctgctcttggagccggctgatttctgctcctccgggccctgcccctgcccatactgaccctcttgtctgtctgccctgcccaggaggcggcctcggtggtaccagaagaggaggggctgatgtgaacatccggcattcaggccgcgatgacacctcccgctatgatgagaggcccggcccctccccgcttccgcatagggaccgggaccgggaccgtgagcgggagcgcagagagcggagccgggagcgagacaaggagcgagaacggcgacgctcccgctctcgggaccggcggaggcgctcacggagtcgcgacaaggaggagcggaggcgctccagggagcggagcaaggacaaggaccgggaccggaagcggcgaagcagccggagccgggagcgtgcccggcgggagcgggagcgcaaggaggagctacgtgggggcggtggcgacatggcggagccctccgaggccggtgatgcgccccctgatgatgggcctccaggggagctcgggcctgacggccctgacggtccagaggaaaagggccgggatcgtgaccgggagcgacggcggagccaccggagtgagcgcgagcggcgccgggaccgggatcgtgaccgcgaccgtgaccgcgagcacaaacggggggagcggggcagtgagcggggcagggatgaggcccgaggtgggggcggcggccaggacaacgggctggagggtctgggcaacgacagccgagacatgtacatggagtctgagggcggcgatggctacctggctccggagaatgggtatttgatggaggctgcgccggagtgaagaggttctctccaccagctgtgtttggacgcgttcctgcccacccccttgctgtcatcccctcccccaaccttggccacctgagtttgtcctccaagggtaggtgtctgatttgttctggccccttggatttaaaaataaaattaatttcctgttgaaaaaaaaaaaaaaaaaaa

SEQ ID NO: 6472 - DNA, 301 bp, Macaca Fascicularis
cagagccaccaaggagggccggggagagcctggaactgcgtcctgacgagggggatttcctgcttacccttcacacacacaggagggggtggcttttgcccgcgggagatcttctggccccagaaacagcaggtgctggatttgcagccctggccctccaggccccaacggggcgacagtgtggggccagcctggagcagggcctttccaaggctgctgaatccagctctcctcactcagaccgactaccgggacccagaaggaacttaggtgaagctcattttattctcaagcctgtgtc

SEQ ID NO: 6473 - DNA, 556 bp, Macaca Fascicularis
tttaaaaaaggccaacaaagtgaatcagcagtagcattttcttgatgaaggttgactcaatgtataattaacaaatatacatagcagagtcaatcataatgccattatgtcacttatttgtcattgcaaagtattcagtcttgttgtctagatttactttagatggtgcaaaatttccagacagtaacctatgtaaaaggatttgtaatttccttataattcctgcctattagtccatattctaatttccttatgttcatcactgatgtgttcctgatcagggtcattgctagtagttgagcatttactggttgaacactgtttaatggttcgatgttatgtgtgtctgcattaaaaaaaaaatgtacatgttatttcattattggtattataatattcataaccacatgataaacagaaatgtactcaataatttcctataaaaaaaaaaaaaaaaaaaaaaaaaaaaaaaaaaaaaaaaaaaaaaaaaaaaaaaaaaaaaaaaaaaaaaaaaaaaaaaaaaaaaaaaaaaaaaaaaaaaaaaaaaaaaaaaaaa

SEQ ID NO: 6474 - DNA, 2268 bp, Macaca Fascicularis
aagctgatctcctcccactggaccagctagcaggttcatgttcgaggccattttcccctcaataccccaagccaggctgaagagagatccacgggaatagctgggcctgtcctcattcaggtccacattcaggcagcaaagctcacttggtctttgcctcatgttacctaaggaggccagcccatctgagaggcacagtttaatgtccagctcgatggccaggggcctggcactcctccagagtgtggccagccgggacgccgagtgcccagaatggaaactgcgccaaaagccacgcacgctcagcaagtcagtccagaccatcagccgctactacaagaagacgagtgaacccaaggatgccaccagcctcaccagcttcatgtccaaaatggaggaacttcgaagggtcttccccaggcgtcctcactgcccccagttcagcaccagggccacatccatgtcctactgtggttcacccaccgagaccgatttgtcctgggagattgacaacagctcggagacctggaggggcacccgggacctgctcttggccaggcggggttcggacatgaacctggatgtaagagcgcctgcgagttcgattacttgaggaagaagagcaaatcccagactttgagtccggtcaccagcagctcagtcgcatcccagagctgctcgagaaggaggatgccctggtacctctcagtcatccatgagaaggatcactgcctgtccgagctggagatgcaggttcagaagaaagacgaggagatcctgctgctccaggaggagagggaggccctgaagacgcagctgaaatgcctcctcaaaggcaaaggccaagaggcgtccatgtccccaggcaggagggagcggctctcagatgcttcgctgaagctgggcaggctgagcctcctgaaggccttctccagagatgaggagctgcagcactggcagcaggcggatgctcccccgctccctggatcctgcagcagcctggaaggaggtgtcctccccagtgcccccgccgtgagcattagagttccccaccctgggggtgccccgcagccctgcccagcccctgccctacccatctcgcagatgcaggaggagtctgcagcaccggagaggggcaaggagctggacctgggaggtggcgaggaggacgagggcctggaaggggagcccaagggggtggaggacacaggtgccaggggaggtgtgagccagatgggggctgtacatgaggagggacgcaaggaggaggaagaggaggaagaggacagggatgaggactccgaggaaagggagctgccagaggaagaggagatccccaggagaagtgcttcctccctggccgagtcgtttgaggaggagctgctggcccagctggaggagtacgagcaggtcatcctggacttccagttcaacctggaggccaccaggaccagatactcccttgcaacaggagtgattgcgtctttacaacaacaactggatttccaagaatcccaactgcggaagatcaatagggaaaatgagatgctgcagaaggagcttcgagagcggaagcagcagctacaagccatgaccgacaagttctccaacctccgagaagataagaaacaccaagagatgatggggcttattgagaaggacaaccagctcctccgacagcaagtgtcgaaactggagagaaagctcaccaagcgggaccgcgtcatctcagagttggacaccaaggtcagccagctgcaggagcaggtggaactggaccagaaccacttgcagaggtggaagcagctgcaggaggatttgcagagcaagaaggagatgattcaggagtcggagcagcaggtccgcgtggccctggaaagttcccagtccaggctcgagaggctaaggaataagatcatccaggccacctttagcatcaccggaaccaagtccttggtcaacgagatatctgacaatgacatcctggaagccctgcagagaattatctcagagagaagcgactactacaatcagctgaagcagaaaggcgtcaaagtgcccccccttcaacagtcagagaccttcctgcccagcaaaaccaagaaggggacctccaagtaggcccagccaggcgcccaaatacggtcagcccagcagaggccagggcccagctccagaaccacccgcccccaccacgagtcctgttctcagacttagaattaaactccggcgttggtactgtcaaaaaaaaaaaaaaaaaaaaaaaaa

SEQ ID NO: 6475 - DNA, 752 bp, Macaca Fascicularis
  misc_feature (1)...(752): n = A,T,C or G
aaaanaaaatgagtttgtacttagtgtactaaaattnnnaattggataacaatagttgaggacagtgtaggatttaaaagtagaggatttcactttttactcatttttgtcttttatatgcatcagaatgagtgcatattgagtactacttggtaaggtcttaaattaatttgatatctactgagatannnnnnnnnnnnnnnnnnnnnnnnnnnnnnnataataatatatcactatcttggaaaacagttcctaaatctgatttattttcaggtttcatgaatcaaaatctaacagataagcaacaacgtattggtagnnnnnnnnnnnnnnnnnnnnnnnnnnttaggtaaaacaaagagcaaaatattttgaacagtttaaaaaaaaaaagtatgtttaaatnnnnnnnnnnnnnnnactctgggaggctgaggtgacaggattgtttgaggccaggagttcaagaccagcttattgtccagaattagattgtaggaaaattcactatgtgaatattttctgaatcataatgatgatattaacagtacaaataccattttaaacagagactcaaaatattttgtaaactaagtattttaaactcttaaaatcaggtatgtaaactcctgtaacatcatcgaattctgaaaggactgatttggaaagtaatacataatctagtaaagatggaaggggagctgagaaagcatgtgttgttttggatatttcttatcacaggaaacattttc

SEQ ID NO: 6476 - DNA, 1052 bp, Macaca Fascicularis
gaaatgttacctttaaaacgagttaccagtgaagaattgtttttttccccttgaaataaaagtaaaacaaagctggaagatcaccttaatggcaaatgagaacaataatacttgatcacatttattgagtcctgttttggatttgttaaatataaactgatgttcttatagtcttcaccacataaaaaatactggaaattttgctcttctgaaaattataacaagaaccattattcggcccttccttctttaatatttctgcatttgagcaagcagttttggctgtggatttttcttttttctttttttttttttttggttttgtttttttgagtttggtgagtttgctttattacacattcagtggcctgaaacaaacaacattgttttaatatttccccagcagttccttgatatggctttagttgcccctgaagctccttcagaacaagccagaagagtttttcaaacctacgacccagaggataatggattcatacccgattcacttctggaagatgtgatgaaagcattggaccttgtttcagatcctgaatatataaatctcatgaagaataaattagatccagaaggattaggaatcatattattgggcccatttcttcaagaattttttcctgatcagggctccagtggtccagaatcttttactgtctaccactacaatggattgaagcagtcaaattataatgaaaaggtcatgtatgtagaagggactgcagttgtaatgggttttgaagatcccatgctacagacagacgacactcctattaaacgctgtctccaaaccaaatggccgtacattgagttactctggaccacagatcgctctccttcactaaattaatttgcctacgtatttataaggaggatcttaataacagatgttgaaagagggggtcaagactggcaattggctggattaagctaaacactggtatcattgattaactgtaaataacaattaaaaacacatttttagtgttaaaaaaaaaaaaaaaaaaaaaaaaaaaaaaaaaaaaaaaaaaaaa

SEQ ID NO: 6477 - DNA, 661 bp, Macaca Fascicularis
  misc_feature (1)...(661): n = A,T,C or G
cagtnnntngcgtctgtgttgcaagcnnnncnnccccatcagacagctcctagaaacatnnnncttacagttcatttcnnnaaagcatcnnnngattattagataactccaacttttgctacttttatcttagacatcaacactatagcccaaannnnnnnnnnnnnnnnnnnnnnnnnagcaactgagttgttcgttttcccctcaaatagaatggggaacattcacaacattattttaagttgtaacagtaataccatcgtggttatagaactcaggggtgctaaagcaactactctagacccatagttctttttagttagaaggtattgaaacagacaaaaatattagcatcagaaaaagatatggcgtattagaggatcttcttaattatcagcaattaagtatggggtnnnnnnnnnnnnnnnnnnnnnnnnnnnagaagtaaatttggcatctataaaaatcaattaagatgtttgaaagatttatttaaatatatcaatatagcatctttttaatgttactcatttattagatcatttatcatgattagcttaaacctctcaattgcactttaaaggattataaataatccatctaaaaattcaagtacacacatcagtgttggttactatgcagagagaaggtcatcgtgtat

SEQ ID NO: 6478 - DNA, 303 bp, Macaca Fascicularis
caggtacagctgcagcagtcaggtccaggactggtgaagccctcgcagaccctctcactcacctgtgccatctccggggacagtgtctctagcaacagtgctgcttggaactggatcaggcagtccccatcgagaggccttgagtggctgggaaggacatactacaggtccaagtggtataatgattatgcagcatctgtgcaaagtcgaataaccatcaacccagacacatccaagaaccagttctccctgcagctgaactctgtgactcccgaggacatggccgtgtattactgtgcaaga

SEQ ID NO: 6479 - DNA, 674 bp, Macaca Fascicularis
  misc_feature (1)...(674): n = A,T,C or G
ccatgaaggtggtggacatgttcgggtgctgtttgcctgtgtgtgccgtgaacttcaagtgtttacatgagctggtgaagcatgaagaaaacggcctagtctttgaggactccgaggaactggcnnnnnnnnnnnnnnnnnnnttctcaaacttccctgatcctgcgggcaagctaaaccagttccggaagaacctgcgggagtcggagcagctccgatgggatgagagctgggtgcagactgtgctccctttggttatggacacatgactcctgggccagaggctaaaaccccaggaccccggctgccctccctacagcttcttgggagtctcagggcaaaccctttcaagcagcgcctcccagtggccagtagctgaaatgacggcagnnnnnnnnnnnnnnnnnnnnnnnnnnnnnnnnnnnnnnnnnnnnnnnnnnnnnnnnnnnnnnntttggaggctcagaaacatttcctctcttctgttcttcacgccccatgcccctgctagcgtattactgttctgtgacttccccatgacctctgcaggactcctcctcctgtgtttggtctccaggtgtcgcctttctgccgtgttcctaacgttacgattnnnnnnnnnnnnnnnnnnnnnnnnnnnnnnnnnnnnnnnnnnnnnnnggcatctgcagcgg

SEQ ID NO: 6480 - DNA, 398 bp, Macaca Fascicularis
cctctcatttatgatgccctctgtgcaggcagacggctcttgggctcttttccccacctgtctctaacacaggccccacagtgttggccatgggcagtggaggaggagtgaggatgggttggggagcggggagtcgcagcttggctcttcctggtttctgagacggacatcttcatccctactcccctcagtccccaaccacagtcctggtgaagatgtggatgataatggtgccttgatttccaaatgaagacagctttattgtttcactctattgtaaataggatacacgttcagtgtaaaagtgtaaagaaaggggaattcagccttaatgctgcacccagatacaaatgctaatgatacttgggtttatagccttctgatcctttatttctgca

SEQ ID NO: 6481 - DNA, 739 bp, Macaca Fascicularis
  misc_feature (1)...(739): n = A,T,C or G
agnnnaggccacggcagccaccttnnnnncnnnnnnnnnnnnggcaacagtccatnnncagnnnncggtgnnnnnnnnnnnnntcatcctccacagctgcagggtcttcgcgaggcccctctgcatctgctcctccatctctgctggtccctctgctcggcccccgcaccttggggctttcaccccacactggcctccttnnnnnnnnnnnnnnnnacctccctggctgcagccctgcagccctccacccttgcatgtcattgggacagacccgcaggtgtcgttttgccccccgagcctccacccagacgctaggctgtgtcctccaggcccagcctctcactgccgtgggccatgccgtccccacctcccctggatgaccttggccactgagccctcctgttgtagcacacaccacatgggtcctgggctctgccctgggcctctgacattcgtgccctgcatcctgtagcagcagctgcctccaccttccctcccgcactctgcacggtccccgtccccaggccctccccaaccctacactgcgagcccccagacccccctgcctacccccaagatgggctacctcctccctagtttctttccctgcttttccacagcacttcccccgacctgctgaccccagggtgctggctgcctcctgctaggacgtcctgctaactcccacctggcacctggaggcacttccctcatcgtgtgttggtactgaagccgcaaa

SEQ ID NO: 6482 - DNA, 738 bp, Macaca Fascicularis
  misc_feature (1)...(738): n = A,T,C or G
gcaacgggtgcaggactgccaaggataggagtgtgggccgcgcacgtgccagggattccgccgaggggaagccgctcacattgcagtcatcacagacttacacannnnnnnnnnnnnnnnnnnnnnaggggacgggaatgggccttgttctggcggaatctgtgtatcatgaccgtttctgacaggcagagtgaattgtctgggagccctgtcnnnnnnnnnnnnnnnnnnnnnngggctggtgatgacgtggccnnnnnnnnnnnnnnnnnnnnnnnnnnnnnnntagtctcttgtnnnnnnnnnnnnnnnnntgacccctctttcccttgcaagccccttcnnnnnnnnnttggatatcttagtgggtgacgctggcaagaggcaccctacccgacagagctgtggatggcccgtgacgtcatgtcaggaggccacagggagcggaggggtggtgnnnnnnnnnnnnnnnnnnnnnnnngagcacgtcctcgccttcgtccggctgccgcccttcacnnnnnnnnnnnnnnnnnnnnnnnnnnnnnnnnnnnnnnnnnnnnnnnnnnnnnnnnnnnnnnnnnnnnnatttttaacactgtgagccagctagacccccagtgcaccgccctatnnnnnnnnnnnnnnnnnnnnnnnnnnnnnnnnnngannnnnnnnnnnngtcctggagctgtccctccagaagttcttccagcccatttctatgtgatgtcatct

SEQ ID NO: 6483 - DNA, 1923 bp, Macaca Fascicularis
atggaatttgactagccttagtcttctagatgatctttactagaattaataagattctttctgtgaatttttaggaagaattctttgtcacctccacctgacacaccaattttcaaaagaaaaacgaagggaattcatttttccttatggtgactctttggcagataaacatttttgccaatttgcatgctgggttacgggtttagcatgggccatttctctctttaatgtcttggtattattggcgtcttgcagtcttgatgccccacatttttaatttatttattttcttttatattgtcaaaatagcacactagagaaagaaccagagtgaacattcggtatcctgagttacaatgtcatttgtatagaactgtataatgattaatatctgcagagaaattagaccaaatgaaacctgctggcataggtttgatttatattgccttcatcattctggtttcagacgaaatggttattgctctctaccactgctgaaagaatagagtcttaaactttaataatcacagccttgtgatgcaagcacagagcttatttgtttgaaatgcctattattctcatcttgctgtatatgttggaatggagattctttttccagtgatctccattgcaagctttttaacagtgttttttaatactcagtatgcataaaattcatgtgtagcacttgtaaaaatgcagattccttcaacctatcttcaaagagtctgattcggaaacttgaagcagggccaagaaatttgtattttgagctagtctccttaataattttgatgaagattgtctatagaccttattttgaaaaattctgctatttagggaatatgcagagaccaacagttcctttacttcttagaagcatttcctcattttctcttacttccttcccactacaaataagtcaaagcacgcattattcattatcttaagagaaaaaaacccaaagaaaaacatcctaagactagggcagaatagattttcatgaattctttgccatttcatctgctgtatgtcaaccataaccctttctccatattgtgtgtgtatgtgtatgggttttttcccaaaataaaagcctacattattatagtcttagctctgggtagatgggagcacatctctgagtgagatgtattctaatgatacccaacaagaaataaaaataatgatctttcccaaggagagttgtttatttctaggcccttacttagtatgagtaggaggaaattgaaagtgacccataatttaatgatgtatatggccccaaaggtgattccattaactgcacataaaatataaccaaaatgaatatggaatggttagtgaattcagctacattttaccaaacaaatcctgtgccattgaactgctaagtttgtccaatttgactcaatcaggactatgaagctctcagataattgaagatcatgaaccctgacattaactaaaaacttgaagccaaactcatgtttgagaataaatgctaaaaaagaaaaaagaaaaaaaaagaaaagaaaagaaaaagaaagcaagaaagagtgaattcaaacgggtttcaatgatccaattgactctattcatttaacagaataactggatacataccaaattcccacattataagaaagataaaaatagagatcacgcttgtcatgatcatgagtgaatatggagtaaatattattgccaaaggaaagtgaagtacgcttaatgaaactgttgaacatgagcaactaattatgttaaactggccaagattaaaacaaaaatggtttacttcctaaaaaaaaaaaaaaaaaaaaaaaaaaaaaaaaaaaaaaaaaaaaaaaaaaaaaaaaaaaaaaaaaaaaaaaaaaaaaaaaaaaaaaaaaaaaaaaaaaaaaaaaaaaaaaaaaaaaaaaa

SEQ ID NO: 6484 - DNA, 705 bp, Macaca Fascicularis
  misc_feature (1)...(705): n = A,T,C or G
agcnnnnnnnnnnngtgttcaaagcccactttagaannnaaagcattttgggttaataaagcaaatttttgcatatgttatttggtggtgtcaccgcagcttataccaggacaccatggctcagacatgggatcaggacactcctttcagatcccaccgttggcaagaaaaggctctccaaggcaggcagcgtggtagttgtctgtgttttgtttaccacacgccaggtccaagggaagtcttgcacagactcttagcagacaagcagggaaaggagagggccctggtgggtggaaggattgggaagggggttctgggcctggaagcctgcttcttcccctctcagcagtctcaggactgctgttgtattgcaaacagtatctctgacccagtcttcagtctcattctgtaaatagaggagctgaggtcagagcnctgnctgtgaactactcaagaccacatgcttggagtcctagccaggcttcccgacccacaggccagctacggattttgcacttttgctccaggccacttgtgtgtgtatgtgtgtgtgtaccactgccatgtgaacaaactatgcaataccacnnnnncannnnnnnnnnnnnnnnnnnnnnnnattttttttaataacagaattttagtttgnnnnnnnnnnnnnnnttgtatctgnnaaaaagaaaggaaggaaggaaggaaagaaag

SEQ ID NO: 6485 - DNA, 740 bp, Macaca Fascicularis
  misc_feature (1)...(740): n = A,T,C or G
tctacacaagtgaattatatcccacagtcatcaggcaaacaggtatgggcgtaagtaacctgtggacccgtgtgggaagcatgttgtccccgctggtgaaaatcacgggtgaggtacagcccttcatccccaatatcatctacgggatcaccgccctcctcgggggcagtgctgccctcttcctgcctgagaccttgaatcagcccttgccagagactatcgaagacctggaaaactggtccctgcgggcaaaggagccaaagcaggagccagaggtggaaaaggcctcccagaggatccctctgcagccttacggaccagacctgggctccagctgaggacaacggaaccccccttccctgccctccagagactgatcctagccaggcaccttaggggtacagggaggccccagataggtccaccctcctgggatgaagccttctgagagcttggtgaaggtgtctccatcaccaccaccagagcctcctgcccagccctggacagttcaaaggttcagccatagacctttccatacccatccctgcccttgttctccctgcaacccaggccctgccattcttctgtctagcccttccccactggccaccttcctccactgtcctggttctcttcccctgaggtcccctgatgtccccctggctcagtcctaacaagactgagtcttaacaagataagaagtccttcccttcttgactcccacactnnttctttgatgg

SEQ ID NO: 6486 - DNA, 412 bp, Macaca Fascicularis
ctgaatagcagctagacctggacctgctgttcattcattcattcattctttctttctttcactcactcattccttcattcactcattcattcattcagtagctatgaagcaactgctccctgccagacaccacactagttactgagggtgcagcggctacagcttcaccatcgtcctgtcgtctgagattcgagtcttcatcatggcaggaccccatcgtcatcttcatcatcacggggcacacccctggggacagaagtgttgtatattgttgccagtagatgtcttccccagacccaggttcccacaggttcgtggtctgggcaagcctcaattgcgagtttcagccctcattgtgactccacctaagatccatgagaggggacagtcaaatggccttcgtaggacaccg

SEQ ID NO: 6487 - DNA, 205 bp, Macaca Fascicularis
gcaccttatgacatctgcagaggtcgtggggtttataccttttcaccttattgcatacctaaaattccaaatctcactttcaccctttgttccttggtttcaccagctgagccacactggccatgcagcagagggcagaaggtttgcaaatgggccaaaggtcctaaggtccattggacagttgcgaagacacctgatcaccatt

SEQ ID NO: 6488 - DNA, 721 bp, Macaca Fascicularis
  misc_feature (1)...(721): n = A,T,C or G
gtatagacagggtttcaccatgttggccaggatggtctcaatctcctgacctcgtgatctacccacctcagcctcccaaagtnnnnnnnnnnnnnnngtgagccaccattcccagctaacttgtttttcttaaaagaaccttcagtaaatatttggtttctgtggcctcagctataattcagattacaattttcaaagcagtgtttcctgaagttgtttgtgcgaaattgttttccatgacttgaacctagctgttctgaagctaatatataataataatggcttatccccaatttataatagaaaacagtacaaagtaacagactattagatgggggatggaaggagaaggacaagggctgaaaaagtaactattgcatannnnnnnnnnnnnnnnnnnnnnnnnnnnnnnnnnnnnnnnnnnnnnnnnnnnnnnnnnnnnnnnnnnnnnnnnnnnnnnnnnnnnncccactaaatctaaaatagatgttgaaaaaaaagttcttccatatcaacaataataaaattgnnnnnnnnnnnnnnnnnnnnnaattgagacactacaaagtatcttgcagttaagctacaaaaaaaaaatcctaaaaccatctctatagaaaattttaggtattgatcttaaaggaaatccaaataagtggagaattatcatgttaatggatgtgataacaatattaaattacattatttttccaatctagta

SEQ ID NO: 6489 - DNA, 688 bp, Macaca Fascicularis
gcacaagcagattccctggagggctatgtaaggccacataggtgggcgggtgggagactttggtggggggcactgggccaggcggccagcattgccctgggcagaagccaaggctaaggtggagggtagtgtcccagcccctcttcctcagggcctgtccccacctatgcagaagaggcctggggtggaatgtggcctggggtgaatgggtgagggctgggcatggagatctgccagctccatctgtcccgatgcctcttgtggccccccagtgtcaaggccgctctgagttggctgagcctctgtccagggctgggccatggccctcccctccccacgcacaccaggccaggggcaagcagtgaagagacaggaaggcccagaaagctctacccctggccacagtgccagcccccgcaggcaagagggcttgctgggcagaactgttggcaagggtgaggactgctgtggttacaggcctcctgaaggacagggaccacagaacccagagggtggagagagctgggagcaggtctggagtggggctgggggctgaggatgcacacagggcgtgctcagggacaggaaggacagctgctcagcctcaagcttcctgctggctatttaaagactcccttttggtctagaacagaggccttcccacggctttggtattaaaatgtccttt

SEQ ID NO: 6490 - DNA, 1717 bp, Macaca Fascicularis
  misc_feature (1)...(1717): n = A,T,C or G
tccaagatgtattatttactagatttaaagtgtttctaagaattagtatagtaattaagtaatggtagaaatgaatctgggatacattaaatattatgggaaagaagttcattgcaatgaagtgaaattgcttgtaccattaattaacctgctactttaatatcttcactgtggttttgtaactttataagagttagcttgctttaggcctggcacggtgtgcagagaggcccagccagcccctgtttcttccagctattccagctgaggcatcagatgtgtgggtgaagaaaccatcttggacattcagtcttatctgatggcaaccacatgagggatcaaagtggggaccacccagctgagccccgtccaccacagaaccaggatagataataaattgctgttttaagatactaagtgttaggatggtttgttgtgcagcaatggataactggaatatagggtgattttgtttcttcattttcttgtaaggcttgttgagttaattcgtatagaattttatgagatagctaggacaaagtcaccgctctgtatcaggagcaatttcagttgattttctatttcttgccttgtttctaacaagtacatttccaaggggcccggggaagaaaatgactggtgaatcaaataccataatagaaagttaggggaggaaaaacattttctactttcggctttatttttgtcactctcataaatgattgctctggaaaaaaaattacacaagttatattagtttttcaaaggacagacttgaaatttggggggaatttattgaaactctctttatggtttaatttatggccaagtagaactatcctattaattctcttttttattaaagtgaattttatttatttatttagagatagggtttctctctgtcatctaggctggagtgcagtggctcagtcactgctcaccgcagccgccgccttctgagctcaagcggtcctcccacttcagcctcccaagtagctggggccacaggtgcaccatgcccagctaatttttttatttttttgtagagacagggtcatgagttcagcttaagttccagaagaagagaatagctataggtggacaacagcaatccctgccagagtgcgactggatggggcaggagactacattaaccacggtggtcaaagaaagcctcttttgtaagaaagtgatagtggaaggaaccaaatggtaaagaatactaaatttcaattctggcttgtgaccctcagccaggcactttcacatagtcacagcctatctgcctgtatgcggcagggaggtaatttactgtgtctgcactaccttagagtagattaagaacagggtaaatgggacaagatcttcccccagagaagctgtgaaattgagatggaagttttcatctcctttgtcaagagtttttagggttttaaaaaacccatttgaaggatattataagaaatcgaggccaggcgcagcggccaggcgcaggcgtgttacnnnnnnnnnnnnnnnnnnnnnnnnnnnnnnnnnnnnnnnnnnnnnnnnnnnnnnnnnnnnnnnnnnnnnnnnnnnnnnnnnnnnnnnnnnnnnnnnnnnnnnnnnnnnnnnnnnnnnnnnnnnnnnnnnnnnnnnnnnnnnnnnnnnnnnnnnnnnnnnnnnnnnnnnnnnnnnnnnnnnnnnnncaaaaaaaaaaaaaaaaaaaaaaaaa

SEQ ID NO: 6491 - DNA, 635 bp, Macaca Fascicularis
  misc_feature (1)...(635): n = A,T,C or G
gtggtgtgnnnnnnnnnnnnnnnnnnnnnnnnnnnnnnnnnnnnnnnnnnnnnnnnnnnnnnnnnnnnnnnnnnnnnnnnnnnnnnnnnnnnnnnnnnnnnnnnnnnnnnnnnnnnnnnnnnnnnnnnnnnnnnnnnnnnnnnnnnnnnnnnnnnnnnnnnnnnnnnnnnctgacctcgtgatccgcccgcctcggcctcccaaagtgntgggattacaggcatgagccaccacacctggccctaaattttaatttttttgtagagatgtgatcttgctttgttgcctaggctggtcttgagctcctgggctcaagtgatctgccacgttggccccccaaagttccggaattacagatgtgagccactgcacctggcctccagttttcttttatgtccctccccagtcttcctttggccttcagctgtggggacagagatgccccctgcctcctggtccccaccttctacctggtcttgcaagaccccctccaggcatccttccaagtttactatgtaatgtctgttccccatcaagcctgcaaagctcatgacagtcacaagatctgcccttcctgaggacattatgtactgaggacattgcttggcacataaggggcccttgtgcaaaacatc

SEQ ID NO: 6492 - DNA, 1789 bp, Macaca Fascicularis
  misc_feature (1)...(1789): n = A,T,C or G
tatttattgagacagagtcttgctctgttgccactgcattccagcctgggcaatagagtgagactctgcctcattaaaaaacctcttctagattctctattccttctattggccaatgctatccaagttcctttgaagtagtgccctgcctctcactaaatctacagaaaatgtatgaagaataggtttttctcttaacccccaagtgttcctcataaaacccaggggtggcaagaaaatacaggagcacatggcatgttttgggagagtcacacatgatggactttagtcgataggatggatggcgcttcaaattttccaggacaaagacctgtggtggtctctggagaaaccccaagccaatggttcttcaaggtttcaagatcagtgctattcagaactatcaaaatccagccacaggacaggggaagannnnnnnnnnnnnnnnnnnnnnnnnnnnnnnnnnnnnnnnnnnnnnnnnnnnnnnnnnnnnnnnnnnnnnnnnnnnnnnnnnnnnnnnnnnnnnnnnnnnnnnnnnnnnnnnnnnnnnnnnnnnnnnnnnnnnnnnnnnnnnnnnnnnnnnncagctactcaggaggctgaggcaagagaatcgcttaaacccgggaggcggaagttgcagtgagctgagattgcaccactacactccagcctgggagacagagcaagactctgtcaaaaaacaaaaacaaaaacccagccacacaccccagcacttttacaaaagggaaaaaagggatgcattcaagatagtacaatgacattgctatgttttctctgagccagagagcagagaaacatattgtggctaaggtggctctctttctgatcaaggtttctgtggatgggcagtgtccacacacgaattctgcctaaagactctgtgggagccaggctgcgagctgattgcagcagcagaaggcagcacgtaggagatgacattttagaattgttcagacagaccccaggcctagaagatacgccagacacagtgttaggagagcaagaacaaagcgacaccagaaacaattgtttaaaaatttaaaagaccatttccctttatcaactccgcagctggttgccattccagtaaatttctaaaacatgaaactggccccagcagggcagagaagtgaatgggatagggcaggccagtgacatttacaatatccaggtgcgatatccagctttcctggaagctgaaaaatgaattgttttctgggagagaaacagaaataacattactggttggtcaggacctcggggaagcctcttgtttctggatacctaatctttataaaagaatagggttcctgtgtgcattttaaaactctgggctgggagccgtggctcccttctgtaatcgcagcactgtgagaggccaaggcaggaggacagcttgagactggagtttgagaccagcctgcgcaacatagtgacatcccaattccacagaaaggaaaaatagaggctgggcatggtggctcacacctgtaatcccagcactttggaaggtcaaggtgagcggatcacaaggtcaggatattgattccggnnnnnnnnnnnnnnnnnnnnnnnnnnnnnnnnnnnnnnnnnnnnnnnnnnnnnnnnnnnnnnnnnnnnnnnnnnnnnnnnnnnnnnnnnnnnnnnnnnnnnnnnnnnnnnnnnnnnnnnnnnnnnnnnnnnnnnnnnnnnnnnnnnnnnnnnnnnnnnnnnnnnnnnnnnnnnnnnnnnnnnnnnnnnnnnnaaaaaaaaaaaaaaaaaaaaa

SEQ ID NO: 6493 - DNA, 2426 bp, Macaca Fascicularis
gaaaagatagtatgtatcatttgcatgaagaaagaaatgatgctaaacgttttatattcacattataattatacaaaagtgatttgccccagattttgaaatactcctacataacatatgattataattcagacttagaatttttgcattaagtccagcagtctttttaatgtctgagaaaatactcacctcaaaatgtaacaaggaatctgagttggtttccttttgatgtttccaagacattagaaaatattcaaatgccttatccctgacataataaaatattattttatgaaaggaaggctgtagctgtgtaaagtcatgatttatttaacatcaggtaatttgtgaagttaggacactaatggaagcaatgtgaggaaacaaccaaggctttttcaccgtagagttgagtgcaacacaatgtccaaaaattagtttttcaaaaatcaatcatgcttttaatttttaatttaaaagtatataaaacagtgtgcacttagtgactttatgatttctagtaacagaggaatttgaatagcgaagtagtcattgaatatttttaaaggtagaaggcatcagctattaaggaatcaaagcatttttagtgagtacgataaatacccaaaaacaaatacttccatttaaaacaaattactgttgttgactcaatcaacaaatctatatactgaagaaaagagaaaaatatatgtatattatcattttcactggtttttcaaatattgcctttaaaaaggagacctgagtttgcagaatttgccctgcccctggaaaagcactacatcaggggggaaacttccccaagtgtagtttattaacatagaagagagaaattaattaattatgtttgttgatttggggttacctttaaatatttatttatttaaccaatccactggaaggtttaaagtcggattaagtgaggtgagaggtcatggcgaaattccacagctgcgtttgtggagaaggatccctcctcctatagcctgagccctggaaagtgaactgttgctgtgttgttcactcactgggtcagatcgaagcacggctcaatagcattaaactagcccccgtttgagagatttgtcttacaaaaccctgaaaactgctctgaacatgcatacattgattttgttgctggaatctcctgagctttgatgaaaaggcagcctccacatgcaggtgaaaggggtttacctcttcaatattaaaaagagaagattaaggatttctgttctactaaggctgaactaatcagtggcatacaggggtaagaaagtagtcctcatgcctaacgctgcctgattttctgtggttgcacaagaagttaaaaatccctcatgtgaccttctatgtgctgtagcttactgttattccattttgaacagttaatcaaatggcatatggtgcatgaccaaatttgtttccacattttccagaagtgacattcaccctagcaagatggaaataaacgccctgtttgataagagaaaacagacaatttatgtccaccctgaagagttaccagctagtgagccattcctatgggtcaagtgctgcatttgcattttgatgggatgttatcaagtaattaatgcaccagtcaggatttattacctcaggagcgaactgaaaggttcattacaaaatcggtttcacttgaagataggcatttcctcagagttagcttttgacatgttgttcctcgctctctctgcccgtggcagccatggtagaaggccagtgaggtgaaattcattgcttaataagggcattcactttgggtattcttgtgataataaatgtatacatcaaggccgcactgccttgtcagtttaattgcttcttgtgctccttaacaagccaatcttaatcagtctggaccacgttatgaataatttagggatcagcagacttcacgcttaataagatgtactagattataaaacttaagtgcactgtttatagaaagcatgcaaaacactttaagtttttattagcagcaaggaaaaaacaagcagtgagttattctaacatttgcagtttgcgagcaacagctgtgtttcttaatgctgtaaccccctccacttttgttgaaggccacagttcggcctctcgagccttctaagccttggtgagacataatgggaaatttgagcaggctatgagattaaagctcagaatcgatggccaaccagcaattgtcattttagaaaacattcttttatctttttaaatgcaaagcagaccttatttgaaagcagtttccgatggtcaaaattaccttttagttgttgttgttctgtagtacacgtgaatttttaatttaattgactggagagaatggacattgagccttctaacttttctttaataaaaaaaaaaaaaaaaaaaaaaaaaaaaaa

SEQ ID NO: 6494 - DNA, 732 bp, Macaca Fascicularis
  misc_feature (1)...(732): n = A,T,C or G
actgcggccagaggagggcgtgtgggcttgngggctggnnngggnnntcgnnncgnnnctgggctcctttcccacacggctgacnnnnnnnnnnnngccccagcaggtgcgggtgtctcttgactatgaggtgggctgggtgaccttcaccannnnnnnnnnnnnnnagcccatctacaccttcactgcctccttcactaggaaggtcattcccttctttggnnnnnnnnnnnnnnggtccagtttctccctgagctcctgagaaggagcagttacctaccctcctctaagtacaggactcaaatcaacccaagaaccacgtggacttgatccctggctgagttacctggacgacttggaatagaaatgactgctttagaagatgggatggggccggttggtaagggatagaggagaggacactcaatctactgatcaagccctttcttcaatgcccagtggatggccagggtacctgggtactcaggctgcttccagctctcctcaccaccatccttgctaggcacagaagtagctgcatagacagagcnnnnnnnnnnnnnnnagaagacctgggttcttgaagaagccttataaccagttgtatgactttaaacaagatatctcacctcttttcatcttgttttcttccaataatgttagagttcatgtaatcacattctctagaaccatttattttgtgttaactatgaaccaagcaatgtggtagct

SEQ ID NO: 6495 - DNA, 2624 bp, Macaca Fascicularis
  misc_feature (1)...(2624): n = A,T,C or G
gatgatgtggccttatatttttccggacaagagtgggagatcctggagaagtggcagaagcaaatgtataagcaagagatgaagaccaattaccagacccttgattccctggggtatgctttttccaagccagatttgatcacatggatggaacaagggagaatgctattcatcagcgaacagggatgcttagataaaacaagaaggacaactagccctcctactgatgaacagttggacatgaaggatactggaaagttgccatgttttgatcacgaaggaactctcaggacaaaagaagaggattgccgtttaaatggtcctcaaaaacaggacttgggtgctgccttaccagggaaggagagaaagattttatcagctcgaagagacaccttccagtctccaagtctccaagaaacagagattccaaataaaaaagtcagcatcacagcatctgatccagacaagaaagacctgcggcacaagcctcgggagaccccagggcgcttagaaattcccacagggccaagatgctactcctgctatgtctgtaggaaagtcttccaagtaaggagggatttgctaaagcacaaacggagccactccaagagccagctccgcagatatcctaagtacagaaacacgtccagagggaagtccgaactcaggcggacgcagaggctcctgtgtcagaagaagcggttccagtgcagtgagtgtgagaagagctacttcctgaagggcagcctcgtcactcatcaggttgtccacaccggccagcggccctacccgtgccctgagtgcgacaagaccttccggtacagggccaacctgaagaagcacctgtgtctgcaccgcggggagcggccgttctgctgcggggagtgcggccgggccttcgtgcagcagtgcgagctcacggagcacctgcggctgcacagcggagagaagcccttccagtgtccgcagtgtgaccggtgcttccgcctgaagaggggcatgaaggtccatctgtcccaacacagcgggaagaggcccttccactgtcccgagtgtggccggagcttctcccggaaggctgccctgaagacccaccagaggacgcacagcgaggaaaagccgttttcttgtgatgaatgcggcaggaaattcatctacaagattaagctggacgagcacatcagagttcacacgggagagaagcccttttcgtgtcccgagtgtaacaaaagtttccgcctcaagagaagcctgaaagcccacgggctgcagcacagcgggaagaggcctttccagtgcccggagtgcagcaggggcttcttctggaggaacgccatgcgcgcccaccagcgcctgcacagcgagcagaagcccttcccctgcgccgagtgcggcaagcgcttcacgcggccctccaagctcgcctgccacaccagagtccacgacaggcagaaggagtttccctgtggtgagtgcaaaaagaccttttctcagcagtcgcggctcacgcagcacctgaaggtccacaacacggaaaagccgttctcctgcgccgagtgcggccgcagtttccgccggcgcgcgcatctcacagagcacacgaggcttcatagcggcgaggagcccttccagtgtcccgagtgcgacaagagcttctcctggaaggcctccatgaagttccaccagcggatgcacagggacgagaagcccttcgcgtgcagtgagtgcggcaagacctacacgcatcagtctcagctcaccgagcacctgaggctgcacagcggcgagaagccctaccagtgtcctgaatgccagaagactttccgcctcaagggaaatctgaaaagccacctgctgcagcacagtggtcaaaagccgttctcttgtgtgatgtgtggcaaaagtttcactcaacagtaccggctcacagaacacattcgagtccacagcggggagaagcccttccagtgtccggagtgtgacaagagctactgcatcaggggcagcttgaaggtccacttgtatacgcacagtggagagaggcccttccagtgtcctgagtgtggcaaaggcttcctccagaagagaagcctgaaggcccatctgtgccttcacagtggggagaggcctttttcttgtgatgagtgtggaaggagcttcacgtacgtgggggcgctcaagacccacattgcggtgcatgccaaggagaagccctccagcctctaggtcaggccatgcggtagtcaggcaaccacagctttcaggtggtgccagcagctctgttggcttgagttgaggcaggttgaaggattcacagggtaagatggggcacannnnnnnnnnnnnnnnnnnnnnnnnnnnnnnnnnnnnnnnnnnnnnnnnnnnnnnnnnnnnnnnnnnnnnnnnnnnnnnnnnnnnnnnnnnnnnnnnnnnnnnnnnnnnnnnnnnnnnnnnnnnnnnnnnnnnnnnnnnnnnnnnnnnnnnnnnnnnnnnnnnnnnnnnnnnnnnnnnnnnnnnnnnnnnnnnnnnnnnnnngtagaggctgcagtgagccatgctcacaccactgcactgtagcctgggtgacacagcaagaccttgtctcacaaaaaaaaaaaaaaaaa

SEQ ID NO: 6496 - DNA, 1933 bp, Macaca Fascicularis
gagctcttaaatccacttttgtaatccatcaaactaaatgtaaacccctcagatggtgacatccaacaactacttactgtctttagcaagtttatacttttaacatatgcaattaatattatatacacctattagcattccaaggtgattattagatttcacaggtgaggattgttcagtttctcagtcttttctgtggagtttaaaaaatctctttggcagaaattcctaatgtgatagcagctagaagagtaattttcggtggaatgaccttttcaatgggtaatttgacagactcttgatggacagcattcttccatctctcagcccaccttttacgtcctgccataaaatgctggagcaaagttttacctcagctgataagattctcaatagtcatgtgttgcatatctccctcagagcagttcctcaaattttgaaagctctctttctttttgaggtatttttcattaccaggagaaaatgtttcctttcgggagatattctaaaacaatagcacaggtactgaacaaatttcccaggtgtctaagggactctctcgggtggctgtatagtattggtttggtgtattaaatggcactctcatgtactataagagttaacaaaacttccacaggtgcctttcctcagaataagagaacagatttgactttggaaaaaaaaatgtggactatgaagtacccagttaaaataccctacaagaaaaaaatgaaagcacttactggtaaaatgaagacaatgaacttgcaaataaatgtgtttttaagatgtggccctggggtgacatgcaaattcaaaagactaatattttctctgggaataaaacctttttggaagatattttctctcgaattctgaaagtattgccagaatagaatgcttgttgattgataaaatatatgctttcatgaagaatatttctgatggtattacctttgtcaaagaaaagattctgtagttttgggagataaattataaagatgatacatacttatttgtgtatatgtttgtcttctctttctggaaggtgtgttgatgaactcagatcatcatctcttttgtccactgttgcatctgtagtccctggcacaatgcctggtgcgtagtggtcagtcaataattatttgctgaatgaatgcgtaaacaaattgaattaacaaattaaactcaagattttcatcttcttcagaatttttcttttttcagtgttccaagactaaggacttttcattgtcttttcgagttgggatcttaatcttatttactgcttttcatacaacaaacgtgttaaacatgtatcagaaaaaattgggaacagtatctgtgattctcatatagggaggtgatttcattccattagcttttgggggggacttcatgggtttgtcactctgttaatccagctggcaagcagaatccaaaaggtgacatttagaatgctggaagggagaggtattgtggaggtggaaatgaaaaatagagttcagggaaagaggtagttagatgaaaatatggcaaaagagagagaaacacgtagagtccagtgggggtcatcacattgcaggaggaggatgagggcatgaagggggtccttggagaagttctggagagaaaaaagctgagacaagaaggagatgaagttatggtcaagccagagaagacattggattagcactgcatgcatgataaaccagccatgctactagtataattttgacattttggaaatattgaaatcccacatgaagagtaaatggtgtctcttttttctcaggaaatgaatttgctcaaaacaattgaactcatggacatagagagtagaagaatggttaccaaaggctgggaaggtggtggggggcttgtagggggcaggtggggatggttaatggttaaaaaaaaaaaaaaaaaaaaa

SEQ ID NO: 6497 - DNA, 752 bp, Macaca Fascicularis
  misc_feature (1)...(752): n = A,T,C or G
gtgcctccctctgtcaagactccgacacctgaaccagctgaggtggagactcgcaaggtggtnnnnnnnnnnnnnnncattgagtcggtggaggagggagtcaaacaccatctgacgcttctgctgaannnnnnnnnnnnnnnnnnnnnnnannnnnnnnntgacctgatgccaaatgagaacatccccgagttggnnnnnnnnnnggtgnnnnnnnnnnnnnnnnnnnnggctgaccaaagcaggctgacttctctgctagaagagaccttgaacaagttcaattttgccaggaacagtaccnnnnnnnnnnnnnnnnnnnccgtctcctcttagagctcactcgagccaggccctgatctgcgctgtggctgtccctggacgtgctgcagccctcctatcccttccccccagtcagtattaccctgtgaagccccttccttcctttattattcaggagggctgggggggctccctggttctgagcatcatcctccccctcccctttcttcctcccctctgcactttgtttacttgttttgcacagacgtgggcctgggccttctcagcagccgccttctagttgggggctagtcgctgatctgccggctcccgcccagcctgtgtggaaaggaggcccacgggcactaggggagccgaattctacaatcccgctggggcggccggggcgggagagaaaggtggtgctgcagtggtggccctggggggccattcgattcgcctcagtgctg

SEQ ID NO: 6498 - DNA, 739 bp, Macaca Fascicularis
  misc_feature (1)...(739): n = A,T,C or G
acatactgtaaaaaaggtagccaatnnnnnnncantttgaaattgataccattttctactcannnnnnnnnnnnnnnnnnttcatctnnnnnnnnnnnngaagttgtctttgacatttaccatgaaaaaactacataaannnnnnnnnngatgaggttacagacacannnnnnnnnnnnnnnnnnnnnnnnnnnnnnnnnnnnnnnnnnnnnnnnnnnnnnnnnnnnnnnnnnnnnnnnnnnnnnnnnnnnnntagttgacttttccaaatttataaaggaagaaggcaaatgttaatttgccaacaactaatatcctttttctaaatcagatcattccttttttgttagtggcagtttatcctgtaatttcaaatgacgttaagaggtgggattatttggggctttttctttttgtttacagaagatctcatttgctgaatgatttaagagtaaaattagccactgcgtggctttgtgtatagtaaccggttttgttgcacttgtctgtggctgaaacacttacctgcagtggaaagccgagcaaggaggaggtaaacattggagatgtttgtgaaactattactcttaccatgaggttttagtttgttttgaatgagaaaannnnnnnnnnnnnnnnnnnnnnnnnnnnnnnnnnttaataaataaaaaaggaacctaatatttgaaatgggtctcagacatgtctacaaatatgggtactatttttatgcccttgt

SEQ ID NO: 6499 - DNA, 729 bp, Macaca Fascicularis
  misc_feature (1)...(729): n = A,T,C or G
agctcactgtagcctccatctcccgggttcaagagattctcttgcctcagcctcccaagtagctgggattacacgtgtgtgnnnnnnnnnnnnnnnnatttttgtatttttagtagagacaggtcttcaccacgctagccagactggtcccgaactcccgacctcaagctatccacccgcctcggcctcccaaagcgctgggatcacaggcgtgagccgcagtgcatggctgagagtttcaaataatgtttaagctgaatagcattgtttgaggtggtagatttagaaacaatgttgatgtttatcactggggagtggatagnnnnnnnnnnnnnnnnnnnnnnnatgaagtaccaggcagcacctggaccaaatgttcacacagagcaacacgtatggatcttaaaaacactgggatggttgaaaaagaaagagaatgagaaataaagtgtataacacaataacccctacgtacattttacatacaacacatacaacaaaaaatattttgcaaatatatatacaaacaaggaaatacctattagaaacattagaaggttttcctgtggggcattagtgcagaataagagtaggaaaggggannnnnnnnnnnnnnnnnnnnnnnnnnnnnnnnnnnnnaaagcacatatactaacactttattggaggaaggtacaatcccaggacagcaaaagtgagannnnnngggaggtgnnncaggaaaggtgg

SEQ ID NO: 6500 - DNA, 764 bp, Macaca Fascicularis
  misc_feature (1)...(764): n = A,T,C or G
acagtagagcannnnnnnnnnnnnnnaaatgtagatgttctgttgactcaaagctgtgtnnnnnnnnnnnnnnnaagttccctcgccattcccagtgtggtcgtctgagtccttgggggaccgcagggtaaactgaaaggtagcctnnnnnnnnnnnnnnnnnnnnnnnnnnnnnnnnnnnnnnnnnnnnnnnattgatgctctgattttgtgcatgtttcttaacctcctgattccacttatttaatttgaacaatagaaactgtggtatctgcctccagagaagttgtgagggtcagagacttgcttggtttgatggcttagcattgagaagattttggggctggggtatgtgttaagcactcaaatgttggtttgaaggagttcttgactttgaatcattcaggcagtctctaatatcaatgtctaaattgattgcattttcttcccagtcttctcacaagactttcaggattaagcgattcctggccaagaaacaaaagcaaaatcgtcccattccccagtggattcggatgaaaactggaaataaaataaggtacaactccaaaaggagacactggagaagaaccaagctgggtctataaggaattgcacatgannnnnnnnnnnnnnnnnnnnnnnnnnnnnnnnnnnnnnnnnnnnnnnnnnnnnnnnnnnnnnnnnnnnnnnnnnnnnnnnnnnnnnnntattttcctctctgaatctattatgaatgcgttggttggctgggttcagtaataaat

SEQ ID NO: 6501 - DNA, 740 bp, Macaca Fascicularis
ggggggaaggtggtcagtgagcagttcagggagcagtatggaaacagaggaatgtcccaagtgataggatggcctgacttggcgcttgagtcagatttgtcagcattgccacttcctgggttttacaccttgacaaatttttttcacttatttcaagcttagtttttttattaactgtcaattgcattttagcagtagagcttcaaaggtaagaaaatgtttaagaggtggatttcagaaaagacattaaatatatagtcaaatattcacttgttaaaaattctgatttacctttttcttcactagagtgagtgtagtgagtttgtcaggcctgtccttttttagggggtgattttaaacagaatcccaggacttacctgtgggaatgctaccagggaaagtaatagggaaaatcctcttccagtatggctataggaaatgaatacatttccacaaaaaaatagtagattaatttgtgaattacattgattcgtcaaaatatgagttcctcttttttgcagggtggaggacttgtggagttggtatctctgttatctagatgtctgagtttaatactgaattttagaagataggacttggcatctcctagatatgctcatatgtgattgtttactgaataatttgaattattgaaataatgtgacatgtttattgtctgaaactgatagttttgctttttctattgaggtatacaatgtaagtgccttttaattttatct

SEQ ID NO: 6502 - DNA, 2161 bp, Macaca Fascicularis
atcctgagcgcgcctccgccgaggcgagcggacatgcaggctccccgcgcagccctggtcttcgccctggtgatcgcgctcgttccggtcggccggggtaagccgtctccacttcccactcctgggaaggaggatcgcaaaagctggtagggtgcccgaggctacagaactctgccggggagggtgacacccggaaaatctaatcctttctgtgaaagaagtggagaaaattagaactcccgtttttggggggtgggatggagggaggacttcgctttcgctgcagctgtctaatctggctccagctctctcacttcatttacccctctttcagtctttgtcttctaggatgtgtgcgtccctgtaatttactagccttaatgagcatattaagaaaaccataaactttttggcagtttatgtaaaaaaaaaagaaaagcttcaaactgctgaaacagagacatgattaatttgcttttaatagtgtgggctgagaagtctgctggttccaaaatctcctggaaaaactggggtgtgaaaattgactactagaaagcatactaaagaaacgacataaacttaaaaaaaaaaaaaaaaggaaacgggaaattatccaaagagctaccaaagagctatgtgttagggtaccccctctaacacatcaagtaaggtctttcatctacttttattgctccttgttacttttacagatttttttttttttttttttgcattgactgttactaatgaagatttgtttgaaaaagtagtatgattggagccaatcaaaggtattgggaaaaacaaaatattgaatctcattattatgggctaaaagcaacaactgagacttgccagtttctgcaacaagcacaagcaccctcagttgcctctcttgttgtctcgcccttgggcaaatacactcgctgctcattgtttctgtcaatgacactggctgcttttagtgtagggcagtatttcaagcaaaaggaaagttctcaagctacagttctttagatagaatgaaggacatcaaccacgacctaacagatgtgacaacttcctggaggtcagcagccagcagccagccaccccaccccatcaatttctctccaggcatctgagtagaaaacgaagtggaaggcaaaccattccagctgaaaagatgtctggttgaaattgaatttagtgttcagagtgggtttggaagttgatgtgttgttttaggcccagtgttttggagctggaatgaacttgaaggtgatgcagctcaaaccatattaggcatacaggtgaagaaacggaggtggaaaaagggagatgtctgggtcttctactagtcagctctactggcttctactccagggtttttgagctcctccatgcccccccggcccccccagggaaccaatcactgtctctgccaagagttctggaaactttcctagtaggacatcaggggagcaaagcctagccatcctccttccacctcttctattgtgcaacactgccacaggtgcctcaaacactcccttaataataattcatcttgcctgaactttttcttagcttctaaaaaatgattgcatcctagtgtctgcaattcaggagatgcaaaaggagaatccgaagagactcggttaaagttccctttctgacacctgaatctgatcatgcacatcttccccttcaggacccctcacttatgccccttcacttgttcctcatttttgccccttagactctcactgcaacctccctcccagtggcacctccttccgggtgtcttcccactccatggctcttgcctatgatgaatacattctttttcctacctagcgaattcttatatcaccttaaaggataaaactaaatgtgatctcctccttgatgtctcctttctctgccccttccctgcagttctacttgtacctgctgctgggcccccatagacctaaacttctgctaatcactttgaaccataattgtgtccatgcctcccaactggctgtgaacaactccagggaaaatcctctgtagttcgtctttgactttccaaaatcctgtaagggctcagcataaattagaaaataattgttgataaatatgaaaatcatccctagaatggatatgaggctgattacaaaaaaaaaaaaaaaaa

SEQ ID NO: 6503 - DNA, 2267 bp, Macaca Fascicularis
atgacatctctctcggattagagtggagagaagttctccacttttaggggccaatgtggttagattgcgatcaccaaaattatctagaataatctctctttatcaaggctcttaaattaattatatttgcaaagccttttttgccatataaattaacatatcaacagtttctgttattaggaggtgaacatttttgcagaatgatcattgtgcctaccacaatctataatgagtaaagagattaaaattgaaaagtataaacctctcacaaaataaatttctggctcagatcccttacttcataaattataacaaatatttaagaaaaaattaatactgattctcccaaacaattttttaaaaatagaatacaatatattacatcccaacacgttctgtgtattgctggcatgtcaaaactagactgcaatatcatgcataagtaaaactataaagcattccatggtgtatatgtgccacattttcttaatccagtctatcattgatggacatttggtttggttccaagtctttgctattgtgaatagtgccacaataaacataagtgtgcatgtgtctttatagcagcatgattataatcctttggatatgtacccagtaatgtgatgatatgtaataaacctgcacattgtgcacatgtaccctagaatttaaagtatgattaaaaaataaagaaaaataaaaaaggaaaaaaaactataaagcaatatctttaatgaatatagacaaaaaattcacttaatactagcagactaaatccatcaacatataaaaagtactatacactatgatcaagtgtgattcatctcagaaatctaatgatggtttaacaactgaataaagaacacaaagcacatgaccaccttaacagacgaagcaaaaagcatttgacaaaatctaacactctttaacgataaaaatattcaacaaataggaacagagagaactttctcacactgaagaaggacaacaatggaaaactaagagaatcatcttacttaaaggtgaaagactaaatgttttcccctaagataaggaaagaaacaaggacgttttctctcaccattcccatttgacttgtgctcaaggttccagacaaggtagttaggcaaggaaaacataaagtcttggaataagaaattttaaattatctctatggaagatgacataattttgcatatggaaatttctaaggaactcattccctaattaaattattttctgtagtagtaatttagtagtaattattactaaaagtgataagaccatcaaggttgcagagtctaagattgacatccacaattcaattgtattactatattttagtgattcacaaaccaaaaattaaaccaagtgattaattacatttacaataacaccccaaaagacaaaatactaaagaataagtttaacaaaataagtgaaagacttagacactgggaactacagaacattatttttaaaaatcaaagaaaatataaataaatgggaacaaatcttatgttcagggattaggagatttaatatcattaagatggaaatatatctcttgattgatctgtgatttcagtgcaatccctatcatgatcaaaatgctttttttgttcttgcagaaatcggcaagccaattctaaaagtcattctgaaattcaagggcccagaatttccaaaacaaccttagaaaaagaataacacatttaaaggacttaacattttccaattctgtaacttactacaaaacagcagtaatcaagagtgtgatcttgatataggatagatatagaattcagagttcaaaaataagcctcttgactgattttcaacaagagtactgcaagatttcaatgggagtaaatctttcaagaagtgatatggagacaagtggataaatacatacccaatagtaaagttgaaactgttccttacgcgatggataaaaattaattccagatggataatgacctgaacttaagaaataaaaccataaaactcttagaagaaaacacagaagtaatcattgtgattttggattatgtgattaattattaaatacaacaaaaagcacaaacaacaaaagaaaaatagataattcaactacatcaaaattaaaaattttgtgtttggtaaaacatcaagaaagtagaaaggaaatcaacagaaaattatacatatagtaagagacttgtttcctaagtatgtgaaaaagaactcttaaaacccaaaactaaaaaaaaaaaaaaaaaaaa

SEQ ID NO: 6504 - DNA, 807 bp, Macaca Fascicularis
  misc_feature (1)...(807): n = A,T,C or G
canggggncangnnncannnntgcagtggaggggcataaagttcagttcatgatcagcnnnnnngccaggggcagaggatgagagggcaggagctccatctagaggagctcccatgttcaggtgttcctagacacctgcctgcccttctccaatcagcactggggtataaagaaggaaagaggcctgagagttccagaggcctctacctgctggggtcttcagaggactcaaccctctgggaaatacaaatacaatcctcagccctccaaacaactgaatggacacctcttggccaaagagaccccggagaaactttaaaatctaagtttcctggccatgatgataagtcactcatacctcagtacacctgcttcctcatgaaccgttaccaggcttctttcccaagacctaaatagaaaccagccttggaaaaccaagaacaggagactccttcactgatttcaacttcaaccaactgccagactcctttccctttcccgattttgacatgacagctgatcaacttacaaaacattccttgctgatcaatgactctccaccatggaccagttctggctggtttacagaggcagcacacaaagttctttgggtcctgtgtttcaccttttgacatatagagcctaattcgaccacattttaatgtctccaccccgaagagaatatgggacatatttaacatgttttttggtacacatgtgtgcaactctcatgaatattcagaaatcatcttaaaacttattaaatatgtatgtttagccaactcatttagtgtaaaacccctgtcc

SEQ ID NO: 6505 - DNA, 519 bp, Macaca Fascicularis
  misc_feature (1)...(519): n = A,T,C or G
cccccgcccccccccccagtctcggagatctcagaagcaccgactgggaggcagaagatccagggaaggagaaccttgactgaggaacccgggagggccctggagttggggaagtttgccccctggactggggatttaacataaaatcaacagtaaaccttattgtgggatttgatgctacttccaccaagcaagagtgaaagaggaagaattggagagacaaggtcctagagagtggtctgtttctgcctcttgtcccgtccttctgtcccaggaacctggattgcagagactgtggtactggggaccatggggtctctttgggagannnntttttgcttgtggaccacgtgactctctttcacattaatagaaatagcaaacagttgcataggacttactgtgtgctaggcatttttgtggggccaccagctgggctgagccttcctgtccccactgaaatgagattccccccagactcccaccctgaacttgccctgcctctgcttcctccccact

SEQ ID NO: 6506 - DNA, 667 bp, Macaca Fascicularis
  misc_feature (1)...(667): n = A,T,C or G
caaggtttagccaagacactgccacctccacatagctctcctcgccctctttccccctctgggcctcagtagccttctctgctccctctcagggtactgagcactttctgccttgtccttgagctatctgggtccatagcctgaccccccactcacctgtgtgctcccttaggtagggccacatctgactccgtgtccccagatctcagctctggggctggggtgggatgagtggcctgagtgaggagaggaaggccagctcccagaggacttnnnnnnnnnnnactgtgaatatgtccaagtcccaaagccaggcgagctcagaccccactgcttgaggaagggggctggatgcagggnnnnnnnnnnnnnnncaatcccctcccactcggcctttcctgtggggcctnnnnnnnnnnnnnnnngtcactgtcgtgcacatggctgcatggctggttctattggccctaggtgctgctctgttgggtgggatgggagaggggagagggagccaggagcactgggttctccctgagaacactgggcacaagagtgctggcctcttctatccctggcgcttcctttgcacttgtttggtggcccnnnatgtgnnnnnnnnnnnnnnnnnnnnnnnnnnnnattttctaagaaattacttttctgtgaa

SEQ ID NO: 6507 - DNA, 738 bp, Macaca Fascicularis
  misc_feature (1)...(738): n = A,T,C or G
agatgggaacagtgtccagcgaggcctgtnnactgggctgggggtttttannnnnagcttnnnnngagnnngccagaacgagcttgtctcagggctagtcagtgtcagtcctggctccnnnccgcaaagnnnctggcgagctgtggtctcagcaggaccacatgctcaagggcaaggcttcatgagcttccccctcgtgttgcccccagtccaggaaaatgaacggtgtggaaggtacagaggcatggatcccaaaccagcggcaacacctgagaacttgttggaaattcaatttcccaggctccagcctatacccgctgagttggacatggggcttgcgggtcacgtgtccagagctggatgtggggagacccacctgggtcggtcccacctataccatgacgacttggaccagtccctcttcctctccctgggcctcaggtcagactagacgctccgagttcccttctctgaccttgatgactctgctcattccttcagcaaatatttgtcgagcagctgcttcatgtcagacactcatctgggctctggggatgcactcgtggaaaaacagagtgacacctctgaccttatggagctgacgttctagtctacaaatgaggctgtggtcccacagctgcctcttgagaatcactgtgtagctgggtgctgtaacacatgcctggagtcccagctactcaggaggctggggcgggaggattgcntagcccaggaatc

SEQ ID NO: 6508 - DNA, 758 bp, Macaca Fascicularis
  misc_feature (1)...(758): n = A,T,C or G
cggaggagtgcnnctgggctcnggccctnnnnnnnngagcctgtgacccgttagagagctgagacnnntattaaaactcacctcccaatcgcctcaaacaaatggaagagaagagaaaggannnnnnnnnnnttgtatttaaaagtaattatattnnnnnnnnnnnnnnnnnaaagcaaaataacaaaaaagacaaatgcccacaaaaatcagcagatgttggagatagggctctcgggggtgggctccggcacccacatccttgtgtcaggactttcctcagtgactgtgtgtggggggtttcagggctgaaccctgcctccctcccacctcacctgtcacacccactgtgaaagttggaatatgtggtctccctggcctcagggctctgactctnnnnnnnnnnnnnnnnnnnnnnnnnnnnnnnnnnnnnnnnnnnnnnnnnnnnnnnnntctcttccacttggtctggnnnnnnnnnnnnnnnnctgctacttgagggccaggatgctcccccagggaagaaacggaatagtgtggggtgtgtgcagggctgcatnnnnnnnnnnnnnnnaatattaaaattcttctatattggctggtaaattgccatggccctgagccactgagtatgttcattgccacccctgtccctcccctgggaacccctccccttccctgatcctgaaattaaagggttaatgtgtggcatatggaagggactcccaggaccctgtgctcagtgtccatgnnnnctg

SEQ ID NO: 6509 - DNA, 2230 bp, Macaca Fascicularis
ttttccccaatatacattttttttttctccacagagagttccttctctaatgtccccatctggtattaagtgcactttaaagaaaggggcagggtggattttcaagaggcggggagctctaaggcttgaccctgagggctcttctcccagccattctcagcccgtatgcagcaccccccacaccgaagaggactattgttttagtttcacatggtcctttccttccacatggtgctaaggtggttttctaggtaaccgcagggatggaggtcactagccagtccaaaccaggagagaaggtctggtgtcctgatatccagtcttttctaggaggaagaccaagattctccagcacctgggcagcctatcacccagcttctaagtcaggaaaggaagctgagtgggaatgccagccggtaagcgcaggctgtactggcccatgactccttcaagggaaagaggccctgctccctttacctgctgagctccttttagcagttagggagaactgcagggggaaagctgcacgacccccagctgatgggaatcattcctcgaattgcccgagacatcttcaaccacatctactccatggatgagaaccttgagttccacatcaaggtttcttactttgaaatttacctggacaaaattcgtgaccttctggatgtgaccaagacaaatctgtctgtgcacgaggacaagaaccgtgtgccatttgtcaagggttgtactgaacgctttgtgtccagcccggaggagattctggatgtgattgatgaagggaaatcaaatcgtcatgtggctgttaccaacatgaatgagcatagctctcggagccacagcatcttcctcatcaacatcaagcaggagaacatggaaacggagcagaagctcagtgggaagctgtatctggtggacctggcagggagtgagaaggtcagcaagactggagcagagggagccgtgctggatgaggcaaagaatatcaacaagtcactatcagctctgggcaatgtgatctccgcactggctgagggcactaaaagctatgttccatatcgtgacagcaaaatgacaaggattctccaggactctctcgggggaaactgccggacaactatgttcatctgttgctcaccgtccagttacaatgatgcagagaccaagtccaccctgatgtttgggcagcgggcaaagaccattaagaacactgcctcagtaaatctggagttgactgctgagcagtggaagaagaaatatgagaaggagaaggagaagacaaaggccccaggcttcgcccgggcgccctcaactctgcccccagagactgagcacctgtcctccgcctcagtcttagctgagagccctctcctctggagcacacaccacccctgcagcccaagaagtgttccagctccacgccggcgaccaccatggcggagaccaacaacgaatgtagcatcaaggtgctctgccgattccggccgctaaaccaggctgagattctgcggggagacaagttcatccccattttccaaggggacgacagcgtcgttattggggggaagccatatgtttttgaccgtgtattccccccaaacacgactcaggagcaagtttatcatgcatgtgccatgcagattgtcaaagatgtccttgctggccacaatggcaccatttttgcttatggacagtcaagccacgctgtctccagacccactagggtagaaggaaggttcctgtgggcctgtggacttaggctaatatttactgccagcagggcacttaagaatccagggggttttatgtaatgttgccaccacatggttcttttaaaaacacataagaaaatgtgagggtgtagcgcagatgaggagagagatgacacagagggagcagccttctctttagcaagatgtaagggaaatataattcgcttacataaaaaagaaacaacacacacgcaaacccttcaccagaagcttcacactacatcctcctcctcctcctgctccccaccttcaccgcatccctttcagagccagggtcactgcaaggggcgcctggcctgcccactcacatctgccaaaattttgcatgccagcgtggaagacaaaccaaactgcacaaccccctgtgtgtatttacttggtgtacatagatatctttaaaataaaataaattcaatgatgactctaaaaaaaaaaaaaaaaaaaaaaaaaaaaaa

SEQ ID NO: 6510 - DNA, 2847 bp, Macaca Fascicularis
  misc_feature (1)...(2847): n = A,T,C or G
tcaggatccaaaccagagctttgatgcctgactgcatagttaccttcctccacggtaacactgtagattagttcgaccccacaggcaaatgagggattaagaatgtcagcattcttccctataggccaccaggatcaagggcagtgttatgtggagctttgcagtgtagtgtggactttacgtgggtggaaatgctttccttgcacacatacgctcatatttacatctatttctcaaatgtgtgtggatgctgatgtgatcaataaaatccacatcttatttaaagacattagcaaatccgtattagatcttgtcgttatacaattctcagcaactaacagaacgattagcatgatagctatctttggaggagtcaaggggaggtggagtttataaattttttttttgacagtggaaagggttcctcatggtggaagaatttgggcacattactacagtgcatacatgcaggagtttcattttgtaatgttttcaagcaggtattatgaaacagtcataaaaaataccaatagaaaccaacagaatgcctaattttaagccatatctctttgcagtgaccctgctaagataaaattatttgtaggagaaaaatatacccttgggaaaaatataatttttggatataagccatgtaaatgttgacaggcatctaataattatgatttttgcttttagcgaggtcgatcctgagttgttctatcagtaattaggcaggagaagaaattcccagtttgtaatgataaaattataccgtcagattaagagtgagcatccatcattctgttctcatagcaaggcacagattccttcacccagaaattgttttgagcgctttatgagtagttttaaaagcgggggtagcatggtgagacacctagaactgggggcagcctcaacataagctggcgcagtgtgtggacatttgaactccttcggacgtaatagccatacctggatatttgtaggctgctcatagggagttgaggattctatttggttccaaagggtagccctggaattagtgggtgggagttgcaaagggatggctttggctcaatccaagtatgcattttcatatcccaagctgtgtgaggataaggtagactgttatggtggagactgagccaccgttcctggatgtgtacatgtaagagtagagagccacatggctggcttgatgtagggggaattagacattggacaaggacggagacactattgagattgtttctgaccttgagtttaggcagttctgtgataaggcaggtctgttgagaggtgattattttatacaatgactccccatagaatttcctcaaatagcctgtctaattgatatgtctgaggtagattcagtttaccaaagttatgtctatgcagctttacaagaatatctaataagtaaattaggtcaatcttttacaattgaagcttcattcattgcaaatacaagggagtaagaaagaaaagtggcagaattactggatgttcctagtaaggtaacctgcccactcattgtagagcttcagtttcatgaatttagaactaacctattgctctgagtggattctattgtctttggtaagaaaagcaggggaataaatgacgttggtgccccattttgtctgttcagagctatagacgcaggcatacatttccaaatgcagtgtgacttctccctgtgaggctcatgaagagggattgttgtcatctagaaaaggaagtgcttttgcctgacattcaggtgcttggggaggcaagtagcaggtgagtaaagaatggcataggaagtcattgtctttacagagtaaccactgacgatctggaaggggtaggttagatccctacaagtccctacccatgtccctgccagtgtgctgttgtccagcttcgaagcatggagccgtatccacagatcccatgccacagccccagagggcttgctcttaggaattcctgcccttctgacttagctcatgttgtttgagaattgaagtgcatgccagattaattgtagttttgttagtgtaggaagtaacgacttcttacatttttagaacattatgctatctcagacaccaaagaaaaaggccctaccactctcagatgaagaggcattatgatgtgtttggaaactatgtgcctagtgtttatatctggtcaacactgagctggcctgctctggaagagaaaggggaagaactgtttctgtctccagggacgttcaggctgaagtatgacagggcagggatcagtcaggaaagataatgcctgacattaggtaactcatgctctaggaactattgtgtacaatattctcagtggctgctgtgtgatcatgactgtcatccacattcttctcctttgctctgtattgctgtatatgtctaccatttttcttagaaccatgctttcctccatgagtttgattcttcaaatgtgccaaatggaaaattatcctgctggtatatatttccagatagcatggggggaggtgggagaattgtaattaagaaagtgaatcaggccnnnnnnnnnnnnnnnnnnnnnnnnnnnnnnnnnnnnnnnnnnnnnnnnnnnnnnnnnnnnnnnnnnnnnnnnnnnnnnnnnnnnnnnnnnnnnnnnnnnnnnnnnnnnnnnnnnnnnnnnnnnnnnnnnnnnnnnnnnnnnnnnnnnnnnnnnnnnnnnnnnnnnnnnnnnnnnnnnnnnnnnnnnnnnnnnnnnnnnnnnnnnnnnnnnnnnnnnnnnnnnnnnnnnnnnnnnnnnnnnnnnnnnnnnnnnnnnnnnnnnnnnnnnnnnnnnnnnnnnnnnnnaaaaaaaaaaaaa

SEQ ID NO: 6511 - DNA, 768 bp, Macaca Fascicularis
  misc_feature (1)...(768): n = A,T,C or G
aagnnnnnnnnnnnnnnnnnnnnnnnnnngagtgggaggagcaacaactagatgaaccnnnnnnnnnnnnnnnnnnnnnnnnnnnnnnngctcccttccagctgttggagcggacctctttgcacaagactcacaccatcttctcactgnnnnnnnnnnnnnnnnnnnnnnnnnnnnnnnnnnnnnnactcattggaatcgttactctaaaggagctccggaaggctatcgagggctctgtcacagcacaggnnnnnnnnnnnnnnncgcccctcgccagcttccgagacagtgccaccagcagcagtgacacggagaccactgaggtgcatgcactctgggggccccactcccgtcatggcctcccccgggagggcagcnnnnnnnnnnnnnnnnnnnnnnnnnaatgagcccctcatgggtggcctaggatggtgctagccatgcctnnnnnnnnnnnnnnnnnnnnnntcattccttctgccttgggaaggcaggaggcagctacagccggaggctgaaccccagccccctccagacctggggtgnnnnnnnnnnnnnnnnnnnnnnnnnnnnnnnnnnnnnnnnnnnnnnnnnnnnnnnnnnnnnnnnnnnnnnnnnnnnnnnnnnnnnnnnnngcagggtcacttgacccctgctccccctttgaggggaaaggggtagaactaagatgggtttataactggaacctccaatgaccagatgtatatagagatttacaaagatttttatattaatttaataaaa

SEQ ID NO: 6512 - DNA, 741 bp, Macaca Fascicularis
  misc_feature (1)...(741): n = A,T,C or G
acagggagttggagggtgtagagtcnnnggttgaacagggtggggaacctggttgggggtgggtgggaataaaccagactgggatgcctgtgtctcagtcctgcctcctcaccgacttgctctgtgacctcaggtgaccaacacgagcttttggcctcagtttcctcatctgtaaaatgagctgtaatgactttgtgactttttggtgtggccctggagcctggggccacggtggagttcctcggccttgccacttgacaacccttaaagggcttcctccttaacacaggatctctatggtggtgtttgggtgagggccgcctggagtcaacccccagctaaagcatggcagtctgactgctctctacagggacctcctgagcactgtgggtggaggcgcaggggtcggggggttgaccttcgtggctcttcacatggcctaggccagtcctcgggtcagactggtgtcaggcactgtagtgcgaagttcctcttctgggccctccagtacccagagaaattggctgggccattaatggctgcagcaccaagggtggtggaaacagctgtgaagagcccccaaaccagtaccgggacacctgggttctccctgtgaccttgggcacagttcttcccctctaggccttgatttccccacctgcgagtggggatgctagcccttggctctgcctccttcatgaggctctggaagatctggccaaagccagattgtagaggagc

SEQ ID NO: 6513 - DNA, 688 bp, Macaca Fascicularis
ctaggggcttttttgttgactctggtgctcatccaggaacttaggagaaaagaactcaggggtaatttctgggctgcagccttaaaagcttagacagtgggatcagctgtgaatctcaatgtccaagtggaggtgcatgacttgcattctagctgctgaccagattgccaccgagtcccccactccactggtgagctgccacacggggaagtagcatgccctgactgttccaacaccacctgctatggggagtacctctggtcccttcacatttggccggaggcatacaaaaaaaaacagagcagctggagagagagataattactattccctcccttcccatctcttttctggctacaagagtgcaggggttggagaagaaccattagaaagggaaattagtgggctggtatatctgaaaagagggaagactttgatcctcagccccgaggttggtgcagggcctcccctgtgtgactctacctgcactctgtgtttctatcctgtgccctaagtgggccaagcccaggtaaattcctgctggccttggagctccaaggtttggctgaccagcagactggctcctgactcttcagcctcaaatccccagtttttgatgaatgtggatttccgtctgtaattaaaagcaatgcaacaacttggatcttgagaatggcagtaaactgag

SEQ ID NO: 6514 - DNA, 685 bp, Macaca Fascicularis
  misc_feature (1)...(685): n = A,T,C or G
ctggctgtatcccctcactgagggggccccccgcacccgggaggagacgcgggacttggtccacgctcccttacccttgacctggaaacgctcgagcctgtgtggcgaggagcagggatctcccgaggaactgaggcagcgggaggcggctgagcccctggtggggcgggtgcttcctgtgggtgaggcaggcctgccctggaactttgggcctttgtccaagccccggcgggnnnnnnnnnnnnncannnnnnnnnnnnnnnnnnnnnnnnnnnnnnnnnngtaagccctcggggcagaccctgccttggagggagacnnnnnnnnnnnnnnnnnnnnnnnnnnnnnnnnnnnnnnnnnnnnnnnnnnnnnnnnnnnnnnnnnnnnnnnncaggccctcatctctacactcgttgggatcaacaaatttgggtcatggcccaaaagaactggaccctcattataaaaaatatnnnnnnnnccaccacttacttccttaaannnnnnnnnnccannnnnnnnnnnnnttgtgnnnnnnnnnnnnnnnnnnnnnnnnnnnnnnnnnnnnnnnnnnnnnnnnnnnnnnnnnnnnnnnnnnnnnnnnnnnnnnnnnnnnnnnnnnnnnnnnnnnnnnnnnnnntggtttaaatggtcttatgtatataggggaaactgggagacgcag

SEQ ID NO: 6515 - DNA, 582 bp, Macaca Fascicularis
tttcttttttgattatccgaatactgaagcaacttcctcccccacacctaaatatttgaacaaaatttgtgcggggtatgggggagggtttttaaatctcgcttttcttggacaagcacagggatcttgttctcctcatttttggggggtacgtggggacttctcaggacgtgtccccagccttctgtgcagccccttctgccctgccgggcctgtcgggaggcgccatggctcggatgaaccgcccggccccggtggaggtgagctacaaacacatgcgcttcctcatcacccacaaccccaccaacgccacgctcagcaccttcatcgaggacctgaagaagtatggggccaccaccgtggtgcgcgtgtgtgaagtgacctatgacaaaacgccgctggagaaggacggcatcacagttgtggactggccgtttgacgacggggcgcccccgcccggcaaggtagtggaagactggctgagcctggtgaaggccaagttctgtgaggcccccggcagctgcgtggctgtgcactgcgtggcgggcctgggccgggctccagtccttgtggcgctggccc

SEQ ID NO: 6516 - DNA, 754 bp, Macaca Fascicularis
caatcgaactgcgaaagctgtgatgagaatgaggatgattcattcaagtcactaaaaatggatcagatccttctaggtggactcacagacagtcggttgcctgttcatgaatactacctgctataaacatgacatctacaaaaagagggttcaccctactgaaaatactaaaccaccctaactaatgagaagattctattcattccttgaagagtttttatagaaaagtttaagaaatgtaatttgttacaattaacatttttatgttttacattttacattttgattattgtgcagaaactgacagaatttaaaaaaataaatggacttcagaagttcaaaatttatcatttttgaagaagtttatttagaataggattttataactaatttggacgcttcatcacattgatggatataatactcagaattataaattgctagatttgataaatacctaccaaaatgtttatttttttcagtcatacactgaccataaaacaaatattttactaaatttccagagtcatttctttgaaaaacagtataattgcatcataacatttcactaaatcctatttatcttctgggaaatgtatattttaattttagctgttggatttcctaaatatgataagcttatatattcatggtatgaatttctttaaaaagagcatctgctcttggacttgtatctgttgcatcttgtcaatgcttgactcatggtcagcatccaatagttgtaaacgaaaaa

SEQ ID NO: 6517 - DNA, 933 bp, Macaca Fascicularis
  misc_feature (1)...(933): n = A,T,C or G
tcaatgaaaagtaaccactgccactttcttgtgttagaacttttacagtacagaaaatgacaatagccttctgtaatgaggcatttgttagagtttnnnnnnnnnnnnnnatacttcagcaggaccctacatggttcnnnnnnnnnngttaccataaaaaatctggcaggattttaaaattcaatcactccatctttccttggagctactgactgaaaagaaagcgaaggaaaagagaccatgttaagcccatgccagctgcttggctagaatgtgatcaatggtgtgtggtagactcaagtttttaagaaatactannnnnnnnnnnnnnnnnnntatctaaattnnnnnngagtgnnnnnnnnnnnnnnnnnnnnnnnnnnnnnnnnnnnnnnnnnnnnnnnnnnnnnnnnnnnnnnnnnnnnnnnnnnnnnnnnnnnnnnnnnnnnnnnnnnnnnnnnnnnnnnnnnnnnnnnnnnnnnnnnnnnnnnnnnnnttacannnnnnnnnnaaaaattgaaaaacatcatgttttttaagtttctcgtatcaccagtcttggtgtttatattgcaaatctatcatagtaagaaataatttgtccnnnnnnnnnnnnnnnnnnnnnacatannnnnnnnnnnnnnttctgtaataaaatgaatnnnnnnnnnnnnnnnnnnnnnnnnagaacctcctttgatcaggnnnnnnnnnnnnnaggctggagcccctgaatgccccgcacacactgcaggcattgaccagaccagctgaaacctgcgtccctgctgatgttctcaagcctcctaagtggcaaatggaaatgatatggccggttgcagttgtaggagagttgtgacttaggcaggagtcgacctcctcaaataatggaacgatnncaaagtcaggctgccctgaccaaaaatatctgcc

SEQ ID NO: 6518 - DNA, 727 bp, Macaca Fascicularis
  misc_feature (1)...(727): n = A,T,C or G
cgccgtggagcgcgacgcccgggccgccgtggcccttnntcccgccacggcctccggtggacagacgccttcgtgggtctgagcacttgcggccggcacatgtccgctcaccgcgtgtccggggccctggcgcgggtcctggaaggtaccctagcgggccacacgctgacagccgagctgatggcgcaccccggctatcccagtgtgcctcccaccggcggctgcggtgaaggccccgacgctttctcttgctcttgggagcggctgcatgagctgcgcgtcctcaccgcgcccacgctgcggacccggcttgcccaggatggcgtgcagctttgcgccctcgacgacctggactccaagaggccaggggaggaggtcccccgtgaggccactctggaacccttcctggaaccctccctactctgacccgctaccgacaaccaagcactaatccctttactaccaagcaaggggagccaggatttagtcctggcccagcccagaaccggtccctggagcagggtctgttgacttccctgggtaggacactgccacgtctgggcccaggtcctcatggctccaaatggtatctagagtttgagcagccttcttggctgcaggcgggtccatcctgtggcagcgggctagggcccgcagagcatttggtgcccctccatgctgcagtgcaaacaccttcactactggggcagtgnnnngagatggctat

SEQ ID NO: 6519 - DNA, 776 bp, Macaca Fascicularis
  misc_feature (1)...(776): n = A,T,C or G
caggtgatagctcaggaaggaggttccatgctaaacttgggactttcatctcttgtctggatcatttctacagccccttgattcttatctctcttcccagtctctcttcttgcaattcatcctatgcactatagcaagaatgatttttctaaaatgcaaatattgttctatctatttaagactctccacagatggtgttttccagcttggcgtgagatcctatgaaaattgctagaaatatatcccagggttttgtcccttctatactacagccaaagagaggctgttatgtgcagtggttaagaagactgcaggggcttgaaagactgaccctctggaaccaaatcctcattctgtcattttctaatgacaagatattggaaaagttgcttaacttctctatcttttctcatccacaaaatagagacagtaatagcagctacttcactgggttgatgagaagattaaattagttaattcaaataaagtatttaaaatagtgcctggcatataactaaagtacttaataaatgttagctattattgagacagccaggtgggacgggctccctggcaaaactccaaccggcctatgcactgagaggagtgcacactgggatggagccacagacattcgtgccatttgcagcagggaggagcctggcctctcctcttcttgggtggaacctggaattcaatctgtgaggtgggattcctacactagcaggaacnnnnnnnnnnnnnnnagtccctgttacctcttttttccttttgcc

SEQ ID NO: 6520 - DNA, 732 bp, Macaca Fascicularis
  misc_feature (1)...(732): n = A,T,C or G
ctatcacagatttatcnnccttgctgtntnnnaggagtannnnngctctacctggctcttaccccttctatgaacatgcctaatcttttattatttaggcccttaatttctctcaatcatatattttagttttccttatagaaatcttaacataccatttgttgtatttattattaatgatctgattaggcatgctattataaatggttcctacattaaagcgtattttctattgatgatggtgtagaaaaagaatttatttctgtcagttcacaaacatgctgtgcttccatcaaattcctcttattttattaactgcaaaatgttctctgaaaattaaaaaatgaaagttctacattcacaatgatgtcttctccaaatagttatttctttaaaataattttctgtccttagatgtttcatctctttgttttgccttaattcaccagctaagaccttgaggcctggtttcatagaactgtttatttcagctatccttgtcttattatgaatctaatgggaaaattatttaataaatcatagtcaaccatgttacttatggtaannnnnnnnnnnnnnntacttgtcatatcaagaaacttctcttctnnnnnnnnnnnnnngtatttttaccaaatgtactttttttctgcatgtattgagataatcatatatttgtttccatttctgtacaatgttaatcaattcatttttgatgttatgtcactgcaa

SEQ ID NO: 6521 - DNA, 782 bp, Macaca Fascicularis
  misc_feature (1)...(782): n = A,T,C or G
tgcaaaagctanagnatgagnnnattatgtgatagatcttttctcttggagtttattgattcacttttatagaaatgagaactatannnnnnnnnnnnnnnnnnnnnnnnnnnnnnnnnnnnnnnnnnnnnnnnnngtaataaggactatagcagactggaaagaaaatcttgccctcaaaagttgacagtgcaaatttggttgcattattgcatagtgcaaagtgaaagtgattgcatagtgcatagtgaaaatttgaattattacagaaaaagtgtggttttcttacttctttaatctggtttcnnnnnnnnnnnnnnnnnnnnnnnctttgtttgcaagtaaaacaaactaatctccaacactgaagcataaagggaatttacgagtttcattgaagattccagggtaaatgtcggnnnnnnnnnnnnnnnnnnatgcaggatgtcaaataatgtccttggaatttgatacatgtttctttatgtatgatcgttccccatatagttttattctcaatgtcgttttctctatatggagacaaatgacatgctcaaaagtctagaaatatatattcagaaactagcaacccatgtaaagagaataccattttactccactannnnnnnnnnnnntttgggatactctgagtaannnnnnnnnnnnnnnnnnnnnnnnnnnnnnnnnnnnnnnnnnnnnntatgaaatcctccaaatgatnnnnnnnnnnnnnnnnnnnnnnnnnnnnnnnnnnnacttccccaaataaagaaatgtgtttt

SEQ ID NO: 6522 - DNA, 724 bp, Macaca Fascicularis
  misc_feature (1)...(724): n = A,T,C or G
tgagggagatataactggagttcaagttctnnngagccactgtgttgtagcccagtttatggggagatttgagggtactgcaaagatgtctttgttgtgtcttgttgtgctgtgagcgtgccttttggagagtggaaaaacattttttcctatcttttataactgagcaaagttcctcgcaggtttgcagaggtatcatggcctgaaaaaagactgggagacctatcctttttgcttgcaagtttaatatagaactcaaatgttccttctacagaatagaattgaaggagttataaatactgaatacttctccttttcataattagattgttcagattccattctgtggggaaattgactgtgaggactggatcaaaaagnnnnnnnnnnnnnnnnaagatcttgaacctggtgctccatccatgggagctaaaagcctttgcatccccttcaaaccactctgnnnnnnnnnnnnnnnnnnnnnnnntgtctgtggcaagaaccctgccaagttctacaccttatttggtcgcagctactgagggatgaacaaaacccccctcttcaactcccctcactttttaaaacattgaaattagtatcttctcagatacagaccgttttatgatttttttaaaaagtaaaagttctaaaatgaagtcacacgagacaattattcttatgcctaagttaacagtggataaaatacttttcggtaaacaac

SEQ ID NO: 6523 - DNA, 722 bp, Macaca Fascicularis
  misc_feature (1)...(722): n = A,T,C or G
tgtagagtgatgtactacaccannnnnataggnnccgaggnnnncagaggttccatgacgagcctggagtccagccacagtggcttctcccagtcgagggcgccaccacctcctccagccagtcccaatccagctccatgatttccagatagtaccgcactgccttcacttagtgtgcagaggggatggctgcccctcctcggacagccagctccaccctcccgcccagtggcgacattgtacagactcctctcacctctagacagcaaatagctctccagatggtaaatgtagtcatttcatcccaaaactgtcttgacaggtggttttaactctgatcctactttaacttgatagccatagattttgtatatgttgtacacaaaatcaaaggcagagcacaagggctctcttgaaataaaaagtagtttctataccaattaaaagattgacgtggtctcagaaaaaagaaaaaagaaaccagcacttgttgagttttggtataatatcaaagaggaatgtctacagttgtttgaaaaggctgtgaactacatacctatgtgaagccaatttccttcatatacttcaataaaaatgacctattttaacagattgaatgcagaaacaaatatgagaatcagttctcttctattaagttagatatttaaaagatttgcaaaatgatgtcacccttctcatcaattattcagttatttgtattg

SEQ ID NO: 6524 - DNA, 699 bp, Macaca Fascicularis
  misc_feature (1)...(699): n = A,T,C or G
aaggagaacatcctggcctgtccattggtgatgttgcgaagaaactgggagagatgtggaatnnnnnnnnnnnnnnnnnnaagcagccttatgaaaagaaggctgcgaagctgaaggaaaaatacgaaaaggtaagaagtgtgggtttgctnnnnnnnnnnnnnnnnnnnnnnnnnnnnnnnnnnngattgtacttagtttgaggtgtaataagtttttagtgtaacagctacattaagtatgctgttgatataagtcttttctcatccttcagagaatacagaggaccaaatcgggttttttgactaaattaagactcagacaaaggctgtgtacatttaagttggttttgttattccccagtatcttgaagttgatgaaaatgttgatagtnnnnnnnnnnnnnnnntgagttatttttaaatggcttggcatacagtacagaaataagctagacaaagtaatataggctatgttttttttaatcatatcctgaaacatttaggttcctttcctttagatattcaaaaaaccacaacatcactaagttaaatttcaagtctgctgctctgtccaataaattaataagattaaggaaatctataactcttacagttaagtaaattgaaatattaaatacttaattttcagcttgtttagccattctgaaaagtgtttatttctagatgtttcgtaacc

SEQ ID NO: 6525 - DNA, 1470 bp, Macaca Fascicularis
gttctgaagatgagagggggagagggcgagctgtaagggaagcaggtgacacggggctggacagggaacggaacggcctggctctcaaggaagggaacttctccagatggcttcctcctctgtcaaatgggcccatgaataccctattgatggtgagaattaagatatacgaaacccattctttcttcattatgatgatttttagtttcacagtagcacttagcacctgcccgccctccttctccaccacccagcaggagcggggcggcctggatctgttttctgccccgaccagggggccgcgtcttcagcaaagtctgcggagagaaaggtgccgctcctggaggacagcgggatgggacagtccccttcacacccagccccgcagagcgggatagaaacgctgccgctgtcgactccatgctgccgggaagggcactgtgggggccactttctgaaaagaagaaaccgtctgaacacaagtggctcaagcaatgttcatctatctgccagggaaacggaggtcctgagtgccagagcccaagtcacccagcaagagaaaactcgggtggagctcagggtgtccagcccccgtccacccagccgccgcggtcaaggttaataagggcaaatggccaagcagaaccgcctacaaggaaccgagtgcccacaaagcggggagcgaagaacgtttcttgtatctggagcgcagcccttttgcggaaggcagagtccgggctccaggagccaggcagggatccgggccttgttgcggaggggacgcccgggctgagctcacctgctggaggcggcagcccctggagtcatggggtcgccggcttgtggtgaggggctggtactgttccttggcccagctcccctcccgcaaagggccaggaggtctggctcccggcagtgtccaggctctcgcccgccggtgcctgagccgcacccaccgcgtcccctccgctcccacacctggtgcggagggtccggacccggggtcatctggcagggccctgcagctcccatgggcgcctagcagcgcggagccccttctcactcctgctcgggtggcctctcctctccgggggctgcgtcctcgctggacgccaggttcccggattcttctaggtcgccctggctcctggcaggtcctgatgccacacagtcctccatgggctcctctgacctgagagggacagtgcgatggggctggcggggatgggggtccccgcgctgtggaaaagcagcggggctgctgctgaccgaagccgcctgggtttgttcgggaaccgtccccctggggcccctccgcctggcaaacgctccaggtgcggtttgggagtgaagccggacaccgaacaccatccacgctcagctccacggggctccaggagtcctgagcccaagcccccacatttgcattttatttaaaaaacctgggggttaaagtcaaaaaaaaaaaaa

SEQ ID NO: 6526 - DNA, 686 bp, Macaca Fascicularis
accaccagaggctgccccagcacatgaggctgcgccagcaccagaggctgctgccccaccacaggccccgccaccagaggctgcccctccaccagaggccccaccagcacagtaggcccctccaccagaggcccagaaagagcccacaccaaaagaggaagcaggtaaaagacagggaaggctaaaagagaagagtgaagggtgaagccaaatatctcaaacatgtcaggcattgagtgggaataagaagctcatagaagcaaatgtgaagtgagaattggtgtcttcagaggctgtgactggactatgtaatctgtagaaacatactaatatacgaagagggatttcccgacatacggtattcattgtaaactcattatattttcatacataaaatcatatataaaatattctttgtttctgttttttcatgtttcatgaaataattttagctcttctcatgggtctttgctattaatgtcttgtttcagttgggccagtttctgagtcacccagtttgcttttcagggcatataaactttcattcacatgatctgacataatgtattatcaattatccatgcctgcattgttgtgactaggttattcatcccagtaatagtgacccattatgttacgaatgttattataatgattgaatgttctaataagccctgtctgcttct

SEQ ID NO: 6527 - DNA, 732 bp, Macaca Fascicularis
  misc_feature (1)...(732): n = A,T,C or G
aatgcagggcagactgaatactgatacccaaatccacaanntnagcaactgaacttggtcnnnnncnnnnnnccccaacccctgactcttgtgtctctgttcccctaacttaattccaggccctgactgcaactttctaaatggtaatgatatacctgtatcaagcatctgtattctacatctgcccctcctgccactggtaagatcttcattcaggcatgatatcactaaaagaagaaacttcttgcaagttacttgaggtatacatcactaaagtgatgcacaaggttagcacattgaagatgccttttttttttttttttaatagaagagatttaacactacttccagaggtaaggttccctaacattctaannnnnnnnnnnnnttaacatgtggactgttaactgcctgtttaaatgttgactgaattgtcaataattggtttactctggataaggatctatcatgaattgatcacttaatatgtgctgcatattgaatcataaggtttttgtgtatcattacaatcctcacaacaactctctcaagtagttgttttacatatatgtttgaaactcatgtcaagtgatttgtccaaagtaaatcagctgnnnnnnnnnnnnnnnaagatttaggcatatgttttttcaattcaaaagttttttgaaggaattttgaatggatttataattcattattaatttgactgttcaccatacttttgttact

SEQ ID NO: 6528 - DNA, 758 bp, Macaca Fascicularis
  misc_feature (1)...(758): n = A,T,C or G
attcaacatttnnnttgttttatgaagagcatcaaagaatggagtagtccttatttannnnnnnnnnnnnnnnnnnnnnnnnnnnnnnnnnnnnncacacatatacacacaattattattctagaaaggaaccaaaggtaaataaccagtgtttccattatcactaaatggaaaaattgactggaagttagagttgtgccaattaatcattttgttcattaactgttctggtaacttattttttttaattggaatcttaaattggaacaactgttacagaatgtatattgctccagttctaaagccagttaaccctgtgccctctaacttacgaacctnnnnnnnnnnnnnnnnnnnnnnaagccctgtagtttnnnnnnnntaaaattattttaaagaggataatttaccattttactactataaaacagttgatatcagttgaccattttattttttgatggactctttattgttgggagaaagaaatgaatggaagaaaaaatattttgcttttatttgaatattgattactaacaacttataaactacattgcaggaaatgaagaaatattttgaaattagcaaaatagcaacagtattcaagtatctgaaattttaatatggtgagtcttagagctttagactttcctataagtgacagtatctaagttattcttaatagtcacacttgatnnnnnnnnnnnnnnnnnnnnnnnnnnnnnnnnntgaagatatttatgtgacatgaatagcct

SEQ ID NO: 6529 - DNA, 712 bp, Macaca Fascicularis
  misc_feature (1)...(712): n = A,T,C or G
gatagctttattttctaatttttaaaaatggtcatattannnnnnnnnnnnnnnnnaatcagtgttggatgggccacccaagggtgaggagaggggctggaagccctgggcattaggagaagggagtgggtgctggcatggacatgactggatagannnnnnnnnnnnnnnngcttggtggattttgaaggtaaaactttctgggtttatcatgttttaatttgagagacagggagtgatnnnnnnnnnnnnnnnnnnnnttatctaaccccatagacgtggggatttcaaaagagcacctcatccaaggagctggggatgacttcattgattctagagaggcctgtttcagtgcctactcatccccaccctctggtgccagcctccttaccatcacggcttcattgaggtgtaggcagttttttcttaaaacgagacagtctctccccttacctcaacttcctattcttggggtgggggggtgggaatcaagtgatactggagatagctagttgctgtgttatggatnnnnnnnnnnnnnnnnnnnnnnnnnnncttgttgggaaaaatgtgggggnnnnnnnnnnnnnnnnnnnnnnnnnnnnnacagattccnnnnnnnnnnnnnnnttgtttgtaagaaagagattctgttggttgagtgcctgaagagaaaggtgggatggccttcagattataccagcttagctag

SEQ ID NO: 6530 - DNA, 1324 bp, Macaca Fascicularis
  misc_feature (1)...(1324): n = A,T,C or G
nnnnnnnnnnnnnnnnnnnnnnnnnnnnnnnnnnnnnnnnnnnnnnnnnnnnnnnnnnnnnnnnnnnnnnnnnnnnnnnnnnnnnnnnnnnnnnnnnnnnnnnnnnnnnnnnnnnnnnnnnnnnnnaagctcactttcttgctgtccaatttctaccaaaggttcctttgttcccaaagtccaactactgaactgnnnnnnnnnnnnnnnnnnnnnnnnnnnnnnnnnnnnnnnnnnnnnnnnnnnnnnnnnnnnnnnnnnnnnnnnnatttaaattatttctgaatattttacctaaaagtgcatgtgggaggtcagtgcatttaaaacataaagaaatgaagagctagttcaaaccttgggaaaatacactatattatgaactccatgaaagaaggtgatgctgcaaacaactaatgcacgttgacaacagccccgatgcttatgcctattcacccctcagaaaaggattcaagtggaggtttgacttggaggttaaagttttgctatgttatattttacattacttattgttttagctgtcttcatgaatgtcttttcactattcgtttacttatcctgcacctctcagccttgattccacttagttctcttgcttagagatattacttttcccttaaagtgttccttccatgttttatggccagatggtttcttctcacctggccacttagccttagttgtctctgttgtgttatagaggtctacttgaagaaggaaaaacagggggccatggtttgactgtcctgtgagcccttcttccctgcctcccctactaacagtgctccagaatctgcaatgctagtctcctggaactttcactctttcacagtctgctttggaaggactgggcttagagtgaaaatgtaggactgagaagaatgtgaaagggggctttttgtagcttggtattcactgttgccttattaccctgtcataggcccacgccaaatggaagtcccattcttcctcaggatgtttaagattggtaagtgattagaggtctgctcgctcccttatcgtgccccttatggtgcttctggctctgcagttactagcacagtgttaccatcaacaaccttaacttcattttcttattcaatgcctaggtaggtagatgctagattctggaaataaaatatgagtctcaggtggtccttgtcctctctcctagtcgaattctgaatctagttgacaagattctgaaatcaaggtgtataatcagtaatacgtgatgatagaagggtatatagaagaattttatgatatgagagggtgaaaccctcaaaatgaaatgaaatca

SEQ ID NO: 6531 - DNA, 679 bp, Macaca Fascicularis
  misc_feature (1)...(679): n = A,T,C or G
ggagtccaaggccagggacagcatggttgggttctggtgagacccctctgcctggtttgcannnnnnnnnnnnnnnnngtgttctcacatggtagagcacgagatcatctttctggtgtttcatcttctaaggacactaatcccattcatgagggctcaaccctcatgatctaatacttcccaaagtcctcaccttcaaatgccatcacattggggattaggcctcaatatttcgagattgtggggacacaaactttccatccatagcaattctattctgtcctactttacactgactagttaactgggcagcannnnnnnnnnnggtaacaagannnnnnnnnnnnnnnnnnnnnnnnnnnnnnnnnnnnnnnnntgtgctgtgccagtcaccgtgtgaagcactcttttgccacatgtgtgtaggcccacattatactgagtcccatcttacatgaggaaactgaggctcagcatgttgatgtgataaggccaagcctgtgcagcaggtgagtggctgccccaggagtctcaagtaggtctgtgtgactccaaagctctgctcaaaaccaccctgccccacttcctcccagagcagcttgactgaatggcttcgccacatccgacctcatgtagcctgcagccccgcccccgnnnnnnnnnnnncctgtgtttaaaa

SEQ ID NO: 6532 - DNA, 784 bp, Macaca Fascicularis
  misc_feature (1)...(784): n = A,T,C or G
agcaaaatacactcttgagttgntgggnnnnttggagaagtgacagtaggaagggggttgtgtttaannnnnnnnnnnnnnnnnnnnnnnnnnnnnnnnnnnnnnnnnnnnnnnnnnnnnnnnnnnnnnnnnnnnnnnnnnnnnnntgtgttggtagggcctttgagtgtggcagttgtcatactctgttggataacaatgtattgggtatcggttgtcatggggcaggggagannnnnnnnnnnnnnnnnnnnnnnnnnnnncacatcagcaccgtcagtcttctcttagannnnnnnnnnnnnnnntcagcgtcagttgcggggcaccnnnnnnnngacttgccacctggactgtcgaggtgcagaccctgggagcaccactggcccatctcttacacaggctgaccgatttctcctggtgttcagagtctgtttttgtctagcaccatttgaaatcggttatgatgtagggggaaaagcagcagcctcgaagtctcatgccaagtctgggcggcagcagcctgtgnnnnnnnnnnnnntggatgggcagagaatggggaaggaagatcatgtttttccctactaacttctttaactgcatgtatgatatgttattgcagaggtaagagatagtttaatggattttaaaaaacaaattactatagtttatctgatgttctcagtnnnnnnnnnnnnnnnnnnnnnnnnnnnnnnnnnnnnnnnnnnnnnntgctgttgaattatctttctgttgagaagagtctattcatgcatcctgacct

SEQ ID NO: 6533 - DNA, 743 bp, Macaca Fascicularis
  misc_feature (1)...(743): n = A,T,C or G
gcactgctggtgtcatcnnnnnggggcagacagcagccactgtactcctttnnnccatgagtaacagcagtggtagcagctggggctaacgggccaggctttgtgttctgtgcatttgctcagcttctcacttgatcctccctaaagcaatggggaggcccccgctagcccagttttcaggaagtcaacagggaggttagatgggggccagggtcccacagctactgatggcctgagccaggtggagcttcctggtgtccagtccggatcccacttgcagacctcatgctgtctagataggtgggatgagttcttttgtcacagtgctggctgtgtcctgaggcctcattgctgggccaggtgtgttctgctggggaaagctttgtgcggcttgcttggttaaccacagaagagaaggggggactctttggggtgcctccccgcagcctccccgtgctgggtggaagcacagttactgtgttctctaatgttcgtgtatttaaagtgatttctttctaaagatgtaacctcagcacctttctccagattgggtgactcttctctaaaggtggtgggagtatctgtcggggtgacgtggcccttggatgggtcaggtgggtgtgagaggtcctggggaggtgggcgnnnnnnnnnnnnnnnnnnnnnnnnnnnnnnnnnnnnnnnnnnnnnnnnnnnnnnnnnnacttgttactgtaccattgtgcagacaagaagtctgtatg

SEQ ID NO: 6534 - DNA, 770 bp, Macaca Fascicularis
  misc_feature (1)...(770): n = A,T,C or G
gctgtagccacannnctcccgctncccaagggtagcatagccaatggaagctgccctttgggtaggcgctgggctcctgggagggcccagctgatggggtgaggcacgtctttccagaacnnnnnnnnnnnnnnnggggggtggcagaaactcaggaaggggcttggggcccattgtatctggagagcctggattccttttggcagtcttaggcccggccgcttctgctacctttgcactgctgcgagtttcaccctgggaccgtgggccctgcttccctattcccctgggtggtgggtgggcccagaaggnnnnnnnnnnnnnccttgtcctcccacctccctgaactgtccattgcctttatcgggtgaggtaagtgactgcctcccaagccccggctttggctctgaggatgggcccagagggggctgggcaggcccattgagggccaccaattgaggtttctcctagggctgttcctgggcctgcctcttacaggctcatcccccaggcctgcccttctccannnnnnnnnnnnnnnnnnnnnnnnnnnnnnnnnnnnnnnnnnnnnnnnnnnnnnnnnnnnnnnnnnnnnnnnnnnnnnnnnnnnnnnnnnnnnnnnnnnnnnnnnnnnnnnnnnnnnnnnnnnnnnnnnnnnnnnnnnnnnnnnnnnnnnnnnnnnnnnnacctctctcccagnnnnnnnnnnnnnnnnctggctcccccatccccctttgggctcccaaccccttgcaccctcattgctgtcg

SEQ ID NO: 6535 - DNA, 719 bp, Macaca Fascicularis
  misc_feature (1)...(719): n = A,T,C or G
tggaaagtactttactgtacagcaaagtaaatcattgatcatctggagaacagaaagactttaaaaaaaggttccaggtaaatataaaggtgttaaattcattattgtgactatgtcagtggtttcatgggattatatgaaactccaaatttatcacatactacagtttaaatatgcatactttactgaatgtaattcataacttataacttatcactgctttaaaatatacttcagactgggagcagtggctcacacctataatcccaccacttttggaggctgaggcaggcagatcacctgaggttaggagtccgagatcagcctggcgaacatggcaaaactccgtctctactaaaaatacaaaaattggctgggcatggtggcacatgcttccagtcccagctacacgggaggctgaaccaggagaactgcttgaacctaggaagtagaggttgcagtgagcctaggtcatgccactgtactccagcctgggtgacagtgagactctatctcaaaaaagaaaaaaaaaaaaattgctgggcgcagtggcttatgcctgtaatcccagcattttgggaggcccaggtgggcagatcacgaattcaggagatcgataccatcttggttaacacggtnnnnnnnnnnnnnnnnnnnnnnnnnnnnnnnnnnnnnnnnnnnnnnnnnnnnnnnnnnnnnnnncaggtacttggaaggct

SEQ ID NO: 6536 - DNA, 1628 bp, Macaca Fascicularis
  misc_feature (1)...(1628): n = A,T,C or G
acatttatgcgttccgggctgcagcagagaagattcaatgacaagacttggcctatggtaaaatggaaacatgattttgtaggtctcctggttcctaggcaagtgctcacttcactgaaggcagtttttcctgcagacttctgtcctaggagatccacgtggctttgtttttctctgcagctatctcggcctctctcatgaataggcctgactgatcccagggacaggagagccaaggacagaggtggaggcaggagggcaggaatgtgtgatgacctcgtagttctgaaacagcagtcataatattgcaaagtaacaagtgaaggggtcctaccatcaggaatgtggggcctctcatgggaactccttggctactggctgctgcccaggaacatctcagcagtgagtgagatggtgcttgtgaagacagatgacaaagaggattggtggctcctgtcttggcactacaatcttgctctgccctgccccgcaccccaggaggttggccccatgctctgcattaccccgactcccttcccctctggctccaagctggattcagccaacgggagacaccagcagaagatggaaggctgggaggagaggctgggatctgtctcctccactccctgcctgtctcggggcctccaggactgcagcttccactgggcagcctccccttggactctgtgaccaccattttttgccactacccccttgatcctaagggtggtaacagcttcctgctattgccaactgctgggtgcctcaacatcctttgttggtttccttaaacttgtccgcatctctgtaaatcatcctttactaaatagcccttcatctgaagcgtcagtatgaatgccgttcctgccaggactttgaccagtgcacatgcaatgcagtggaatgcagctgaaaggagtgttgacaccagattcaaatttagaaagcatttgaaagcatggtctaataatgtctccatggaagaggaagaacgtgctgacaaaggaagtgacgaagaatgaaccccagtttctataagcctcaggtacctagaaacctacatctgccctgctgtgaacgctgagtgcctgacgatgttcttagagaagagtctaagtccagctcagctgatctccttcatcatacctgccatgttttataacaagaagggtgaccacagctaaagtaccctggggaaggattatgcaatgccagaaagattctctcttcataagtcccatagatgaaagaggggtcaattcactgaagacgtcaacattcaacattcagacatggccaggcacagtggctcacacctataatcccaacactttggaagaacaagctgggaggatcacttgaggccaggagttggagaccagcctgggcaacgtaacaagacccagttttcttcctttttgtctgtacaaannnnnnnnnnnnnnnnnnnnnnnnnnnnnnnnnnnnnnnnnnnnnnnnnnnnnnnnnnnnnnnnnnnnnnnnnnnnnnnnnnnnnnnnnnnnnnnnnnnnnnnnnnnnnnnnnnnnnnnnnnnnnnnnnnnnnnnnnnnnnnnaactgagaccctgtctcaaaaaaaaaaaaaaaaaaaaaaaaaaaaaaaaaa

SEQ ID NO: 6537 - DNA, 750 bp, Macaca Fascicularis
  misc_feature (1)...(750): n = A,T,C or G
tttagtnnnnnnnnnnnnnnnnnnnnnnnnnnnnnnnnnnnnnnncnnnnnnntgacnnnnnnnnnnnnnnnnnnnnnnnnnnnnnnnnnnnnngggattacaggcatgagtcaccatgcctgccctaatttttttaaaaaagtctttgtggaccagggtcttgcttggttgctcaggctggtctcannnnnnnnnnnnnnnnnnnnnnnnnnnnnnnnnnnnnnnnnnnnnnnnnnnnnnnnnnnnnnnnacttgaagtttttgacagaaaggttctaacttgctgatgaaactaaatgtatatggtttcttttttcttctagatttggaatggagagaaatggaaggagatgattgcgagttccgttatggaggtagaaactacaggatttggcaacagattggattggctagacggggagtgggtaaagtgacagataaccaggattttatatttagaacaattgggagaagttgccatcttggtgagaaagaagggttctaggtttagcttcaattaatttgtgtcagccaagggtgcattatttgattgacacttcattttccattgctttttnnnnnnnnnnnncaaatgaggctcaggacaatgattttccaacaggtaagcattttctctgccttctctctctgttctatgaaannnnnnnnnnnnnnnnnnnnnnnnnnnnnnnnncctgactgtatcaaatcacctggggaggcagagcactcaggtgtaggatgcccta

SEQ ID NO: 6538 - DNA, 761 bp, Macaca Fascicularis
  misc_feature (1)...(761): n = A,T,C or G
tcacagaaattcatgagtttctacttgagtgaggaaactgggtgaaggaatagagttttaaatagtaatagcctgtttttttgtgcaagtacttttatacataagacaaacaaaaaccttaccaccaaatataccaaaatgcacctgtttcataagtgagttactaatatttctatacctggaacatcatgtatgttttatttactggatgtttacattttaagaaggaaaatagttgtgtttatttaaacttgtaaactgttgttcctggaagatatttataccgtaaaaaatgtgttcttttctcatgaattcacaactcctaaatgaatacaagaaagtacaaattgctgggaggaagaataggctttactaattgactgatgtcttgatttttctaaatgggaagattgttttatttttaacactaaatataggagnnnnnnnnnnnnnnntttttttgaaaagttaatgttatgatgtgcattaggctgccccatcgtgtatataaatgaagcagattcgatctttgtattcttaagttcctctactttgtagttttaaaaacgtttaaaatgtgacccacagaacattgtaaatggttaaaaactaacatgaacatattacaacctaaaataattcttaacgtcacaagtgttttactttgatgatgtgcctttgatttaatttgggacacttttttagaaggatacattattcatgtctgtaacagtctttgaagagcttggaaataaaatttc

SEQ ID NO: 6539 - DNA, 717 bp, Macaca Fascicularis
  misc_feature (1)...(717): n = A,T,C or G
cttgaacatcattccatatgtatgactgtatttttaaaaaccactggaactgaaacaaaactggaaaacaaaatagtctctacaaagactgaacctgaagtctttgtgcctcagtgtctgagaatgcagaagcaattggagaaagaaccattaaagaccgggtctagaatatcaaaaaagaagaattggaataaagatagacaggaaggaaggggctgggtgtggtggctcatgcacctgtaatcccagcactatggaaggctgaggtgggcggattacctgaggtcagnnnnnnnnnnnnnnnnnnnnnnnnnnnnnnnnnnnnnnnnnnnnnnnnnnnnnnnnnnnnnnnnnnnnnnnnnnnnnnnnnnnnnnnnnnnnnnnnnnnnnnnnnnnnnnnnnnnnnnnnnnnnnnnnnnnnnnnnnnnnnnnnnnnnnnnnnnnnnnnnnnnnnnnnnnnnnnnnnnnnnnnnnnnnnnnnnnnnnnnnnnnnnnncagaaaaaaaaaagaaggagaaaaggagatcaagaaagtgaagtactgaacaccttttgcctctggtcagggtggatgatgttgtgaagtcgatgtaccctccgttggaccccaagctcctggacgcacggtgagagcggtggtgggtgcacgtntggtttgtcatgcagaggtccacaactgttttatcagatctgtgaggctggctgactgacttgtgt

SEQ ID NO: 6540 - DNA, 719 bp, Macaca Fascicularis
  misc_feature (1)...(719): n = A,T,C or G
aatgagacaagtactgggcagtgaatcgagctccttttccccagccnnncnctgtgggccannnggggaaggccagcattcaggctcagatgcttctccctgnnncctggagggacagaaggggaggatggttaactcctgccgcatcctttgtctcntgttcacatggcattctctaacccagggcagtggttccttcccaggccatgcacagaggctgggtgcctgccagacccgcggagggttcgccaaggaaggggcatcctcctcctcgagttgcaagctttagctgaggcagtgagtcacacagtagttagttcagcctcagctggcacataagtatccagtgtccctgttcagaggggaaagatgcaagctggtagaaaaactggcttttccattctcgcttcctaatttcactctcagagtaaggcaggtaacgggggcttggctgggtcactctgagaggggtgtggctnnnnnnnnnnnnnnnnnnnnnnnnnnnnnnnnnnntcacacctgtaatcccagcactttgggaagatcacttgagctcaggagttcaagaccagnntnnnnnnnnnnnnnnnnnnnngtctgtggaaaacagttagctcggcatggtggtgtatacccgtagtcccagctactcaggaggctgaggcgggaggatggcctgagtccaggaggtcgaggctcctgtgaaccctgattgcacc

SEQ ID NO: 6541 - DNA, 746 bp, Macaca Fascicularis
  misc_feature (1)...(746): n = A,T,C or G
tnnnnnnnnnnnnngggccatacannnnnnnnnnnnnnaggggagctacctggtagcaagtgagtatagacccaccgcaccttgggggaatctcaaacttataggcctcagatacatgatcacctgtcatatcaggtgagcaccggcctgcttggggagagacctgggcccctccaggtataggatcagcaacactcctggctgacaactaagtcaatgtggccctaggtcattcttgcttccaatatgcttgctaatccttaaatgtcctaatgatgagaaactctccttctgaccaattgctatgtttacataacannnnnnnnnnnnngcatcccttgtcagagccaatatatgtatgcatatataaannnnnnnnnnnnnnnnnnnnntttcagcacattgcaaggtttgcatttaaattaaaaacaaaaaaactaaacaaaaaaaaaaaacctaaagataaaagatgccacactgaacaaactaaattcccaaccnnnnnnnnnnnnnnnntccagttatcgcttccatgaagacgcacatactctcttacttggtcttttcattagggaaaatataagtcttgttttacatcaaataaaaacaatgttaaaaactgtgtgaaccttaaaaatggaagtctactagtttacattcctacttcagagaacatggaaannnnnnnnnnnnnnnnnnnnnnggactaaaggaaattaggcctagcctaaaatacatcagacctt

SEQ ID NO: 6542 - DNA, 670 bp, Macaca Fascicularis
gtagtgtaatatagtagaaatagtataggctaaggaacttggacttctcacaaactattgaaataaaaatttttaaaaatgtaaaatgtgtaatttttgggattgttacaatatttgccctcaataaatctgtgtggcaataaaaagcagaagagtgacttggtcagacttgtatctacccaccacaagtttaaccaacaaatacgaacatttatatacatatattaaatttaatttatatacataaatgtaaatatatagcttttataccatggaaaactactcagccataaaaagaaatgaaataatggcattcacagcaacttggatggagttggagaccattattctaagtgaagtaactcaggaatggaaaaccaaacatcatatgttctcacttataagtaggagctaggctacgaggatgcaaagtcataagattgataacagtggactttgggaactctgtggggggagggtgacgggggtgagggataaaaggctacacattggctacagtgttcattgctcaggtgacaggtgcaccagaatctcagaaatcactactaaagaacttatccatgtaaccaaaacccacgtttctcacaaattattgaaataaagattttaaaaaaatgtaaaatgtgtaatttatgggattgttaaaatg

SEQ ID NO: 6543 - DNA, 969 bp, Macaca Fascicularis
  misc_feature (1)...(969): n = A,T,C or G
aacctgggtacnnnngtcagtccccatggcaagcagtgatttagtaaaagaccccagagacagggaagccaaccaccttgaaacctttagaacatctctgctttgaagaaagacccagagatcaggcagaggtgcagatttaatcattactcataacctttgagagctggcaaatgggaggaatgttagtttttgttttggaattggagcatacttgcaaccaaaaggacttagagcagtttgctcataaaaacatcctttattataaaaggaagtatttaaaggatgataaagaccatcagacagaagcggggaaggtagataacttttaggatcttgatgtgaggaaaagataaaatttaaacaataaatttgccacttagattttctagtagcaaaggtcgaaaagatagtcatatacaaaattctgttttctgaaaacagaaaattgtgattcatctgcagaatcagccattttctgtgagtttccttgcatcaaggacactgagaaacagagtcattttctttggtgttctatgggaggaagtgaatagagcctttaggaacttcctggtcaagctgatggtgcttattttggtctgggccacttccctccttccagtcatgagtaatcatcaagcaggaggttggaacgtttcaggtgtatattttgtagaacccaaaagattggagccttaacaataaacatcactaagtgacctgttcctcctttttttaataacagctttattgagatataatttacagacccataatttacatacctgtttaaagtatacaattcagtggatttagtgtgttcacagtgttgcacatccaccaccatttctaattccagaacattttcaccacctcagaaagaaaccacacacccattggcatgactccccattaccttgcccccagccccaggcaaccactaacatctatctctaaagactttttttg

SEQ ID NO: 6544 - DNA, 649 bp, Macaca Fascicularis
tgaacattagatttaatatgcctgaccccagaagaaaaacaggcacagatggtagttttactggtgttgcagtaagttttcaaatttggaagtttggcagctttatgatcttaaaccttgctgtccatctctcacacaactcctctgttggcctccagagccccttcactctcccagctttcgtcctgcccctggttgctatttcccagcctttccatgttggctttcccatgcacagtccttagtgttcgtgcttctcctctctctcctcatcacagttcccagcccccaccttcaactgaactcaacaaaatcttcaacttcatacggtatacatccagatggcttgaagcaactgaagatccacaaaagtgaaaatagccttaactgatgacattccaccattgtgatttgttcctaccccaccctaactgaaacgatatattctccgcccacctttaagaaggtacttggtaatattctcccctgcccttaaaaaggtcactttgtaacattctcccctgcccttaaggtactttgtaacattctccccgcccttgagaatgtactttgtacgcctatcccaaacctgtaagaactaatgataatccccccaatctttgctgactcctttttcggactcagtccg

SEQ ID NO: 6545 - DNA, 330 bp, Macaca Fascicularis
tgtgtatgaaccctttaacactttcgaaatacatgaacgaaactgacgaatctaaagtgagaaaaacacacatatgcaattatagcagggggatttcaatacctctgtctctataatgggtaaaacaaatatactgaaaatcagtaaggacacaaaagacttgaacaatccacttgatttcattgacatttataaaacactccacccaacaacagaaaacacattatttccaagtgcacatggaacgtttatcaagattgattatattctgggctataaaacaagtttcaataatttagaaggatttaagtcatacaaagtatgttctct

SEQ ID NO: 6546 - DNA, 672 bp, Macaca Fascicularis
  misc_feature (1)...(672): n = A,T,C or G
cgaccctcatgctgcctacaaacancaccacagnnnanntggtggtttcaacattttaaggaataaagatacaagtaaacatgcaagnnngaaacgtttctttagaaaggccacccagaatagcgatatctgttgcaatcgttcaaatgcaatatgaaatttcctaggtgctattataaacggtgtggtgtcataccaaatgcaaaagcagttacagtannnnnnnnnnnnnnnnnnctctttgtaggcctttcagatacgtgtttgtgtttcatagaggtttgcttaccaactgtgcctctcaccactggttaaaattgaattcaagccccattgacacaaatcgtttcttgattgaactcttcagtttttacactggaatttctatagttgtcttaaaagctgcatgtcatatcactgtacacaaagtgctttggtattattcatgcaccgtggatagtgatttctgtgttgttttttgttgtacagtaacacggaaggcaggatgtctttcctagaggctggaagaaaagtgtatcgtacattttaaatttattttagaacaagtgcatgagatgtgtcactgatttctgttatttatttgtatgttttattattcaaagtgtgtgcacttttaagaagcagaatttatatttttatgtttgaaacatt

SEQ ID NO: 6547 - DNA, 709 bp, Macaca Fascicularis
  misc_feature (1)...(709): n = A,T,C or G
aaacagaggcattcacccagaaatttttcattcatctcatcaagaaactgagtcnnnnnnnnnnnnnnntctagtcaaaaaggaagaagagcctctgaatattcattcattcagcaaggaaaggtctccnnnnnnnnnnnnnnnnnnnnnnaaaaacagaacccaacaaactcaaaatacattacacttaccactaaaaaacagtagctatgagagagagaatttgatttcaggaggtaatcaaacagaattatcannnnnnntttcggaatcatcccattttattccctatgttcgaacaaatgagatctattaccttgatcccgatgcaccattgtctcagccttcaacccaggaccctcagtaccaaaattcacaagactgtggccaagaacgacagctatttgattctnnnnnnnnnnnnnnnnnnnnnnnnnnnnnnnnnnnnnnnnnaaatagggatcgacagcaagcaatccttaagggactttcagaactgagacagggccttctccagaagcaaaaggagttggnnnnnnnnnnnnnnnnnnnnnnnnaaaatcaagaagataattttggttcttcattttaaatgtagaaaatcaaatcattcacatttgatttgtgtcttccaaattannnnnnnnnnnnnnnnnnnnnnnnnnnnnnntcaaatagcctagattttatttttttaaatgctcattaa

SEQ ID NO: 6548 - DNA, 730 bp, Macaca Fascicularis
  misc_feature (1)...(730): n = A,T,C or G
cattcatctgtactgaagtgttacttgaaccgggggaannncggacctgnnngagccggagtgtgagggggactggaccagcttggactgagacctgagaccgggccggtgggtgcccatttgggactgcgccacccccaggctcgttcttgttttactgtattgagcggcggcacacgccggacctgcattatggctgggggcgcaagcccaaggatgggaacnnnnnnnnnnnnncagcctggctcttcccactctttcatcgtcacggaaacttgtatcccatttgcccagggaactgccactcnnnnnnnnnnnnnnnnnnnnnnncaannnnnnnnnnnnnnnnnnnnnnnnnaggctggaaatggcccctcttagttgccatgggaacctagtaacagactctgctggccctccttcccgccctttcttccagcgaggggtggggcttcggagcccgggggaggagccgggtcaggtcccgccccttcacgcaggcctccggggggccggggcttaccatgtaggggaggggagatgtatccacatacnnnnnnnnnnnnnnnggtgcgcgggtggggggagggctgggcggaccaaaggccggaggggaggggcctggggatcgcgagaggcttgaggatggggccgcttgagggagggaggaggcagcccggcaaggggcaagcgggggacccagccgggctgggcccctgggccccgggtc

SEQ ID NO: 6549 - DNA, 756 bp, Macaca Fascicularis
  misc_feature (1)...(756): n = A,T,C or G
acagggtagacacgttttaattgaaatcaattgagataactttgctcaaacagcagcgtgctttgtgtgactaaaatgaaacattaagacagttcaattgtgtgacttgaagattaccaatgattttgaggcttttctataataaaaagaggttctaaccattatttgggaacaaagagagttttcatcttttttcagatcaaaaccattctgtaaaatctttgttgtttaattaaatgtgcccttatttacccctgatgttatttatgactatgtgccgattcctgctcgggctgtttgctgttggctggtaataatatatttgatttaaatgctgttgactgtgctattaactgctgccgtcagtaaactccaaagatctttttgttttggctttagtatcatatgtgctttttctgtatcatgagagctctatatggtcatgttacagctttatatacattgttgtttttgctggtctcatctttggtaataagctataccccactgctnnnnnnnnnnnnnnnnnnnnnnnnnnnnnnnnnnnnnnnnnnnccatttgatgctgttgtnnnnnnnnnnnnnnntgaatgacctgatgtcagatttagattcttcctggggattatacagctatgaatgtatttgcttctaaaacctcccaaagtgaatctaatcttaaaactacaagttgtaagtattctgaaattgggaaacatttattttaaatgcaatcaggtagtgttgcttttacag

SEQ ID NO: 6550 - DNA, 542 bp, Macaca Fascicularis
  misc_feature (1)...(542): n = A,T,C or G
cccattttcatcggccgagtccanngagngatagcntccctccctatgtggccgggtggcccaaccagaccctnntccccacccagaaccctgctctgggccaaagcccgaagaaccaggcactggggaccggggcaggcggacccccccggctcttagcgcccacccgctcttcagcgcacagcagatcgcacaggcctctccacctctgccagtagatcgatgcagggagaagaccgtccccacctcccctgtcccctctcctctccccactcccctctcttgcacgcagcgcgcccgccctctcggccctccctgtccccctcctctgtctcgtctccccatatggtctggaacccgtttgcaagtgaagcaatatttccgtgttttgtatatacaaccgctcttgtagcccttggtttttgttaatgtagagaaacacagattctttatacactttgtaagatatacgccaaaccccagctctcgatctcttcttctccccgtggcccccgcactgttgccccgttcccgtcaccctg

SEQ ID NO: 6551 - DNA, 744 bp, Macaca Fascicularis
  misc_feature (1)...(744): n = A,T,C or G
tcacctgccggtgagggtctgggctgtgaggggccaggtggcaggcaggggtggggcaaggaccttggagtcagggcttccccaccttttttggcttacggtggcagccggcccacctggcagtccccagggctgtgagggtcccctcctatgggggcaccttccattcccagatcccaagttagaccaggggcttccgaagctggcatctgctctctagaggcaaggctgcccaagcagcctctgtacagagcggggcacagctcagacactcctggggacgtagagccagcattcttgctgctgagccacttccttgcaataggcagcagtggaggaaggggacggaggagagagaatcgggaggcagaagggctgggtgtgggcctgggtccccaggggacgtcttgacccnnnnnnnnnnnnnnncctccatcctcctgccatcactggagcagacatcagggacaagacaagatgccacctcctgccaccacagggcctgctcgcgcccccctccccccagaatacttgtccccctgcttggcaattgccctgggctctctgagtccaagaggtgggacctgctctgcaggggggcagttcctcaggtcaccacttgctggatccagccgatcacacctgtgatgcgggtgtagacgccgaagtagttaggtcggccacagcccaggccccagctnnnnagccctgccnnnaaccagcggccactgagtgccttgcata

SEQ ID NO: 6552 - DNA, 725 bp, Macaca Fascicularis
  misc_feature (1)...(725): n = A,T,C or G
acacacacacananacaagcacacatacacgcagggtctgcaaaacactagcgtggcagaaagtgtnnnaaactcgttctagacctggcatgaatttgaccaggttcagtcttagtctcctctcttagaaataaggtcatctgggccagccgcgnnnnnnnnnnnnnnnnnnnnnnnnnnnnnnnnnnnnnnnnnnnnnnnnnnnnnnnnnnnnnnnnnnnnnnnnnnnnnnnnnnnnnnnnnnnnnnnnnnnnnnnnnnnnnnnnnnnnnnnnnnnnnnnnnnnnnnnnnnnnnnnnnnnnnnnnnnnnnnnnnnnnnnnnnnnnnnnnnnnnnnnnnnnnnnnnnnnnnnnnnnnnnnnnnnnnnnnnnnnnnnnnnncatgcgaggaaataaggccatctggaaatatccttcccatcacaggatgatagctggtaaattcttcaaagcagtgttctccaacttgaatgtttgtgatgtgggcgattctgactcagggggtctgtagaccacatcttgataaataatgctttttaaaaaattcctaaaagagaatatttgnnnnnnnnnnnnnnngagaagaaactaacaagggtgtttacctctgaggaggagaattgggaagctgagagcagaggaaggtggaagacttacttttcactgtgttcttttttgtaccttttgaattttgtaccacatgctgaatctttgacccatttgcaa

SEQ ID NO: 6553 - DNA, 2013 bp, Macaca Fascicularis
tacggactatttctgcttaccgtaggaccttgtgctgttaacagaattttacaatttattagggagagatttgacaccgtacaactcatggtcctcagagcccaataccaacctgtagacgctgaaacagaatcagacttataagacccaagattggctctaaagatacctgaaaagaaggggggaatgaaaggagctgggcacattcctcagccccgggctcaaaactccctgagcctagcacaaacacatcccatcctcccatcccaccaccatatatctctcaaactccctgagctatagggccagtacaaacaccacctggaaagtctccgataaggagacagccgttcaaggttactgaaagcgcaggaatttctttgttcccctacaactttcgggctataaaaagcaaacgctcgcattgttcggggccctcttgcatactgtgtaaaggagggaccaagttcgaacttgtagtaaagatccttgccgcttggctttgactctggactctggtggtcttctttggggaacaaacagtctgggcataacaccagcaatgtaccatatgttggaggctccaacagcctgatcctagggaaatcctgaatcagagacacttccaagttggacatgtagtttggacacgtgacaggcaataagtctctgctatctcaaaccactgagataggagggttgcttataccacagcataatccagcctaccctgactgatatcacatcagaaagtcttgctcaacaatgctccatgacacagacctctgtaactcgtagaggtcagggaagaggtcaaggggcagagctgtaaagggatatatgacctaaatcataggtcaaaagggatatagtttttgaaatatgatgggaaattgtagaaggagacaggcttccagagtcaacacagcccagcattcaaaatttggctctgaaaccacccttaattacacagacaagttccttaaactctctcaatctcagtttccttcaccatagaataggaataataatacctttcttaaatgagcacctacaagcaaaatacctttcacataatttctcaaactgtagctgatatttttatcatccattcttatagaagagaatctgacaatgggcagcgcaaagcagaataaacattttcactcgttcatctttgaaaaatgttatggtaagccttgccacttatattttttgattaaacaacaagccctggtacaggaaatacaaattttattaatagcagtactggcatcttacgaatgcagaaagtaataaatatatagatgttaagtacacagaaagtcaatggtagagagggatttatttatttactcaatttatgaaatcgtgaccttgaaactcttatgcaaaaaaaaagccattaatcccaatttgtaaactacatgaaactagcaacaggagtggtaatatagataaaagacaacacaagaagaattagaatcgcttttaaagcaacatttgtctgctcctttctcattaagcctgttttaaaaggtgaggcatattcctgaccctaagaattaaaattcctcaccccaatcaatctggttttgcacattgagatatattgcctttctctacaagctttaaaagattgtataaaccctgaggtaagcagagatgaatttcttaataaaaattcaatttgtagggtttagatattatttacttcttgattgtagagtaatttgtgagcctcacccagtgtggctacataacttcttcctctggcaatgggagtgaaattgattggatcttttcacagaataacatgagttgacccaaatttttttctctcaagtcacacatattaccctgctatttactttctgtcaaaataatcctagcatgccagccaccaggcaaaacatagatatttatctgagaattttcatctttgcttagtaaatgattctgttgggtgacagattcctctgctcaccaaatctatttaaaaaaaaaaaaaaa

SEQ ID NO: 6554 - DNA, 448 bp, Macaca Fascicularis
gagaagaagtgagagagaattgcattttctataccagactggttcaagagttacaacaaattaattggttacacttctgtgcccccaccacatgacttgttctatttatagttgtttttcaatcctttccaactcaaaagagtgtatttaacattccatcttaagacaatgtgaaactgggagactgaagtcgtcggattgcttgagctcagggatttgagaccagcctggacaacatggtgaaactccgtctcttaggttgagtcctccacagaagcatcgaagtggactggcacatgtgggctcccttcacaggccacaatgatgtgtctctccttcgggctggtccggtatgcacagttggggtacctggagccgtttgtcaggcggcagtctgtgatgtgcatgctggacttgctcttgaagcagttggtctgcccgttcttgc

SEQ ID NO: 6555 - DNA, 281 bp, Macaca Fascicularis
ctctttataaggtggctcattgtaggaaatcctgtgccttcccctttgagcacaagtgttgcatgaacaacagtttgctataagaaacataccagattagccaccattagcatctatatgtactttgtgtttaaaaatcaactggtaattctgaaacactgtagaatggataaaaattattttgtgatcataactcttagttgaactagagtatttttgcagcattccttgtcatcagaaacatggttaaagtttaaaactagaagcagcagaaaactagc

SEQ ID NO: 6556 - DNA, 746 bp, Macaca Fascicularis
  misc_feature (1)...(746): n = A,T,C or G
acactaagttannnncatcnnnnnnnnnnnnnnnnnnnnnnnnnnnnatcttccaataaagtgttcctaagcagcctgtatactgagtgcaagcaggctaacaatttgagtaagagtccataccatgtatgtgtttctgtcagcagaatgtacatgttgtacaaaacctccaggttccttaagctttttgctgtccatgaatcctctgtggcaactgtcgtcatagagccagaagccagagggtcagggatatgagggactgacaaacagcaggggacatctggggaggagatccctgtcatgtctcnnnnnnnnnnnnnnnattatggctggtcttccatttgctttttctttctttaagtaaaaaccatttttctactttgcttttctctccatacttaaatggtcagtagctactgagtggtgctttatctgaataggcctggattgaagcaaaatataaatgggnnnnnnnnnnnnnnnnnnnnnnnnnnnnngagagcccacagtcccctgctcagtgcccagaaacaagtcagtcatccctgttggcagtaaatcttcccacaggctgtccattagagatttaactatagatcttcaatagaaagagtctgaggcaagtgggagtgaggaatggaagcttaggttgggagaattttttttcattctgtttgcttaattcagagtcccgtttgtggtatttcatatctgtactccaggcagaaatataacttgaaaatcct

SEQ ID NO: 6557 - DNA, 668 bp, Macaca Fascicularis
  misc_feature (1)...(668): n = A,T,C or G
tgggtccaattatccagaaggtaacatctctgttggtctacttccctacttgtcctttggttggggtgcaggttagagggtcagtgttgggttcaactaatcttgcttattatannnnnnnnnnnnnnnngaggatctagccaagggcatgatttaagctgccattgctaggattaagagcaggaaggagcatcctcctcttctactaagtggggtatctgcagacaggaggataaaggtgtttcctttgtactagttgttggtgccctggagttctcaatatcactgtattaaggcatgggatagttacagtggcaaatgatgggggcaagttgggttcaagcctcattatctcccttttatttattctgtaggacggcacatttcctagaggcagaatcctacaacttccactccaagtgagaaggagattcagactcaatgatgctaccatgcctctccaacatcttcaacactctgacattatcttggatcctatggtttctccatccaattatttgaatttcccagtctcccctatgtaaaacttagcaacttgggggacctcattcctgggactatgctacaaccnnnnnnnnnnncaaggctatatttctgggatggatataatccgaggaagggagttaaagaccctcctggggccctca

SEQ ID NO: 6558 - DNA, 462 bp, Macaca Fascicularis
  misc_feature (1)...(462): n = A,T,C or G
aacatccatgaacctactannnannnnnngaaaataaatatcaccaggtagttgagaaacccctcgattgtctacctcgatcgtacttacttgctacccacctctcccagggacaaccactgtcgtgaatttcatgatgattattcccttgcctttcatttccgttttatcaccttggtatgtgtctttaaacaacgtatacccttttttacttatgtaagtggactgactcacactgcatacatcttctatgacttgattcttttgttcaatattgtatttgagattcatccatggtgatgcaaataggtgcgttattttttcactgctctataagctggcattgtacgaatacagcacaatgtatcagttttaacattggggatcattagcattattctcaggttttttaaaataataaacagtgtttctatgggcaataccgtaggcatgtaggggggc

SEQ ID NO: 6559 - DNA, 2000 bp, Macaca Fascicularis
atgcaccagttccagctggcagccaggcctactccccaggcagggaggcccaaaggagactctcagatggagaacagaataggcctcatggcctggtgcctgtcctctctggggtgagcccagaccagggtcccacagagtctcccacttcctgggggtgttctaatgccatgggatccctgggggctacctggaggcaggagtttccaaagctgagccaagaggctcagccctgctcccagggcagctctgcagatatctatgagttcattgggacacaaggccccctgcaagaggccagggacacaccagaccaagaaggcagtacctatgagcagatcccagcttgctggggtgacccaaccagggccccagatcctggggccagtcccacatctagcccatgggtacatgggcccatggaccatggctacaagaggatctcagggcccccagggctcccagagcctgggaacacctatgagcagatcccagcaaccaagagcaaggagactggacggatgcacaagcctgacaagcttcggaggctcttcttcacggacaggaagcacaaattctgagggcctggcatctggcagcccaccagtgggtttcctggtacccaggccatgccaggggttatcgcaaagccctcagctcatttgaaggcaccctttggatcttcagactcatccagcctactacagaactaggcttcgagacagccaaggtgcctgcctgagagcaggtggaagaggaccttccaaccacctgcagctcctggctacgtcctgctttccttgtgcctcccatccatgcataggagggaatcaaggctggagaggagtgacactggccaaaggcaagggtcagcacccccatttcccagatgagcattctgaggcccaggcagactgactgaacctgcctcccactactgagcacttaccgaatgtgtgacaggctgtgtgctaggacagacacctttctaactggccaagtgacatcatgcaattgctattgagaaaaccaattcccctccttgtggccccatcagcaaaaaggaggggagggccagaagccacatcctctgcttcaggcctcttcactccagctatgccctcaggtcaggctggctcttcctggagctctgtccctcaggaaacttcctgtttgtgtgtcacttcccttcctatccacatttcccattctctataagggtggacagctggcttgctgccccgctccccactaccccaagcccgggatgcagaaaacaggactgatcatctccagcgacaacaccagaggtacccctcctccctgcgctgaccctgggcagagctggctcaggtcgcatttgtgggaaatctaccctagtgaccacttggctctgcagcttttcctgaaatataggcctgtaagagtccctccctccttgggggttgtaaggattgagactgaagcaactgtccctgtgcctgagtggttagcactcctgaatgttaaccagagatactgtcagggaatttacagaaggtttggggcatggatgtgtcttcttcccgacggcacacgcactgaaatcaaagctagtgcctaaagcaggaggcactgcctgatgctgagaggtgagacgccaatggtgggatttcaaggatcagaagcaaaggtaccctcaaacatttcctaacattagcagacatggagagcacagggatgcaaaagtgttttactaccaggagttcacacatctgtggacagcacataccagtgaggattccatggtgttggggagggcaggcagggtagtactcatgacccagaggcagagacaggggcaagagcccttcggcccactgtgcccacagcttcacattgtgaaggaggccaggagaagaggaacaggcaggggtgaggagcagcccaaccttgggttttggaaaaagattgcatagctcattaaaaccctgacctcttaaaaaaaaaaaaaaaaaaaa

SEQ ID NO: 6560 - DNA, 702 bp, Macaca Fascicularis
  misc_feature (1)...(702): n = A,T,C or G
ttagagtcttagagctggaaaaagccnnnacaataannnnnnnnnnnnnnnnnnnnnnnatttggtggttctggacctttttgagaatcttagaaaagatgtaaagtttatccctagaaaaatgaatatgcctatatgcaaaatttgtttgatggcttcataggatccagagaccctgaagccatccatggctcatgtattcctgcttaagaaagcatagtcttgttctgccctctcattttacaaatgattaatgcaacccttttcaactactccagtgctgttgctgctgcaatgttagcaaatgcaagccagacagaagcacttgnnnnnnnnnnnnnnnacaaaaaatgttcaaacagtgtggatgtttacatatctgatgttgccagcatttaagccaattaatgatcatttcaacaaatactagctatagccagtttcccnnnnnnnnnnntcagcagtgctgccttgtcagtttgtgtgcgtgtgtgtgtgtctgtgtgtgtgaattcataaggagtgctnnnnnnnnnnnnnnnttgaaatggaacttcaaannnnnnnnnnnnnnnnnnnttcaaaataggatgtgttttcctaatgaatcagaagtaggcagtgagcattgttccacaggaataatttttaatttaatttctatcaaactagttgagaaatgagagcctgtctacccactat

SEQ ID NO: 6561 - DNA, 763 bp, Macaca Fascicularis
  misc_feature (1)...(763): n = A,T,C or G
cgcagaaatttaaagtcagacaactgagagtnngaattctaacttggccacttactgaataggaaagctcagtttcttcatctgtaaaatgagcaactaagtacctactactttaattctcacaaggctactatgagaatcaaatgaactaagcacacatatctagagcctgatataatgagataaatggtaatactatgggtgaacagaggttaggactaagaaacagatcgaaggatgggaagggtcacaggaatcatgccagggtatacaggggtaagattggcagcaatgaccatagcactgttcaagaggtaaggacactaggctaaaaattgatctcaaatgactagccatgagattaaagccagtaaggaaaagacaggaaacatcaatcaacaggggaaacagataatgaacaaacacccaggaagggaagaacatgatctgatttcctccagggtggtggcttggccatagggagaggcctctctgatgggcaccatggccctggggacaggatagtctgggtgcaaattgtaaaatactcggcatttgtctttgatgctattgtctccctggtccgtgcttgttctaacccctgatttcacccttattcccagaacccagtgattatgcactatctccttctgcctgatataaaacctgtcttccaaacattcattcatccatctctgccccgggatagatggcaagtaatggtttaaaacacaagcccgatcccacagttatttacattgaa

SEQ ID NO: 6562 - DNA, 781 bp, Macaca Fascicularis
  misc_feature (1)...(781): n = A,T,C or G
tccctgttcagaaaagccgcttctcatacctgcaggcagaaagactacctgtaaggtgagggcaggagaaaggaggcatgaggcatggcagaggccccaccaaggacagggtgacttacgaatggaggctatggacaccaccttccaccnnnnnnnnggacgttctcttctcannnnnnnnnnnnnnnnnnnnnnnnnnnnctctgaagaggggcagannnnnnnnnnnnnnnnnnnnnnnnnnnnnnnnnnnnnnnnnnnnnnnnnnnnnncccaagcnnnnnnnnnnnnnnnnnnnnnnnnnnnnnnnnnnnnnnnnnnnnnnnnttggnnnnnnnnnnncaggtnnnnnnnnnnnntgtggatggnnnnnnnnnnnnnnnnagcaccagacaccccctgggcnnnnnnnnnnnnnnnnnnnnnnnnnnnnngagaggcagagacacgggcaaggtcacagcagagatgagactgtcagtgtaggattagggtnnnnnnnnnnnnnnncctgtcccacctgaaatatctgttctggctgctaaggtgcttgtcnnnnnnnnnnnnngaacccataccgcgatatttctttagccggatcccatcggaaaagaagtactcaccaggggcctcagtggtggcagccaggagagagnnnnnnnnnnnnnnnnnnnnnnnnagtgctgggttaaagcctaagcagcactggggagacgtcccactggcctnnnnnnnnnnnnnnnnnnnnnnnnnnnngccccaagggccaaagcttcgcaat

SEQ ID NO: 6563 - DNA, 737 bp, Macaca Fascicularis
  misc_feature (1)...(737): n = A,T,C or G
accatcaggaccaccaagtgggagctccagaggccggctggctcgagagccaaggttgagtctgtggagttcaacgtctgggacatcgggggaccggccagcatggccactgtcaaccagtgnnnnnnnnnnnnnnnnnccctgtatgtggtggtctggaacctggcactgggggaggaggccgtggccnnnnnnnnnnnnnnnnnnnnnnnnnnnnnnnnnnaggccccaaatgccgtggtgctggtggtcgggacacacctggnnnnnnnnnnnnnnnnnnnnnnnnnnnnnnnnnnnnnnnnnnnnngtgcctatgtgctggcgctctgccgctccccctccggctccagggccacaggcttcccagacatcaccttcaaacacttacatgannnnnnnnnnnnnnnnnnnnnnnnnnnnnnnnnnnnnnnnnnnnnnnnnnnnnnnnnnnnnnnnnnnnnnnnnnnngtgggcagcaccatcggctgccagcgactggcagggaggctgatccccaggagctacctgagtctgcaggaggccgtnnnnnnnnnnnnnnnnnnnnnnnnnnnnnnnnnnnnnnnnnnnnnnnnnnnnnnnnnnnnnnnnnnnnnnnnnnnnnnnnnnnnnnnnnnnnnnnnnnnnnnnnnnnnnnnnnnnnnnnnnnnnnnnnnnnnnnnctggggtgggcggcagggtgcccgtgagaaatggaactgtctgtacttcagcct

SEQ ID NO: 6564 - DNA, 725 bp, Macaca Fascicularis
  misc_feature (1)...(725): n = A,T,C or G
agatgcacctgnnnntgannnngtnnnnaccccaaagctnnnntcccataggctgccnnnntgngtctccacctcatgcctggacaggnnnnnnnnnnctgtccgggccttggccggccctgcccctgcacccctgatcctcatcctgcaacccattccttgccagcatcctgaggctcctggcgggcatcctctctgctcaagagtgttgacctgtctcctggccgcacctgctgtgccccctcagccaagccatcatcacccccccttcatcatgtcaggcctcacaggagccaggccttctccagaagctgccccgacctccccccaagctggaccacgtaggccctggatcacacctgggggttcagatgtgggggtcctgtgtgcacgcccaatcagactgagcactcatgacactaccccagcacctctcccagggttaaatgaggaacgcgccactggacacatgaggaagaggctgttctgggagccggcagtgctgtgccctcacctctctgactttgtacaggaggttcctgcacctaggannnnnnnnnnnnnnnnncctcacattcaaggcctccttcgcagcctccccctcagtgaagcctccacacgtgcacggggcgtgtgcgcagccttgtgaagggctgggaccatttccccagactggggcctcaggagcaggcatggggtcctactgacctgtctccccagctccc

SEQ ID NO: 6565 - DNA, 774 bp, Macaca Fascicularis
  misc_feature (1)...(774): n = A,T,C or G
gttacctcgcttaataaatnnnngccacatcatgcagaaagaggtatcctcatgttggggtttatagaatatgtcagtttgtcacttgtcacttatttagctttataataaaaattaataggtaaagcaatggaatatttgcagtttcacctaaagagcagcataaggaggtgggaatccaaagtgaaattgtttgatatggtctacttctnnnnnnnnnnnnnnnnaccattaattaaaataaagaattggatttgcaagtttgaaaactggaaaagcaagagatgggatgccataatagtaaacagcccttgtgttggatgtaacccaatcccagatttgagtgtgtgttgattatattttttgtcttccacttttctattaattatgtgtaaatcacttttatttctgcaggtattttcctctcaaataggatggcattttgttttgtattattttgtctttcctcatgaatgcactgataatattttaaatgctctattttaagatctcttgaatctttttttttttttaaatttgggggttctataaggtctttatttcccataagtaaatattgccatgggaggggggtggaggtgggaaggaaggggggaagtgctagtatgcaagtgggcagcaattatttttgtgttaatcagcagtacaatttgatcgttggcatggttaaaaaatggaatataagattagctgttttgtattttgatgacnnattacgctgtattttaacacgaatgtatgtctgtttttgtg

SEQ ID NO: 6566 - DNA, 2517 bp, Macaca Fascicularis
tatgcccaggctatttttgatacactaaacttattgttgacaaatttcagcctccgtaatttttttttgtaattacctataggcttaaaagtcattcattgctcttctagtataattagtagttccgtgattgaaagtttattgtaattctactatcttcaaattagatacattttcaaaaggaaaaaataattttttagaaacatcttatattgactatttcctgaaaaaaatccaagcagttaagctttctggatggtaacaaagtaccttctaaaagataagtgctatgacaccatgtatgaatgtacttctcttagtaatttacctctgactatttggtgtcttaatgctttggtttatataatctcaggggttgtctgcaaaccaaaactgacatattctgtggttagcttttattacttttttttttttttttttaacagaatgctttgctttggttctatttcttctttcttcttttgtcttatgtggaataactagtctccatgaacttcacttgaaagagcctgtgaaagttagatgagtctaaaagtgctctttgaagtagcagcaaactgggagtatatgctctgttatatagaaataaattgtccttgctattttcttacatttagctttgctaaattgtatatacattgagctaagaccttaggtaattcactttctgcatgataaaatgacccaataaatattccactttgcttaataatgtacatacagtgcattattttttctatttgtagatgaattcaatgacagataattgtctgttccctgctgaaacggaagaaatctagttttttgtggacatttttgcggtcttacagataaggtacatgaagagttttgcagcagtattagtggttccgtggctgcactctattatcatgtgtaaatttttgacaatgattggactagaccttttcaaatagagtctgagcctgtcagacagtggaaatgtgctgtaactaagtagcatgtaaatcagttgattgtaaaatgtttcactgggaacttattttagctatattttacttggacagactatgatacaataatctacctgtgcatcagttagtgggtgctgcagggtttcttactatttacataaacattttgtgcagtctttgttacaaattttcagaagactatactcttaatttgaaggactattttttaattatacctcatttagctaactagtattctaatacctggtagaaaaacagtgagccagcttttaagcatctaacaaaatttagactctatgttttgttttgaactgaagacatcattgggaaaggtaggaaatattagtttagaatagagcatacatgtcatatccagtagcataaaaaaagtattatctccctgtctccattaataaatttagctgtgcaatataggtgcgtttttgcagaagtttctaagtaagagattataactccattttacaggttctgaatgctgagagtctatattaaggcttataaagtttttcctgtggtcagtaagtgatacatttaagcagacattcttttcaagttcatgacttagattcctttacaaatgtagttctcagtctttaaagatgagcttctaagctgaagatttgaaaaccacatttcattatgttggtttacttatcgtaaattttaagcactcatttctgcaatcaggtttcttataatttttttttttaaacagaagagacattcttttttccttgttacatccaaagggcgcacaggagtggttggaaaggaatgtctaaaaatgaaatcccttgatacagagggacccagacggacaggacatgctaaaagaatttcaaattctagcacgactttagagtagaatcagtcatttttttagactaataaaattaatgactatcatgttcactctgaaaaaaatctaaatgaaatgtacagaaataaaacttagcaaacaattattctagggatattttcagattttacttcatttcttgaaatgcgtgtgccatatgcaattgcatttcttgtgccaagaaactaatagaacttatttcactttcttaccttttcttaaaatgtgaatttagttattatagttcaattttatgaccttacagatgggttttattttgtttgcagctgacactgcagttcctttcatgcaaaataccataaactgtttgatgaaaatcatgcccctaatggaaactctctagtttttccatataattatcctactgtacatgtttaaacatattttatttttactccaatggcttaatgtgaaaagctcctgcagataagtggacctgtcatgtggttaatcttgtttaagccagttcattaactgtgtactgatactgatgctgtgttttttttaaatggattttattccaggtgaactttttttttataataatgttcgtctaaaataaaaactacgtaatgaaaatgaaaaaaaaaaaaaaaaaaaaaaaaaaaaaaaaaaaaaaaa

SEQ ID NO: 6567 - DNA, 689 bp, Macaca Fascicularis
atgtgggaagctcaattcctgccaatccctgactcacccccacaggctcttgtaacccagcacttgagctgctacactatcatctttcagaaagcacccctggcagcaggatctgtggggcttgggcaatgttaggaggtttttcctcatcaaattttttttgttcagtagcctatgctccaaagggcctaatgtccttattttgtctgccagctacacaaagcccccaccatggcacccagggaccctgaacatcgccatctctatcccaaaccaagtgtaggctctcccccagcaccccctctcttcctgtatggctggccatgcccggaggcgctccagccagagaccctggtgtcctcagtggctcccttgctccgtctcacctgctctcatgttcagtcaccaaagtcctgtcagtgccttgcagatgtctttttattctttcaagtatggaaataatccttttatttggaatatattattgtaaaatatttaagcaaatttatcccctccccaacccagggacacccatgattaacactttgctgtagaaggtccttcacactcacgaatttgttaatttgaatgtgtaaagatctctcttgtttgctttaaaggctgcttagtagtatttcactgaatgtaccataacttatgtaaccaatctgctttcagtggacatgacg

SEQ ID NO: 6568 - DNA, 2548 bp, Macaca Fascicularis
ggggggaagggtcgggcggaggggcggcggcggccgcggggccccgggggcgggtgccaggcctcactgctgtgaatccgccacgccgggggtcctggaggttgccctacctcagtgattgggtagcaactcacacctcacccaacttcacgagtaaggagcccagatgcgtcgggagaccctcaggggcttctgtggcctctgtgcccgatgacctgtggggcttcagacaaggcctcagcattactgggctcagcttgttctgtgtggagtgtgaggtgaggaaacccctctgaaaagatgtcgatggggccacacttcccacccccaccctacagccccaggtcctggcccagtccctccactgcctcgaagagtcagtctgcccagccttttcctttccggcaccaccagccatccccgagtgccctgtagccactcaccactgctgccacctctctggccaatggccctttcactggcctggtgactggaacgtgggcatcacccacacaggctctgacccgtggcttcctgctggtagctccaggcacccccatctcacaatgccgtttcctggctcggacactgttgagtgaggagcctggtcctgtctggtggtgacaggggctgcaggctgggcccctggcatgccctaaccatgcaacagagtgaggctggggcagcacagagcccccacctggcccctgaggagcacctgcggtctgtccccttggtcctgcttgtggctggaccggccctgcaggagatggtggagccgtcaaggaggcagggctgccgctctgtgtctgctgctcggcctcttgctccgagaccctcccgagtccctgggaatggagagtgcagttctcgggcccagcctggccttcgctaggagtttggggagtgagaccctgcctgagatgggcagtaggagcctgtgttgaccttggggaatctgagcttttccaagggtaagggacccagggtatgcaggccttcagtgacatcaggttgttgtcatcctctccctccctggcctgtcacgagcttccccaggccctggcagtggctcttggatgctgctgaggcacctgctcgccatgacccagcctcactctgccctccaacttaggtgagggggcagcccacagacctgctgctcagtagcagggcctggccaggtccctgctgttcccagcctcagtttaccatctatgaaatgagagggacccctctccagagcccttgggtgccagccttagtgggtgtggggatcacatgaggtggctcatgaggacacgctctggaagtcgaggggctgccacgtgcagaggaagttcccggcctgggggcttcatccaggggtcccagtcaagagtggcccgaggccatcctccaccaggcatgttccctctggctgcccactccctcggggcccgcatgtcctgccactcgccactctgagcacgagctcaccttccagatgtggccagggtgtgccagctcctctctcctgtgtgttggaacccggggaggcaagagcagatcacaggtgcatgagggttacacccgccagctggtctgctgggatgggagtggggggcgggtgccaggcctcactgctgagagaaggacgtggcggagccaggatgagacagcgttctgtcggctggccatgctgttgcttgcgtctcgaatccagttctcgaggaagtgttgacagtgtgatgctaatttctgcttttcttggcattgggtagaagcaggacatctgtgtgtatgtgtgtatttaaattagattatttataataaccagagccagccctcgcactggccaggatcctcctgccgactgatgtcgctcctgccctctgccggggtccggaacgccatctcaggaggtagctctcagcagagtgaggattcctgctttttttagagttttgtgtgactttctaaattatccatctatcccttaaagtttcactatgtggagaaaattccagcacttttgagtgttgtggcaacaaccgagggagtgcaggcatcactgtgttgtggcttgttgactgggaatgtcacccctgccagggaactcctcctcacaggggacgtgggacggccatcagaccttccagggtccaggtggggtcatcccggccacggtaacaggtgaccgtctctgagaaataagcgaggtagattcggccatcctcactctcagacttggggtccccacccaggccaagcagactccctgtaccccttgcctgggagcaaaccaccaggacgcagtctccacgccgcacctgccgcgccccgccctgccctgcccaggaaggaacctgtgacctttctgtctgtgactgttgccgagtctctgtctcgtgtcgtagaattgtggataattgtctagtgaccctttcatcactgtaaccattgcgcctggcctagatgtcgtgttttggatgctgtgttttcaataaatgcctctggggccctgcttttacccgcaaaaaaaaaaaaaaaaaaaaaaaaaaaaaaa

SEQ ID NO: 6569 - DNA, 662 bp, Macaca Fascicularis
  misc_feature (1)...(662): n = A,T,C or G
gagttaatagtcactcacgnngctgagttattcacctgtcattnnngacacggatccnnnnnnnnnnnnnnnnnnnnnnnnnnnnnnnnnnnnnnnnnnnnnnnnnnnnnnnnnnnnnnnnnnagtctatgtagataaacatataccgagttctggcatggccagacctgccggggactgccatggcttagccgcccctccagttgtgtttagtggagcattggagaggcagccacctgcccatcagcgtcgggaannnnnnnnnnnnnnnnnnnnnnnnnnnnnnnnnnnnnnnnnnnnctggggattgaaaaatagcagttgtaagannnnnnnnnnnnaatcctcatcgaaaggacctcatctgatgatggtggtttgatctggctccgtctcttacttagtgatttccattccagtgctgcctgccctgggtaannnnnnnnnnnnnnnnnnnngcctctgctgtccccagagctccggccnnnnnnnnnnnnnnnnnnnnnnnnggagtctccccaggacggcacggcacatgggcagcaccgcggtccctgggtccttggcgccaacctgcaaccctcatcagaggagggtgagggcgtgggagtttcctttcagtgtgtcaaagacatatcagctgcgctccaaaaagagccaac

SEQ ID NO: 6570 - DNA, 2628 bp, Macaca Fascicularis
  misc_feature (1)...(2628): n = A,T,C or G
aatataatatagagacatgaagatgtgtacaatgttcttatttaaatctatgtaaacatctaggttaaattctgtgattaatatgtatatatgactctttttgaaaattattattactaataggttgaaacagagaaaatgaaagagagaaagaaagagaaaggagagatgccacctaggaaaaaagagtttttcacaccaggcttttattccctcatattgagctaaatttaggaaaaagaaataaaggagagaaaatggcaaaacatgctctcttatgcagaggattatagaggaagataaatctttataagaaataaatgtggtggcaaaagagtgagagttggagaatcctttgcttctgtgtgtttaaaaggtataaatatacattttatattttcttactcattgtattgagaattaaatgaggtaaagtataagaaagcacccatcttaattaatgacaaataacagtttttcaaagaaaaaaataataattgtttttcctttggctttcccaaccttaacagggttaccaggtagcactttgtaaaacagaattggaaaggcataatggttaaaagaatggcatttacaattcaacacattgacatttcaatctgagtctaccacttactacctatgtagctttaggcaattttttttcactcttttaatgccctgatttcctttcatagtataacataggcaatattaacaaccttataggtagttatttaatgagatactataataaatatgcttaatgcagcacctggcttatagcaggcacactacagctgaggaggttattattattacaccaactagacagcccaagtcccaatatttcactgacattgccctgtcactgattctagctacaaccttgctctcaaatctccctaataatttcaagtttaaaaagcctctgtttacatagaggacagaaaactaacttttatcaagaacctatggcaatccatatttctaggcttggtataatattatcaggtcctattttcatcaactgacacctttacgacagctcaggatcactgcctcgatcactgcccctgagtcacttgatttctctcctggctgttggttaaactcccaaggtgctcgcttatgctcttagaaaaaaagtctcatgtttccctctctgacctcctgccatctgccaggcaagaccacaactgctcatgtctcttgggagatcacaactcctctgggcgaaactgtcccatgcccgtggtccccattgttcacacaattgtagctacagggaaagaataacatatttccttttattatttttgtacttacaacttgaatctggtcttttcattaagactacacagcacctacagaccaagtggcaagtttttttcataaagtaaagaaataatagtggggaggccaggcacgtnnnnnnnnnnnnnnnnnnnnnnnnnnnnnnnnnnnnnnnctgggcctcctaaagatcagnnnnnnnnnnnnnnnnnnnnnnnnnnnnnnnnnnnnnnnnnnnnnnnnnnnnnnnnnnnnnnnnnnnnnnnnnnnnnnnnnnnnnnnnnnnnnnnnnnnnnnnnnnnnnnnnnnnnnnnnnnnnnnnnnnnnnnnnnnnnnnnnnnnnnnnnnnnnnnnnnnnnnnnnnnnnnnnnnnnnnnnnnnnnnnnnnnnnnnnnnnnnnnncaaaaacaaacaaacaaacaaacaaaacaaaacaaaacaaagaatagtaggggaggtaggttagaatagtgggggaggtaggttacataagacaccattaagtaagcagtgcgtgacctctctagctcacaagcgtgatacctgaatgttccatctctgttaacctctatttaccattggctaggggccagctttcttttcctcccaggtctgcattaaaatagatcttccagcacagagggcaggactcatctccaatgaagtgtcagagacagagccctagactccatcctaggttttgaacatagaatcctcattttcatttccaaattctaactcttgtaagtattggctatgataatgtccacttacttcaataaaacattctgtgctcccttgcagtccctaagttatacctaaaaggaaaattaaaggaaaataatcctacataaattcaatcgtattagtaagtcttaaataataccttgtgtaggctatcactgagctagtatgctgtgctgagccaaaccaagttcttactatattctctactgcagtgaaagagtacagtggagtctgatgactcagcaaccctcgtgggtttttgcttctataaaacaaccacatcaacaattgtgcaaacatggatctccccaagaatttgcctgacacgtctggctgcttatccaaatttgtatacctacaaataaaaatgtttcaaagaagacaacagccagaaaaaaaaaatgaactataatctctgagaataacagacaaattagcttttatctaaattatgcctattcaaggaacaggttgacattcagcacaaagtgaaaacctaccccaaaggtaacatgtgaattcacctgaactcctcaatgcctaggaaagtaaccagcaaaaaaaaaaaaaaaaaaaaaaaaaaaa

SEQ ID NO: 6571 - DNA, 705 bp, Macaca Fascicularis
  misc_feature (1)...(705): n = A,T,C or G
gagaannnnnnnnnnnnnnnnnnnnnnnnnnnntaaggtttgtgacaaggctttccggagtgattcataccttgcaaaccatatgagagttcatactggagagaaaccttacaagtgtaataaatgtgggaaggtttttaatcaaaaagcacaccttgcacaacatcagagagttcatactggagagaaaccttacaagtgtaatgagtgtggcaaggtttttaatcaaaaaacnnnnnnnnnacaacatcagagagttcatactggagagaaaccttacaagtgtaatgaatgtggcaaggtttttaatcaaaaaacaaaccttgcaaaacatcagatagttcatactggcgagaaaccttacaagtgtaatgnnnnnnnnnnnnnnnntactagnnnnnnnnnnnnnnnnnnnnnnnnnnnnnnnnnnnntgtagggaaactttagaaatataatgattctcacaaagtcctcaataatgctacagtcattgaaaatcattagagannnnnnnnnnnnnnnngatctacaaatgtaataaatgtggcaaatttttcagacatcgttcataacttgtagnnnnnnnnnnnnnnnnnnnnntagacatcagagaatccatactggacagaaatcttaccaacgtcataagggtggcaaggtcttcagtctnnnnnnnnnnnnnnnnnnnnnnnagaaaattcatt

SEQ ID NO: 6572 - DNA, 770 bp, Macaca Fascicularis
  misc_feature (1)...(770): n = A,T,C or G
agagagaggtcattcantnnntntgtgtgtaataactnnntactgaattgtacacataaagaaaagtgaacaaattgtagttttaccatctgtagaattgtcataatctaaatctgtttcgtaatgatagattattnnnnnnnnnnnnnnnnnnnnnnnnnnnnnnncaatatttgtaagtgtttctttttcctggctaacttatgagtacagccacgaggtcaattcctnnnnnnnnnnnnnnnnnnnnnaagggtagctgcatttttaacttagatggataatggcccattaactttccagggcagccttctgcaacttacannnnnnnnnnnnnnnnacannnnnnnnnnnnnnnctatgctcacagcaggcaccagtgccattgcatttttaatttttgttactttgaaattatatctttttgttatttttatgtgtttctgtaactttgagagaaattgagcaagcctgttaaaaaatacatttattcaccaatttcatttatagnnnnnnnnnnnnnnnnntcgggtttgtaaatgtttgtcttactgactgatgagcactctttgtaaaatgtgttgctcaatgaagcctannnnnnnnnnnnnnnnnnnnnttcaaatattttcttcagttagttatcccctttttctttaattgtgggtttttgtgtcctcgatgatgatttttatttctagtcaaatatctcaacatttcccattaaagttttcnnnnnnnnnnnnnnnnnnnnnnnttcccattcacaa

SEQ ID NO: 6573 - DNA, 744 bp, Macaca Fascicularis
ttcagcaaacccatccagtgtaccacgtaaaactggtgggccagtaaatctcctgacaataagcctgtttggtatggtcttgatatgaacagagggtctcagtttgcttatggagaccaccagtcacctaatacagccattactcagatgactttcttgcgccttttgtcaaaagaagcctcccagaacattacttacatctgtaaaaacagtgtaggatacatggatgatcaagctaagaacctcaaaaaagctgtggttctcaaaggggcaaatgacttagatatcaaagcagagggaaatattagattccggtatatcgttcttcaagacacttgctctaagcgaaatggaaatgtgggcaagactgtctttgaatatagaacacagaatgtggcacgcttgcccatcatagatcttgcccctgtggatgttggcggcacagaccaggaattcggcattgaaattgggccagtttgttttgtgtaaagtaagccaagatacattgacaatgagcaccaccatcaatgaccaccgccattcacaagaactctgactgtttgaagttgatcctgagactcttgaagtagtggctgatcctgcatcagcattgtatatatggtcttaagtgcctggcctccttatccttcagaatatttattttacttacaatcctcaagttttaattgattttaaatatttttcaatacaacagtttaggtttaagatgaccaatgacaatga

SEQ ID NO: 6574 - DNA, 685 bp, Macaca Fascicularis
  misc_feature (1)...(685): n = A,T,C or G
acagagcatgaagaacatacgcnnnctgtnnnnncatcagttattttcctcatccnnngagactttgacaattcagggctcacagacggcaggggagaattctcaggcttcccttcctcctgaatgacactttttaaaggaagtgatgtggaagttgttctagaagttagatggacagtgggagcacattcgtgagtggggcttgggaggtctcaaaaatggcactttgattttaggctgggcaggcaaaagtctcacggtaagatatatnnnnnnnnnnnnnnnnncccacaactgcattgtactaacnnnnnnnnnnnnnnnnnnnnnnnnnnnnnnnnnnnnnnnnnngtcagggtcaagccacattataacccattcgggccggatgtgaagggttctgactcacgttggtatttaaatgctgttactttcccaatgcttagtagcacttgagactttatttcaatcgacaaaaaccaagaaggtcacagaagtagcctaatagtcctccctggtcatatnnnnnnnnnnnnnnnnnnnnnnnctggnnnnnnnnnnnnnnnaggttgcttgctgctatcttgaaaaccacanggaagattcagcttcttggggacctcagagcctatgttcatatggaagcccacccatataagcctcacagagcaaatcacagcaatgt

SEQ ID NO: 6575 - DNA, 722 bp, Macaca Fascicularis
  misc_feature (1)...(722): n = A,T,C or G
gagctacctgcaganncagatgtcccctgnnnccacgccacagagatctctccctccatctgtcgcgtatctcgccacacctgacctnnnnnnnnnnnnnnnnnnnnnnnnnnnnnnnnncctctgcccagagctctacaccacagcctgggcacacgtggcagcaagactgataaagnnnnnnnnnnnnnnnnnncagaccctgacgcaatccggagctgaccagcacgaggcctggaaccagaccactgtcatacaccnnnnnnnnnnnnnnnnnnnnnnnnnnnnnnnnnnnnnnnnnnnnnnnnnnnnnnnnnnnnnnnnnnnnnnnnntgaatcagcgattcagcaggtgctcaagcnnnnnnnnnnnnnnnnnnnnntacacggaatcttgactaactcnnnnnnnnnnnnnnnnnntgccttcctgtctggtgcccannnnnnnnnnnnnnnnnnnnnnnnnnnnnnnnnnnnnnnnnnnnnnnnnnnnnnnnncatcctgttaactgatgcttttgacttcaccgatgagtgtttaaattnnnnnnnnnnnnnnnnnnnnngaaatgtttatnnnnnnnnnnnnnnnnnnnnnnnnnnnnnnnnnnncaatactcaggagaaccctgcctatgaggaatatataagaccactattacaaagttggagatccaagctatgaaataaccaacagtattcaagaagcaaccagcacc

SEQ ID NO: 6576 - DNA, 107 bp, Macaca Fascicularis
tgagatttggagctgggctcctataaacgtacggtgatagttccgtggcaagctgagaccgcccggtggcctggccgggtctgtggctgtggccatgagggcccagg

SEQ ID NO: 6577 - DNA, 819 bp, Macaca Fascicularis
cacaggacatttttttttttcccacagatagaaacagagggagctactctcagcctacaagtaagtatgaaggaggctgatccttgagattgttgcggtattggtcaggagcccatgagggagctcacccaccccacagttcctcctttagtcacatatccagagggatctgaccaggtcctgtttttgttctaccccaatcattgacagtgcccagggctctgatgtgtctctcacagctaataaaggtgacactccagggcaggggcccggatgtgagtggggtgttgggaggaacagaggggactcagctgtgctatggggtttctttgacttggatgtattgagcatgaaatgggctgtttaaagtgtcacccatcactgtgactgatatgaattttttcatgaatattttctctatagtgtgagacagcttccttgtgtgggactgagaagcaagatttcttcacgccttccctttgtgacttcaagaaccctgaattctccttctgcaaagacacccaaatgtgtcttcacccctgtaagcataatgtgaggaggtggggagaacaccccacccccacgtccaccatgacccccttccccacactaacctgtgttccctacccaattacctttcctgttccagagacattggggctcggatgtctctatctctgtctcaacttcatggtgcactgagctgtaacttcttccttccctattacaattagaacctgagtataaatttactttttcaaattattatcatgagaggttgatgagttaattaaatgagaagattcctgaaattgagag

SEQ ID NO: 6578 - DNA, 2612 bp, Macaca Fascicularis
attctactgtgttgcttcagactcagtggtccaatggctttgttttattggatggaacatttgagacccggagtagttaaatcacttgttcacattcatacaataaattagaaatagaaaaggaaccagggcattttcctctagagtataaaataaaatcagatatacatgtaaggtttagcacatacgcatatgccagcatttaagagtgatttgcagaagtgttggttagctactgtttatacttcaagccataagttaatgttttctttattctctaagatattgtctcagtcagctcttgctgctatagcacaataccatacatgaggtggcttaaacaacaaacatttatttctcacagtctgaaggctggaggtttgtgatcaggatgccagcatggttggtttcttggtgaagatactttcttgctgtatcatcacatagcagagagagagaaagcaagctttttcaagttgcttcttataggggcactgatcccatcagagggatctacccttatgacctaatcacctcccaaaggcctcatctccacataccatcactttggggattagaatttcaacatatgaatttgaggggagaacaaatattcagaccatagtattataaatatgctccttgtggtcactattaattgtcactttgatagaagtagaaggggagggcctgcaagtaaattcacagtctttgtcataatgaaattttggtggattttcccctcttatatccattagtcaaccaagtttcccagtgactgtttgaaaaatattgtagtcttatggctttctaggctgtcttagatgatcacttggccaatattctcaaatcaatcaaggacagaaggattttcagacatatcctatgtcccaggtctctgtagaatattagattccatggactttggttcacgtctcagcttaatcatatttagcggtgtggccttgagcaagttatcttctgtgagcttctgtttctcatttttaaagaaatacattggactggatgatggttttattctctgtattgctgtcaccagagataagcaggcctcttggcttcagagtgctgagaggtgttctttgtctttggttgagtcctttccctattctgtgcctctgcttctccaatctgtagcagtaatgctaagggagtaatggtaatagcctaggagggactgaagcagaagacactgtgtggctataaacctgactggtgatatcactctgctgttgtagcacatttcttaccagtgaatgttctaaacagacttctttcctttttttttcctctgctctacaaatgtgattgtgaagatcaacttccccatctacttgactcagaagtcacagagaaagctgagcccagagggagggatgtgtccattctcacctgggagacaactttggacccgcacaactggaacaccctggaaggcttccctcctccctcatgctccaaactttcaaggcaagatgctgctttgatcttgggccctctgcagaaaatctcccttggcaagcctccccatgacagctgggctccgcaatggcaactttctacagacaacactgaaaaaaatctcaacgctaagtaccccggagaagacttgctgagggaagccagtgtgttttagaaacagaacgatagaggaaagaaaaatatgatgagacaatcaagtttattcattcttcctcaaatgatctggacttagtcttatctgcctagcgaaaagttgggctgtgttcccaacagtgggagtgaaaaagtagcaataccatatacccacagccgaagtgatttcagcccccaccctgaggcctcacaggagcagactggactcgtcagcgcctgtcagtcatggcctatgctccttgctaagccttttgtcttcctggaccaagatccttaacctttgtcacatcactgatttggagtacctgctggatcacttggcagaagtgacaccagctctggagtacctcagtctgctgggcaacgtggcctgtcccaacgaactggtcagcttggaaaaggatgaggaagactacaagagatacagatgctttgttctgtacaagctgcccaaggagaacctactttctcagctctagcccgtttacatagcctctggcccactgagtcaacacaggccttaaatgatatgtattgaggctggcaggagtccctgttagagattatgcaacccttgttaatcagttctttagacaagttaacataaaaatcctcaaaaccatgaataattggagaatgttgaatgtttgcctttatctctcaaatccattagtaactggagttgagtaccttttctctgtttgatctacaaaacagcactggaaaaatgctttacattatcagcatttggtcccaccctgggtcgttgtttagaagcatcaacacatgctttctccctggcataatatgggcagccagagttctgtgcaagggcagctagacgagtccgatgtcatatccaatctagccgcacatatatccttgtctttataaaaggctttaaccctgcctcaaacaataaaaaagcacttgtgaactgaaaaaaaaaaaaaaaa

SEQ ID NO: 6579 - DNA, 392 bp, Macaca Fascicularis
aaccctccgggacaggctgcatcagaagaggtcagcaagcaggtcactgtccttcggctatggccctgtggatgcgcctcctgcccctgctggcgctgctggccctctggggacctgacccggccccggcctttgtgaaccagcacctgtgcggctcccacctagtggaagctctctacctggtgtgcggggaacgaggcttcttctacacacccaagacccgccgggaggcagaggaccctcaggtggggcaggtggagctgggcgggggccctggcgcaggcagcctgcagcccttggcgctggaggggtccctgcagaagcgcggcatcgtggagcagtgctgcaccagcatctgctccctctaccagctggagaactactgcaactaa

SEQ ID NO: 6580 - DNA, 722 bp, Macaca Fascicularis
  misc_feature (1)...(722): n = A,T,C or G
attattatatttggtgtnnnnnnnnnnnnngtcatagttgcaattacactactgattttatcagggatctggcaacgtagaaggtaagatatttaaaaggagcgattgaaagagcattttcttatttcctcatgacttggacaaatcaggagaagatttnnnnnnnnnnnnnnnnnnnnnnttaaatttgaaactttgaaaaannnnnnnnnnnnnnnnnntatcacttatgctcttgtcttcagatatatttgagagtccaatgtcctttanntaactaggctcattccaggagtacctttcgttgtattctgtaccacataaatgtttcatannnaggattaattttaatatctgtgttgtgattttgtaagctgggtataaggagctaaacagactttttgggtaggcagagttaatatttggtagtcatccacatccaaatgccagcagtttcatagtttcatgcctccataccttgnnttacctcttgttagcccagtgcatgcggannaccatcttgtcccagatgcttttgtactgttatnnntccataacaccccacccccnnntccaccatgaccctcttcgccacgatgacctgtgttccctccccatttatctnnnnnnnnnnnnnnnggtggggnnnnnnnnnnnnnnnnnnnnnnnnnnnnnnnnnnnnnnnngagttgtaacttcttcattcnnnnntacaattagaa

SEQ ID NO: 6581 - DNA, 1938 bp, Macaca Fascicularis
  misc_feature (1)...(1938): n = A,T,C or G
atatgagttggggagcctgtttacaaggcttttgtaagaactaaggcattgggattgaggatggaaagatttaggagatagaatcaaaggtattgagtactcacaggatatcggggaatggagaggaggaatctaagattatttctctgtatctggacttggtaataagatagggaatatgggaggagaagcagcagcaagttatgggagatggctgaacaagtggttcattttagtacttgtatttgagatgccagtgggacatgcaagtggatctgtgtctggcaggccctggatgtatgggtttaaagcttagaaaggtatttggggctgacttttgattggggagtgatgaggctgtagttaaagccaggaacatgggtaatagcagcctaaagaagtatacagaataaggagagaggacttctaatgattgatcgttggggaacccagcttaagggttgagaggaagacaaggagccaatgaatgaataggatgggaggggagttaacaagggttggaatgagaaccaggatgaaataaaccaaaggaagagaatcaactgtgcgttttcgccaccccagtcccagtttgtctggaagcctctggagtattctctgttttatgaggcacctggtgtgtcggaggcaagtaagaggtcagcactcccttgttctgtcactgttctaagccataagggatgcatgtctcattcattgaaaagtgaactcatgtttggtttataaacttgaagttttcatttcaaactcacttaggggggaaattctaaactgccatgaccacgtttggcccaggcttttggaaacagctggtgtgtgctactgccagactgaatctgagcatcactatcagtaagtaggaatctgaaattgttccaaagagaacacatggagtgcagctttcagatgacgttaggcagtggtggaggggctgcctgcaagatggtgctgcccctgtccccagagggccaggctaggcctacagtgtggcttgggaaaggggcaagtgtcctcaagaacaggaactcctctgctattgctgtctccccattcttcgtagcctgccttagcccagagatgtgtgttgcctttgggagcaaaccttgtgtagttgtttgcagattggggcatgcaaatccttctgacatgcacacgtcctgccgggtgcagcataggaagtgctccctggaccggctcaccaggactgcctttccgccaagcctcggtgttctgaaacggattgtgttagttctgcctgtttaatttgaagcctgtccagaatgtcctaatcatcctgaaaatagataggtttgtttttatctcagtattttgaccttgaaagctttatttgggcaattctgttaacacaccctgcggttctccagtggagcctggtgactgagggaaagcaaacgtgctggagagccgggctcccagagtctcagccaagcttcagacaccaaatccatccttgctcatgaccctgcgtaagttactggacctcactgtgcctcctttgttcatcaatacaatggtttaataatagtatctagcctcatacagttattccaaaaatatgctataattcagatcttgtaattcagaccttataagagtatccatgctgggcacannnnnnnnnnnnnnnnnnnnnnnnnnnnnnnnnnnnnnnnnnnnnnnnnnnnnnnnnnnnnnnnnnnnnnnnnnnnnnnnnnnnnnnnnnnnnnnnnnnnnnnnnnnnnnnnnnnnnnnnnnnnnnnnnnnnnnnnnnnnnnnnnnnnnnnnnnnnnnnnnnnnnnnnnnnnnnnnnnnnnnnnnnnnnnnnnnnnnnnnnnnnnnnnnnnnnnnnnnnnnnnnnnnnnnnnnngtgggcgacagagcgagactctgtctcaaaaaaaaaaaaaaaaaaaaaaa

SEQ ID NO: 6582 - DNA, 738 bp, Macaca Fascicularis
  misc_feature (1)...(738): n = A,T,C or G
tnnnnnnnnnnnnnnnnnnnnnnttnnnnngagagtcgcnnnnnnnnnnnnnnnnnnnnnnnnnnnnnnnnnnnnnnnnnctaagtgctgtatgttaccttgttatagcgaccttgtgaggagggaagtgttagnnnnnnnnnnnnnnnggggaaaaaaatccatcttgccaggcgcttgtccatccctatgcgcacctctccaccgttccatcccaggcaagcagtctgtaacgtggtgcagttnnnnnnnnnnnnnnnnnnnnnnnnnntcttgcttcatttgggttttactttgctgtgtcattgacaagcttttctatgcatttgctcccatgtannnnnnnnaggttggnnnnnnnnnnnnnnnnnnnnnnnnnnnnnnnnnnnnnnnnnnnnnnnnnnnnnnnnnnnnnnnnnnnnnnnnnnnnnnnnnnnnnnnaagaattggacaaaacacacaaagcaaggaaagaaggaagcaacaaaagcagagacttattaaaaatgaaagtacaccccacagggtgggagcannnnnnnnnnnnnnngggcccggttacagagttttctgggatttnnnnnnnnnntagaggtttcccattggttacttggtgcacaccctatgtaagtgaagtagtggaccatactcagtctgattggttgcaggagaggaccaaccagaggctgaagttataaagctataccctatgcannnnnnnnnnnnnnnnncgcaacc

SEQ ID NO: 6583 - DNA, 712 bp, Macaca Fascicularis
  misc_feature (1)...(712): n = A,T,C or G
tccnnntcactganntctgttgttnnnnnnnnnnnnnnngnnngaaggtcccaagaaaagtgcatctgggannnnnnnnnccagctaggtggtcccaggctcctgtcttaggggtgnnnnnnnnnnnnnnnnnnnncnnnnnnnngtctattgaaggacagacttccccccatggtcactgcttcactagccccaccccaccccagattggggttctacctcccaccccacacccttgttgtggggggacttccagggggctcctnngcagccgcctccactccttcctccaccccatctatnnnnnnnnnnnnnnnngggcattttgtcttttttattttagattttgttctgtctctttagtaagtttgtagtcaaagatgctgctgggcagatgggcagggaagggatctgtctgcccatctgtcccagggggtctgagaagggaagccttgggcgagaggaaaccagttgcaatactgtacttcctggccagtggccagaggatgcgtgcaatagcagaggccaggtgaccccttcagccttggcctctgcccctccctgggccctccctccctgctcctccctggtgttggtcagtccttttctaaagctgtcctctcgtgtgtgtctggggcatgctcaggctgggccctgtgccctgtctgcatgcctccaactgtcatgctgtgctcgagccccaataaagaca

SEQ ID NO: 6584 - DNA, 723 bp, Macaca Fascicularis
  misc_feature (1)...(723): n = A,T,C or G
gctgcgggcgcgggagatgcaccacacagactacaagttccgactggccaagtccacactgaccctcatccccctgctgggtgtccacgaagtgatcttcgccttcgtgacggacgagcacgcccagggcaccctgcgcttcgccaagctcttcttcgacctcttcctcagctccttccagggcctgctggtggctgtcctatactnnnnnnnnnnnnnnnnnnnnnnnnnnnnnnnnnnncggcattggcaccgctggcgcctgggcaaagtgctgcaggaggagcggggcaccagcaaccacaagaccccatctgcgcctggccaaggccttcctggcaagaagctgcagtctgggaggggtggtggcagccaggactcatctgcggagatccccttggatggtggccnnnnnnnnnnnnnnnnnnnnnnnnnntcaactctgctgggaccccagctagggctggactcaggcacctagagggcatcgctggacaacccagaaccagacgcccagctgaggctgggggcaggggagccaaaagcagcccccgcctatcccctacccccagtgtggcagtccgagagatggggcctcctctccctgcacctgccctgtccctggtgcaggggcgagctgaggagtccagggcagaggtaggggcnnnnnnnnnnnnnnntcaccagtgtccccaggatgttggcacgtgctacatgcgtgga

SEQ ID NO: 6585 - DNA, 735 bp, Macaca Fascicularis
  misc_feature (1)...(735): n = A,T,C or G
tgcacaggctggtcttgaactgannncaggtgatccatccacctcggcctcccaaagtgctgggattacaggtgtgagnnnnnnnnnnnnnccaccttcttggttttaaaggagatgcttctaatatttccctatgtggaatgatgtttgtttcttnnnnnnntttttttttaaattagcttttgttccttgggtgctaatggatttaaccatgaacaaatacagaattttatcaaatatttctttctgcatccgtggagatggtcatatggttttcctcccttaatctgttgatatagtaaatgacaattatactttttttctaatattcaatcatccttgcattccagggataaacccaatgtggtcatggtatattaaacaaaagggtgtgtagctttcctttcttttgttatccatttctggtcnnnnnnnnnnnnnnnnnnnnnnnnnnnnnnnnnnnnnnnnnnnnnntccttttatccttcttctctggaagatttgactgatctatttatttcaaaaattagtataacttttatataaaactgtttttaagttccatgttcnnnnnnnnnnnnnnnnnnnnnnnnnnnnnnnnatttaattaagaaatataatacatgtactnnnnnnnnnnannnnnnnnnnnnnnnnnnnnnngtagttcttaagtagtagttccattcttaactnnnnnnncaattcattcttcttgatgagcatcctttagaa

SEQ ID NO: 6586 - DNA, 754 bp, Macaca Fascicularis
  misc_feature (1)...(754): n = A,T,C or G
ccagaacattcagtactacatgatgttcgaagtgatggaaccgacctggcatatcctggagaaaaacnnnnnnnnnnnntccaacatcgatgacgtccttggccaccacacgggcttcctggacacctgcctgaagnnnnnnnnnnnnnnnnnnnnnnnnntnnngaaggtcttttccaagctcatgtctgtgtgcgtcatgttcaccaactgcatgcagaaatttacacagagcatgaaannnnnnnnnnnnnnnnnnnnnnnnnnnnnnnnnnnnnnnnccgtcccggggctgcccacaggggccgaggagcgggcccggaaggagctcaccaggaagcacctggccgagcacgcggacgctgcacagctggtgtctgnnnnnnnnnnnnnnntcaacaagtnnnnnnnnnnnnnnnnnnnnnnnnnnnnnnnnnnnnnnnntcggctgagcnnnnnnnnnnnnnnnnnnnntgagcacggcnnnnnnnnnnnnnnnnncaggcttgacttcaacggcttctacacggannnnnnnnnnnnnnnnnnnnnnnnnnggagccagaaggctgccccccaagtgcctgtcccacgagggcccccggctcnnnnnnnnnnnnnnnnnntcacggcacagtgagccttggctgtgacaggaaggaannnnnnnnnnnnnnnnnnnnnnnnnnnnaatgggtccagaattttcaaatcaaaatgctctgtgttctctgtcttgcagttaaatataaag

SEQ ID NO: 6587 - DNA, 774 bp, Macaca Fascicularis
  misc_feature (1)...(774): n = A,T,C or G
tatatatatatatattttaactgtacacaatttatagtgcatgagggttaccaaaagaacagattgataagagatattggccatttctgcataatttcattctttttacaattatctcaaaatgtgaaagctggatctaattgaaatgctacatttagtaggaaaatcagcaaataacaaaggaagcataacctcaacataacattatttgtcattaaagccagtagaggtcccagatatcttcaggcaagagactggttaggaagaccactagagtcacacactgtccctgaggaccaaggccagcccactgaacatatatatatgctagattgatcatggtcagttgacagactttttcaaagagcatttctacagtacagtacttgtttggatattcagagagacatcatttcaagaacacatgccatacacacgtaccccaccnnnnnnnnnnnnnnnnnnnnnnnnnnnnnnnnnnnnnnnnnnnnnttttatgaaagaatatgttatcattacataaaattcagaattaaccagacctttccattcatcttgtttaagacagttcttccttttgggatggggtatatgacagctgtggctactcatatcaaaaataaatttttgaaattacttgatggactaggatttccaacaagccttattttgaacaggtaatgcagtaactgtttaaattttccttggaagtttagcactatatcaattatgaatctnnnnnnnnnnnnnnnnnnnnnnnnnnattactatgat

SEQ ID NO: 6588 - DNA, 773 bp, Macaca Fascicularis
  misc_feature (1)...(773): n = A,T,C or G
agagagtactgatcatnaangnnntnaaacagctgnnntaggatcttgtcatttttactaaaagtctcgtgcacatgtgaagtgcnnnctgagtttaaggtttggttaatactggtatatttttataagattgaaattgtgtccccatctttaacctaaacattttcgttatcagggtcaatgtgctagaactgaattgtaacatttttaggcacagatggaaaaaatgtnnnnnnnnnnnnnnnnnnnnnnntgtgtggcgaggggaatagatccacaaaagcatgtatgtacttacaaaccaagctgtagagatcaagaaaagaacttaagtgttgatctcaagatatctaaattgtcaagatttacatggcattgtggtggaactagttaacacttagagcttttggtatgtaataactatttgctatggactgattaaatgtttcaaaagattgtgttcttcaattttggtgggttttgaattttgtttttttaactgcctctcagattatatttagttagtttaaatttctttgctttgttcattaaagtatnnnnnnnnnnnnnnnctgatatttattttcacttgtttactaattatttacaaaacaccctttgttgacttttattttataaatgtgtagtgtattaaacgtctttaaatttttgttcagttgaaactacattaactttgatttgctttactgggatttttttaaatacaccttttccatgtcagnnnnnnnnnnnnnnncaatcatttgtatccc

SEQ ID NO: 6589 - DNA, 1238 bp, Macaca Fascicularis
  misc_feature (1)...(1238): n = A,T,C or G
tatttatagaataaatgtttcatttatataaaagcaaaagaacttagagttcnnntaaatgggatgtctaataaattatgaagttactgatttgaatatatttttataacttccttgccaaagtcctgatgtagtacattagagaacctgtgtttcctctctcatcgaccattcacctgnnnnnnnnnnnnnnnnnnnnnnnttttactcaaagagaatcaagaaataataaggtataacaagcctggcaaagtgttggttttttaaaaaaatttgttannnnnnnnnnnnnnnntaatttagcagcatcatttatttgggattcttttatctgatttcaacagtgaaaagcatccctgtgataaagcctaatgacccatttcacaaaagatggagtttccccttcctagaaaatatgacagagaaaagtctgactcaaagaaagtgggtctgaattttataaggggtagtaacaattggacaattcctttgcatatctgaacttggcaggtaccattctaaatttgaaacagggtcatagctcaaagttgccattcatccagaatagagatcttttagaatgtagtgttttaagtgagtgtttcattaatacacctacaccctttctttgaaagtttgcaacctaattgcatctaaaacttttgagtaagttctgtggtaaaatcttaaactatggaaaattataaaaatgaannnnnnnnnnnnnnnnnnnnnngcttacatgtgtgtttttttcataaaattttcagataaatgtattcaacatgtaatacagtattttaacattcacctcttattttatattgaaatgtattacagtattaaaactcagtgttcagtatttatttcactatgcatattatttagtaaaagccaggagaaatgtttaatccaatggtgccttactttgtgatttaaaagaagtcaactttttttatgtctaagtagcagattatttgcatatttgtaaaaactgttaggtctttatattttaaattgtaataccagttttgttattttagtagcagaaatgggatgattgttaaagttcccaaaaaatgttggtgtgaaattaattttttcctccttatagtcaaggaccgtagaggaagaaaaacatttttttcatgccatgcactatgtaaacannnnnnnnnnnnnnnnnnnnnnatcaggatagtgtaaatggtagggtagagactcccctagacatctgc

SEQ ID NO: 6590 - DNA, 750 bp, Macaca Fascicularis
  misc_feature (1)...(750): n = A,T,C or G
gtccagctgcctggaactttggcaaatgatggataatttgcagaaggaatctggaaataaggccatgagataggtatccctacccacaactgtgcctctctctgcaggctccatttgcaacacagccacacacaccaataaccagctctcggttctgctctgtgcccannnnnnnnnnnnnnnntgaaaaacaaaagaaaaagaaacccgaaaaccaacttgattccatccagggacatgtcttgggaggcagctaggcttggtctctgcaactaggagcctgtagggaaacatcccgtcagaaatggagaaaacaatacaccctagagactgattagtggagctcctcctaggaggtgaccctagaagaaacatatcttctttcaaaatactgccttaatttttttctgtttcattttgtgaaattgcttggaattcctctaagtagagaataattgatttcagaggtcttgggactgtgagttttataaaatggccaggcgcannnnnnnnnnnnnnnnnnnnnnnnnnnnnnnnnnnnnnnnnnnnnnnnnnnnnnnnnnnnnnnnnnnnnnnnnnnnnnnnnnnnnnnnnnnnnnnnnnnnnnnnnnnnnnnnnnnnnnnnnnnnnnnnnnnnnnnnnnnnnnnnnnnnnnnnnncagctactccggaggctgaggcaggagaatcacttggacctgggaggcggaggttgcagtgagccaagattgcaacattgcacaccagcct

SEQ ID NO: 6591 - DNA, 770 bp, Macaca Fascicularis
  misc_feature (1)...(770): n = A,T,C or G
gagacacacactgnntnnnggnnnncagtctgtttccctctccttgtttactctttggtcactgatgagtccaggctagaggggtaatacggtgattaaaagaagtaaattctcactgtaaacttggattgattaacagaaacgattaaaccaaacaaaatcattgccccaaatttctatctccaagaattgctttgtgccattttgaattcaggtagttattctgtatatacttagctaactattcagagcttcttcaatctctagtaagcttgaaggtggtgtctgggaagacacagggcagggtgacattgagaccctgttcattcttagaaacaaaaatagggataagccagaatgatgtgacatctagtatgtggtagatgaagaatcagtggaaattcttaattgcacagactttataatccattatataaagtgtaattccatactttctactgtggcaagggtgtgacgtgattgttaatctttttaatttttgaatccaaactgaatttaaagtgttgaatacttaaatcctcacaagtgaattatgaaccatttgtaaagtgtttctataactttttgtatcatgtgtgggtacatcttatcaagttttttctggcatgtaattccattctaaacttatgtaaaatttctattgttgctgtaaatattacacaaatacctactccgtgataaccttcattatcagcatgaaatggttaatttttactgagcacaatgtattttgaatggatcttcccaaa

SEQ ID NO: 6592 - DNA, 702 bp, Macaca Fascicularis
  misc_feature (1)...(702): n = A,T,C or G
aatgttcactcaaaagttaatgtaaaacaatagatgtgtaaaattcttttgatagttaagaatatcccgttctgaagtttacattctccttctttccagttttcatcttgtgtattttttaagcttttgaataataatgacatgcaaatgttaattaagtggcaaaaagctggtagcaaacagtatggcatggcctaaaatccccatgttgtcgggagtgtgctagtcctcagaagcaggtgtgttttatgttctcgaacactgccccctgcgtcgacagcctccggcggtgggggtaagtagaaggggatgaggggccagcactggttgacccatggcaccctggtggagatggagaggttttttcgctcagtggtgcaggccatcaggcaggagtgtccagacagggcnnnnnnnnnnnnnnntgccctagcgttaagaggatcttctagagtcatctgccttacttcatgccannnnnnnnnnnnnnnnnnnnnnnnnnnnnnnnnnnnnaaaaaggcttacatgttggctagcctaaatctaacccttttctnnnnnnnnnnnnnnnnnnnnnnnnnnnnnnnnnnngtccattgtcagccccctgggactcaggtaaaccaattctctttgggaatctgccttacaagatgaaaccataaggccttcagtttcagtgtcaaggatgcacactctata

SEQ ID NO: 6593 - DNA, 751 bp, Macaca Fascicularis
  misc_feature (1)...(751): n = A,T,C or G
ccaggnnnnnnnnnnnggacagcaggataagaaagagagagggagggtttagcatactggcaggagagggtctgaaggaatgaatcatggaatcccaggtaataggaggcctaaggaggagaataagacagcacagatcaggagaaagagagatggtgtagataggctggaacaggtacagtgaagataactcagtgagagagcnnnnnnnnnnnnnnnnnnnnnnnnnnnnnnnagggaccgacgttcaaacttcaaaggtggagcagtttcaggaggtggccaaacaagaggatgtatggttnnnnnnnnnnnnnnnnntccacnnnnnnnnnnnnnnnnnnnnnnnnnnnnnnnctctcagccagnnnaaacacactcaccctagtctcaggtggggaggtaagggccagagtctatctgggatctggcatagaaggacagcnnnnnnnnnnnnnnnnnnnnnnnnnnnnnnnnnnnnnnnnnnnnnnnnnnnnnnnnnnnnnnnnnnnnnnnnnnnnnnnnnnnnnnnnnnnnnnnnnnnnnnaggcccttcccacacttctgcctgtggctgagctttccaccctnnnnnnnnnnnnnnnnnnnnnnnttctgacggtgctggctgagatctgtgatgctggcattcctcacaggaagaagcctgcnnnntatgctgaggcttgtccatctgggctcctgtgggggcctgtgaggcnnnnnnnnnnnnnnnnnnnnnnnnnnnnat

SEQ ID NO: 6594 - DNA, 725 bp, Macaca Fascicularis
  misc_feature (1)...(725): n = A,T,C or G
gaagaaaatagccacaatctcaaataacaaaagggaatgttctaaaacttttccttccttaaaaaacggaaaaaattgcgcttgtgcttgctgtgtggtatataaaccaggatgagtcccagagtgatgaggtttctggtggaaaggttaaatcgtagaagctagtatattttttatatttttgtaacaattgcttttttcatgggggaggctgggttagtatttatagtcctaacaaatccagtaattttttataaatctcttcagattataaacagcccctaaaactttacaatatttgcacaattttttaaaagagattgtatacacttgatttgctttcaaaataaataaggtcagctagtttaggaggttaacgtcggataggaatgctgatcatgacaggtttggttttctacagattctgttctggtgcctttcctgtccaggcaccacctgagaaagttgtttgtcatttgaggtcgcacttggaggttacatctgtgaagtttctgtcattggtccagatctgtgtgtgtagcatctgctgaggaagcacgtgctgggccgtgcctcagannnnnnnnnnnnnnnnnnnnnnnnnnnnnnnnnnnnnttcctgttgtggtgtgtgtggagttttggggaggaacagatgcagatcagcttgtggctgttttcccatctaggttctcacaggcatctcctgacaaaggtacttaaca

SEQ ID NO: 6595 - DNA, 457 bp, Macaca Fascicularis
agaatggcgtgaatagtgcagacctcaaaagaacaaaaaaaataaagaaaaaaaatgaaaagaagaagcaaggaaaggagggaggaagggagaaagattactttgatatgccatatgattgaaacaaatgctcttttttcaaagacaaggattatactcctttgcattccagttactttggtccattgtaacttggtaacctttgcctagaaaacaaagagaatcccaggatataatctccttccttgtaattttttttgtaagatgtcagtatggtaataggtccattagcaagtaagtacagtcacatcttattttattatacttctcagatactgcattttttacagattgaaggtttgtggcaacgcctgcatcaaggaagtctgttgacatcattgcaatagcatgtctcactttatgtctctgtgtcacattttggtaattcttgcaatat

SEQ ID NO: 6596 - DNA, 779 bp, Macaca Fascicularis
  misc_feature (1)...(779): n = A,T,C or G
tgacattggtgcgcctggcgctgggcannnnnnnnnnnnnnnnnnnnnnnnnnnnnnnnnnnnnnnnnnnnnnnnnnnnnnnnnnnnnnnnnnccgcgcagctgcaggaggaggccttcatgtcacaggtgcnnnnnnnnnnnnnnnnnnnnnnnnnnnnnnnnnnnnnnnnnnnnnnnnnnnnnnnnnnnnnnnnnnnnnncgccggggcccccgnnccccggccacaggtccgcctcgctggggcccaagccnnnnnnnnnnnnnnnnnnnnnnnnggggcacgacgaggcgccaagcctgaggtgccccggattgtggtgcagcccccagaggagcccagaccaccacggcggaaaccccagacccgcggcaagactttccatgggctcctgactcgggcccggggcccccccatcgaggggcctcccaggccccaacgaggctccacctccttcctggacacccgcttctgagaggaccatggactcagtgttccccagtctcaattgcctgannnnnnnnnnnnnnnnnnnnnnnnnnnnnnnnnnnnnnnnnnnnnnnnncggcttccttccaggcaaggaccaggcagtgggggaggaggaggtcctctgtggtacatactgggtcagacactagcatggaggagggtcacagagtggggcacctgaggactcatggaaccgtccnngtgcccaggccctcacaagtaccaaagccggcaccataggagtcagggaaggggttggctgggtgaagggaccccagagggctcc

SEQ ID NO: 6597 - DNA, 761 bp, Macaca Fascicularis
  misc_feature (1)...(761): n = A,T,C or G
aaaagtaaaannnnnncctgtannntgacacttcttancccttatagtcatgtttttgtggtttcttggtagtctgtattttaaaaattgtcctaaaaagtgtctaagcgccagtttattctatctagactgttgtagtataatattcttcaaaatatgtaagctgtggtcaattatctaaagcatgttagtttggtgctacagtgttgatttttgtgatgtcctttggtcatgtttctgttagactgtnnnnnnnnnnnnnnnnnnnnnnnnnactgaaacaaatatttgcttgaaaaannnnnnnnnnnnnnnnnnnnnnnnnnnnnnnnnnatttttttcttttttccagcccagaagactaagtgtttaaatctgcttgcactagctgtgccttcattagtttgctatagaaatccagtacttatagtaactaaaacagtgtattttgaagtttgannnnnnnnnnnagattagcatacannnnnnnnnnnnnnnnnnnnnnnnnnttcaactgagaccttgtgtatgtgacatatagtggcctataaatttaatgataatgatgttactgtttaccaccgaggtgttaatatgacatagtattttnnnnnnnnnnnnnnnnnnnnnnnnnnnnnnnnnnnnnnnnnnnnnnnnnnnnnnnnctttgtattatgttctaccttccctttcnnnnnnnnnnnncacttcatttgatactgtttttcatgttcttttattgcaacttaaaataaataaa

SEQ ID NO: 6598 - DNA, 735 bp, Macaca Fascicularis
  misc_feature (1)...(735): n = A,T,C or G
gaaacatagcataaggannnagtctatactgaaagttaacacaaagtaatttgttttatttatattctcaacaaggaaacaaacttttcaacttctagcagcaaaagaataacaacaataataatgagtttagtaccaaatacacctttttagctaaatcttttaaaaaattaaatatttagccaaaactgtgatcaaaatctaatgcttatacagacttatagtcttatatagtctaccccaatagattaaacttctgaggtaccagaataaatctaaaattatattttataacgtattacattttataattaaaattttcataattataatttttannnnnnnnnnnnnnnnnnnnnnaaaaccatctgtcagannnnnnnnnnnnnnnagggctccaccagttattatattacgtatttcttactaaaccttcacttccaacttagatcaatggaggaaatatacgtgtgtatatatatattcctcttannnnnnnnccagtcccattcctgtgataatccattaattcattaatccataaatgatgcttccatttatttaggcagagtcctcataacccaatcacctcttaaaggcctctcctttcgacactgctacaatggggattagttttcaacatgagatctggagagaaaaaaaacattcaaaccattgcatcatacaaaaaaaggatattaaaaattggattatagcaacttaatcttccatttt

SEQ ID NO: 6599 - DNA, 767 bp, Macaca Fascicularis
  misc_feature (1)...(767): n = A,T,C or G
tgcataacctgtgtgtccaaannntatgtctccctcggcctaggggatggagtgtaannnnnnnnnnnnnnnnnnnnnnnnnnnnnnnnnnnnnnnnnnnnnnnnnnnngnnnnnnnnnnnnnnnnnnnnnnncaggtgccatttgttatataacctgtttgtatcagttcatacttggctctgagccactattgtctataaaaggtannnnnnnnnnnntaacaccgtacaggggctnnnnnnnnnnnnnnnnnnnnnnnnnnnnnnnnnnnnnnnnnntggtgcccagagagagagagaaagttatccatcttgcagacagaggagagccacagcatggcttgcactggtgcacagggagggaaagattaagctgctaaccctgaaggcaagggacagccagcccagtggtgcagcagctgcaggcatgggggcagctggagccacagaactggagtagatggccaagataaaggtgcacagtgtaaagagctagtnnnnnnnnnnnnnnnnnnngnnnnnnnnnnnnnnnnnnnnntattcacctgactacgccccatccaccctccggcactccacccccagacccccgagtgttcttctttctgcccatccactcactcccctcggaccgcagcatgggctggacctggaccttgggatctgatactcccacactacaaaaatgtacgtttctggaaagaacttacccttaaaccaccattttccaattttgagcttcaatccannnngtctcagtaattta

SEQ ID NO: 6600 - DNA, 1979 bp, Macaca Fascicularis
tttctggcatgggtacaaatttaactaatcaagtgtaatttataaattataaaaaaattttcatctagaccaagaagttattaaaagcattaacaagtagttgaaaatattatctctgtaagtattagaaagttaaactgcagtaattaaaactcattaagaatcaccatgctatagacgtggtaggaaaagcattagctttggcgtttaaatattgactcattcacttgccagctgtgttctctagtcaaacaactttacctctttaatgtttggtttcatatttttttaaaaggtataacaaaaatacctaccatagtgttggcgtgaggactcatttcaagttactagcacagtgtctagtatatacagttgctttgttacattaattccattcaatattctttctttccacaattgtctgtcactcctggtagaagtaagtgattttccatgctcctgcactgacagcaaacttcctccagtctgttcttccatgaatatctcagacagagaaaggtgccttctcatgtgatcaggagtgatgtagctttgagggtggacccaccattcctgtcacattctttgggtaggttcatctatcatttgtcttaaaggaagatttgaaacataatagcttcctctgcagcttctgtggatgtctctggaaaagctggcaggggacatactcttgcaaatttttcatgttgtaatcacccaccggtggtaataatagggttaattatatgaaaccatatagtggtgtcacttaaagggaatttaaattctctcttgtccttactctgctccaccatcctctactacgcttgaaatgcctaccattatcctcattcttttgataccaggcatcactaccaaaatgtatacacattacctagattttcaagaagtgaaatgtttagtaaccattatgatggaagctgggactaggtggcttctgctaaatgtaacaattaccagtagagaatgggataaaggacaactgagagtggacagagaaaggagaaatggaagagtttggaacatgggccattacgatggacagacgccaccggggagagcaaggtttgcctgtgtggttggcattcttggaagtgatctggttctcttggcagagagccttgctgttagccccttgcctgttgtccaggctgaagagagtgatttcccatggttctgtctttttctccaggcaacacttcctgatgactgatagatattgggataggaagtcttagacatcttactccagctcagatctgctctgatgggctgcaggctcagtttagttttcccttgagatttcatcatggctttacttctccctctaccagtcctggttcttcctaaccttccacaggtgtcagttgcaaaaaccctcccaagtaagcctctcgtgtgctgctctgtctcagaatctgtttccttgggaacccaacctgctacagcctacttcacacttcttcttaaggctgtcttgaattcctccaacaatagaactgtaattatgtgaaggtgtgaggctgggcccaagggatttctgtacttattgagcagagcacagtaacattaattcgtgttataaccactgactgttccaattccatgaatttaaatgacgcacttgaacatatatgaggcccagagtttgctgtatgtctgcaaatctattttgattaaccagggctgaattttttccccttctcttatgactgtcaaataaccttggtatatgctaaaaataaaagattaaaaaacatacagtgcaaaaaagcaaacaaaagttagctaacaatcaattctttgaatgaagcccagtgaaaccaagtttatcaactctatctgaaaataaaaatgtccaagaaaatgacaatcacaacgactggtgcattaggataagtgtcgtctcttgtgcatagataaaaactaaactgaaaccaaaaaaaaaaaaaaaaaaa

SEQ ID NO: 6601 - DNA, 705 bp, Macaca Fascicularis
  misc_feature (1)...(705): n = A,T,C or G
atcagcgtggctgacnnnnnnnnnnnnnnnnnnnnnnnnnnnnnnnnnnnnnnnnnnnnnnnnnnnnncnnnnnnnnnnnnnnnnnnnnnnnnnnnntggattgctatggnnnnnnnnnnnnnnnnnnnnnnnatgccagcatgaaggtgaaggggcctgcccataagatttatctggagctagacaaaaagatcatnnnnnnnnnnnactttggccccatcacattgacaaaagccctgcttcccaacatgatctcccggagaacaggccaaatagtgttannnnnnnnnnnnnnagggaagtttggaatcccgttccgtacagcttacgctgcctccaagcacgcagccctgggcttctttgactgcctccgagccgaagtggaggnnnnnnnnnnnnnnntcagcaccgtgagcccgactttcgtccggtcgtaccacgtgtatccagagcaaggaaactgggaagcctccatttggaaattctttttcaggaagnnnnnnnnnnnnnnnnnccccgtggaggtggcagaggannnnnnnnnnnnnnnnnggagnnnnnnnnnnnnnnnnnnnnnnnnnaaccccattcccaaggctgccgtgtacgtccgnnnnnnnnnnnnnnnnttctttttcgccgtggtggcctgtggnnnnnnnnnnnnnnnnaatgtcccggaggaggnnnnnnnnnnncaggcc

SEQ ID NO: 6602 - DNA, 1636 bp, Macaca Fascicularis
gttttttatgtctgtgcacagggaaactggacccagcaggctgtgtagtacctctataaaggttatggtataacggaaggatgaaccgtcaggcttatttctatcgtgttcctccccaggaattgcaccgaagaagccagcttcaaccggagccagccaagacgaaggctctccagactgtcatcgaaatgaaggtaggaactgtgtacttttgtcagaaacagttatgccttgggagtttgttctaacttggtggtgcctaatataaacatgaaatgaaccttgtgtttttctctaggcaccctgctgggtgctttacttctgaaattttttaccttcctgggcacatttaatttattggccctttaattaggattccttttctgggcaaaagaataaagggctcaagaatccattggctgaaaggagctgggttcctttgcaaagcatgtctagtcctagggaggttttgtgtgtgttttaaaagtaaaatttttaaactataataattcttttcctcctattcacatcacaataaaaagcacctttgagaaattaagagttggcaaagggaagttattttacatgcagtggtattgttaaataattaaaattatgctatcagcaaaattttcaaaattgaaatactttttaagaaaaaaactttcttgtgaccccagtattttctgctaaccaagtctggaagtaataacactttactaagtacttgcaaagtatcctatttagctgtgcaggcatagagatacactgtttaaaggaatagaaaaatccttctgagaggattcaggacatttaaggaatcatgaagtaaatgagcaaggccaagtcatgatctgtgattaagaaactggtctaaatgaaactcaatttctttgctagtatctagaaatttgaaaactttttatttacagtttttgccagaagggtgcaaatagtaaagtatttatctcaataataaataattcttgatttaatgtgttccattaagaaacactaagtttataaccaagatgtttgcaatctgaaaattccatgctcaagtttaacactcagggagtttgctgtcgccatgggcctgcaagagaattctaaagcttgctgataggatgatgagtcttctcagtccttcttgcagcatatgattttgaattatctgtccccaaattcccaagttttgagggaaaggaaactaatatgagctcttgaattattggcatgtgcaattctgagtagggattgtttttcttattcaatgacaacttcttcatccaagtggatttttgtgaaaatagtataggtcatttgctttaaaactatgtgtcccacaaatgaggttacatgagtcaaggcactcataatgtatttgtagcatctgggtttgaaaaatatatttgaagccaccaaatgccaataggattaaaaataattattaaccctggatcatcagttgttttaaacttatataatttaaacattttgaaaagaaactgaatattctacactggggaatggtaggccagtggttcataattcagagtttatcctcacttcatattggaatcaaccctgatacttggttaaggcttaaaaaaaaaaaaaaaaaaaaaaaaaaaaa

SEQ ID NO: 6603 - DNA, 1129 bp, Macaca Fascicularis
atcaacggtaagcacttaaagtagctattattaacagctattaccagttaaggaacgtgcctaaggtcacacagctaataagcatcaagcctggaaattcagcccttgctttctcctctacacttctcttcctcgtccaccacactattgcatttttttaacatggtttttacttgcaaactgtgaagttgcttgatttccttgtgtgccccacatattcctttatgtcacaaatatttacggagcatccactgtacgtgaatagcattggatgattgacaagggaagagcctacaagcaggggctgcacttgtgcaggtaacacgtaaaacataacgcttctccaagccttgggaccccctaaatcgaaatctggagaagcggcaagggtcacaaaggagacgacgaaagggaagtgactgaggcagaggtcaaactgaagtcttgcgatcaacccagaactgaagggaaggggaataaactggacaagcctgatagtgacattcacaaacagtggaggaagtcaagtaccaagagaggaggtatccttctgctgcccaggctggtctcaaactcctggcctcaagcgatcctctcacctcagcctcccaaaatgttggaattacaggtgtgagccactatgccagcccccattgtctttcaggccaccgtaggaaattccagtcaccaaggagggggctttggggcaaaccgctccgctggactggggctgaccatccccgatgtgtgtggcagagcagagcatcctttacagaagaatgagagactggaaggctgctgctacaaccacattttctagatttcttcctcatcttctcttccatgaccccccttttctctctttctttccttgtcagaggccttctgggctggcaccatttgctttcaggatggacagctggctgagaaaagtgcctgtatttctcttctctcattggcatctgtcttaaccctccttatggcagctgctgtgagctcacgtatcctctgtgtgctgtgttttccagccgcaaattgccgaacctgccctgtttgctgtttctggtggtgcagagcatttcaaaattaaaaatttaagacattaaaaaaaaaaaaaaaaaaaaaaaaa

SEQ ID NO: 6604 - DNA, 1248 bp, Macaca Fascicularis
aaaaaaaatactattgccaacatggctgctgcagcacagattcacagtccactctccagagctggtacctctgttataaaggagcggatcccagagagtccttctcctgctccttctctggaagagaatcatcgtcctgggagccagacctcttcccactccagcagcagtgtgtccagttctccctctcagatggatcatcacttggaaagaatggaagaggtaccagtacaaattccaataatgaagtcacccttggacaagatacagctgactcctgggcaggcattgcccgctggattccctggaccattcatttttgctgatagtctgtcctccgtggagactctgttgaccaacattcagggtctattgaaagtggctttggataatgctcgcatccaggagaagcagattcaacaagaaaagaaggagctacgactggagctttatagagagagagaaattagagaaaaccttgaaagacaacttgcagttgagcttcaaagcagaactaccatgcaaaagcgcctgaaaaaggagaaaaaaaacaagagaaaattgcaggaagccttggaatttgaatcaaagcgccgagagcaagtggagcaggcacttaagcaagccaccactagtgacagtggcctgaggatgttaaaagatacttgaattccagatattgaaatagaaaacaatgggactcctcatgacagtgctgctatgcaaggaggtaactattactgtttagaaatggcacaacagttttattcagcctgaaaggtcctcgctggctttacataaatgaagatgcttgtgattccagtttatctctgaaactattcaacatggagttatttcaattttgtttatcagcaaagctttgtttactgaaggagctatttaatctatgttacattaaaaaaagaaagaaacacgtgtacattttaaaagcaatgatgtaaactttgtccttgcattagatagaccagtttaaaaatatgagctaaatcctaatggctaaagtaacttgaccatatttgatgcttttctatgctcatttcaacttggctttttgtcttttaaattaaaaaaaatgcagtagtgtgttagagactagaaacttatatgtatggtttccctgttctactatacataacgttaaagtacaccttctttgttaaaaatgtacttgctaaacttcagcataaataaaaacattttgactttgaaaaaaaaaaaaaaaaaaaa

SEQ ID NO: 6605 - DNA, 553 bp, Macaca Fascicularis
  misc_feature (1)...(553): n = A,T,C or G
gattacaggcatgagccaccgcgcccggcctgagaatttttttaacattcaataaaagaagacaagtattcataattcctttactcacagagagctgttatttctgatccagtggtccccaaactgagaggtgagtgagaattactcagggtgtgtaggtagacagagatccttaggctctgctttcaaagacttaattcactaggtctggggtaatatctgcatttttaataagcccccaaggtgattctgnnnnnnnnnnnnnnnnnnnnnnnnngggagaaagaaactgtgtattctatgcatttttaaagttttgtgtatgtttagatattttgtatgtgcttctacctatgtttgtatatatgtacattatacacatgtacacatgtatatttttacatgtaggctgacctcaactgtttttctcatttagcatatatgagcatttccccacggcattaagtgttctctgnnnnnnnnnnnnnnnnnnnnnnnnnnnnnnnnnnnnnntagatacagtatcatttaaccatttttttatttggaggca

SEQ ID NO: 6606 - DNA, 2679 bp, Macaca Fascicularis
  misc_feature (1)...(2679): n = A,T,C or G
attaagcccagggttcgcagccgcagccgggatcgggcacccaggggcgggcgggcacggtagggccatggcagagggtgaggatatgcagaccttcacttccatcatggacgcactggtccgcatcagtaccagcatgaagaacatggagaaggaactgctgtgcccagtgtgtcaagagatgtacaagcagccactggtgctgccctgtacccacaacgtgtgccaggcctgtgctcgggaggtcttgggccagcagggctacataggacatggtggggaccccagctctgagcccacctctcctgcctccaccccttccacccgcagcccccgcctctcccgcagaactctccccaagccagaccgcctggaccgactgcttaagtcaggctttgggacataccctgggaggaagcgaggtgctttgcacccccaggtgatcatgttcccgtgtccagcatgccaaggtgatgtggagcttggggagcggggtctggcagggcttttccggaacctgaccctggaacgtgtggtggagcggtaccgccagagtgtgagtgtgggaggcgccatcctgtgccagttgtgcaagccaccaccactagaggccaccaagggctgtacagagtgccgcgccaccttctgcaatgagtgcttcaagctcttccacccctggggcacccagaaggcccagcatgagcccaccctgcccaccctctccttccgcccaaagggtcttatgtgcccagaccacaaggaagaggtgacccactactgcaagacatgccaacgactggtatgtcaactctgccgggtgcggcgcacccacagcgggcacaagatcacaccagtgctcagtgcctaccaggctctcaaggacaagctgacaaagagcctgacatacatcctgggaaaccaggacacggtacagacccagatctgtgagctggaggaggccgtgaggcacaccgaggtgagtggtcagcaggccaaggaggaggtgtcacagctggtgcgggggctgggggctgtgctggaggagaagcgggcatcactgcttcaggccattgaagaatgccagcaggagcggctggcccgtctcagcgcccagattcaggagcaccggagcctgctggatggctcaggtctggtgggctatgcccaggaagtacttaaggaaacagaccagccttgctttgtgcaagccgccaagcggctgcacaacaggattgcccgagctactgaagccctccagacgttccggccagctgccagctcctccttccgccattgccaactcgacgtgggacgtgagatgaagctgctgacagagcttaacttcctgcgagtgcctgaggcccccgtcattgacacccagcgcacctttgcctatgatcagatcttcctgtgctggcggctgccaccccactcaccacctgcctggcactataccgttgagttccggcgcacggatgtgcctgcccagccgggccccacccgctggcagcggcgggaggaggtgaggggcaccagtgccctgctcgagaaccccgacacgggctctgtgtatgtgttgcgcgtccgcggctgcaacaaggccggctacggcgagtacagtgaagatgtgcacttgcacacgcccccagcacctgtcctgcacttcttcctcgacggccgctggggtgcaagccgagagcggctggccatcggcaaggaccagcgagcagtacggagtgttccagggctgcccctgctgctggctgctgaccggctgctgaccggctgccacctgagtgtggatgtggtcctgggcgacgtggctgtgacccagggccgcagctactgggcctgcgccgtagacccagcctcctacttggtcaaggtgggcgtcgggctggagagcaagcttcaagaaagtttccagggtgcccccgatgtgatcagccccaggtcagacccctctggaagggatggagtatgggggtcctggtggaagtgaggggcacggaaggggtggcaagcggagcacagacttgctagggtgggatgggaggggattaggaggaagtagtaggagcatggaagccaggctgggaggcctgtggccaggagaggcatggactcagcaaaagggcttttgaggactgattttcagagcgtggtgtgtggtcagggaaagggatgatagaagagggagccatctctgcttccttccaaccatctgccactctggaccaatacaccatctctccaagcatctgtatcctttcttcctaaacactccatttccaacatcccttctccataaaacctttgctctccaagacctccttcacccatatcttaaaattcttcccttagctgggcacannnnnnnnnnnnnnnnnnnnnnnnnnnnnnnnnnnnnnnnnnnnnnnnnnnnnnnnnnnnnnnnnnnnnnnnnnnnnnnnnnnnnnnnnnnnnnnnnnnnnnnnnnnnnnnnnnnnnnnnnnnnnnnnnnnnnnnnnnnnnnnnnnnnnnnnnaccccagctactcgcgaggctgaggcaggagaatcacttgaacccgggaggtggaggttgcggtgagccaagattgtgtcattgcacaccatccagcctgcgtgacaagagcaaactccttccaaaaaaaaaaaaaaaaaaaaaaaaaaaaaa

SEQ ID NO: 6607 - DNA, 2378 bp, Macaca Fascicularis
  misc_feature (1)...(2378): n = A,T,C or G
gacaagcatgagagggacagttaagaaataatgaaatactggtgaaagacagagaaagagaatgagatgccagggagatgtttcttaggcacgtaagtgagaaatgggggagctacttctgagacgtgagacagctgaaattgaatgatatactggaggaaataaatgataacaaacctccccacactttcctttctataaagcagttctgaattttgcattgaaatgttttcctcccactttactcacagataatttgccaataagtcctggcttttgaaaagaaattggggtggtggcagtgtggggcgtttagaggggagaaatcttttagttcttctgaagaagtaatttcctgtacctgggggctttctcttctatgtagttttaaatgtatatcctcctcaccacttaaacgcctgaagagactgggaacaatacttctattgtatattttctattgaaaaggacctgctgtcctttacatcaaaaagtgatcatttctatgaaactgaaataatcaaattagtcatttagctttttaaaagttgggggtggggaaggttcccagaggaaaaatatttaaaagttttaaatgatcagctttcagattttcatgtgggcagtcacctatatctgggtcctgggttcatagaaaaatgaagtacttaagaatcgctctttaaaaaacaaagtgagcatttattctaagtgtggagttgaaggcaattttaaaattataactgaccactaatccctgcctgagattgtatttaactgagtattgtacatcgatgtaacgtatttaagtgtctataaaattactggtagcactctgtgagcatcttgctctaaattgtggcctagattatcagatagtgactttgctgatgtcttgggggtctcataggagccgatagaatagtaattacacccatgctttaaatctttttagatatttactcttatctcagaaaaaaaaagagagagagtgaacttttaaaagccaagggctatttatggacagggtaattttttgattggcagcatgtcaattccttgagccatccagaatgtagcttttaaataataactcagccatgggaaatgctttttattgcaccaatttcaatgatatttaatgagcttctgattgactgtttgatctcccaatgttttgtgctacttttaattcatttcgtataatagaaaaaaaaaaagtaattggaataaaattttgtgacaagataatgaccttccactttgaaattaaatgtctgattagcttcaacattttaatgccaagatgatactgcagcagaaacaggactatgcatgctatcatttggtacaaaatgacttaggaatactcctgtgcttttcccattgcatagcaaaaaaggtgtggtggctatgtaatcgtaggtacacaggactagaagggacctttgcagtcttttattcttgtgactgagcctctgcccatagttttcgatggccctggcaagtggttgtgcaaaccatgtttaaatgcctccactgatggggatcttgctaccttcagggaccttatttccccaggtagttattccacaaatatttactgagtgtctaccatgtgctaggtacatttctaagcactggaggatataatgctaacccagatcacaaggtcctactattatggatttaggtggaacaggtaaacaaactagtaattaactaaaaaacattatttcaaatagaaataactatgattagggacaggcgcagtgattcatgctggtaatctcagtactttgggcggctgagtggggaggatcacttgagcccaggagtttgagaccagcctgaacaacatagtgagatcccgtctctacaaaaaaataataattactgtgcaaggtggtatgcatctgtagttctagctgcttgggaggctaaggtaggaggatcacttgagcccaggagtccaaggctgtagtggactatgattgtgccattgtactccagcctggaggacagagctacacctgtctctaaacaaactatgatgaaaaaccaggatgggagacagggcttgnnnnnnnnnnnnnnnnnnnnnnnnnnnnnnnnnnnnnnnnnnnnnnnnnnnnnnnnnnnnnnnnnnnnnnnnnnnnnnnnnnnnnnnnnnnnnnnnnnnnnnnnnnnnnnnnnnnnnnnnnnnnnnnnnnnnnnnnnggctaatagcacctgtagtctcagctcctcaggaggctgaggccagaagatcatttgagcctaggaggttgaggctgcagtgagccaagatcgtgccactgcactcagcctgggcaacaaagtgagaccctttctcaaaaaaaaaaaaaaaaaaaaaa

SEQ ID NO: 6608 - DNA, 2458 bp, Macaca Fascicularis
attcttctggaagaagatcctgaaagcctcctggaggcaaagttctggcagaaagaggcaatttccctccctgcaggcagaaggaaggcagttagagcgggtaaggatgggggatgctttcacttttcttcactgctggcaaaatatgggccaggtcatgccactggcagatgctgctgcctgtcagtgtgcagcatccattcctagatgggtttcttgccagcacctctggcaaccaggacaggagaggtgcaggtgcctgttcttcccctgggctgtgggtgccagagggcaatgcctacagcaggcaggtctagaacagctctcagctgtgtgcctggacccagctagtctgagatcttcgctagagcctctaaccaccttggcctctgaagcaatgaactggtctccctgctctgttcactggtcagttctgagtagcatgagatggcagaattctcagaggtcacctggctcatgaagcagtgctgtggcaggagactccctctgcagttctactttgtctctatgacttcacacaggttgttcccttgcctagaatgtcctcccccaactttttcttcctggaaaacttgtattcagcaaaactcaggttaaatttcacctctgccaagaaggctttttcaactctccctgctgtgctctcagagtcccctcgtcaacacacacacacacacacacacacacacacacacacacacacgattttcctctaccgggacgttatctgcttcttggctaaaccgcaaactctttgaagtgagtgatcatttaaccagcatgatgtttgtcacatagtagatacttcgtcaatgtttgggagccaaggagagaatgcacagtgaacagccacactgtacttccccactgtgatcggcacggtcttgaactgtggcataagggcttccctgtgatccaaggaggtgcttcctgctggtgaaggagttgggcccggggctgcagccacctgggtgagaaaccactgggaacctgctctgtgccaggccctgcctgggctttgggggtgggagtaagacatagtccctgtcctgaggacctgaagtctggtggagtggacaggagctgggttgacacaggacctgccaggcagagggtgctgattgtcatagacagctcagatgtcagagaagcctgaggggagagtggtggtggctattgggaccattcttcagagaggatggggtgcaggtagagtttcaataggttggtgaaagggaaggggattccaagtggagtggggagcaaggacaatgacagagaggcaggagcctgcagagcagttgaggatcagagaagttgtatgggagctcagctatggcatctcggagctagaggaagagaaagatgaggggttagcctggaacctacagctgccagggctggagggccccttgcatcaaagcccttccctgtggaggataactgggtcctcaagaccagggtggctgccaggaaactaggccagattggagagctttgaatgtactgatccagagtgcttaagcctgacccagtgagcagcagacgtcttcacacagggtggggtgcagcctggaccagcatgaaggcaggatctgtggggcctctgccctaccacgtgaggtttagcaggcctctgccccctgcctgtctccacacctctcctgccattatgccttgattcaggcctcgctcctttgagtaaagacactgcctcctcttaggatggccacactcccagaaagggtagcacattaggcctcagataccccagcatgggccagtggagctggactggagagactcaagccagcacgagggtacttggagcctggggaactgggggatggggccaggcaggaggataccaatgccagcatcactctaagggaagccttgggtgatctcacagcctcgcctgagatgtgggacagtctgacaggcagctgggccagcggctcctccctcagcccacagatggatgggacttggccatagcccagcactggcttctgtgagtaatcagactgcatgacttttattcctggatagcctctgccgccgaaaaggaatatggtatgaactttatatactgatgtggaatattcccatgaaatattaaataaaaaaagtgagttggccgggcgcgatagctcacgtctgtaatcccagcactttgggaggctgaggcgggtgggtcacgaggtcaggagttcgagaccagcctggccaacatggtgaaaccccatcgctagtaaaaatacaaaaattagctgggtgtagtggcgggcacctgtaatcccacctacttgggaggctgaggcaggagaatcgcttaacccaggaggcggaggttgcagtgagctgagattgtgccactgtactccagccccggcaacagagtgagactctgtcacaaaaaaaaaaaaaaaaaaaa

SEQ ID NO: 6609 - DNA, 654 bp, Macaca Fascicularis
  misc_feature (1)...(654): n = A,T,C or G
agtaactggaactacagctgtgtgccaccacaccccgttaattttttgtagttctaatagagatggggtttcaccatgttagccaggatggtatcgatatgacctcgtgatccacccgcctcggcctcccaaagtgctgggattacaagcgtgagccaccgcgctcagccccgaataagtttctaatattttgtctgattttcactctcctttcttcactttttaaggatagcgttgaaaaaagaatgcacatgtgagttactaaaaagttgtaatagaatacactaatgtgcatgggaacagtgcagcaacacaacagaaaatcctcactgcactccagccgaggctagagttcttacacttctagcagcagagccactccggctagaacccattttgcagtcttctcttcgctcttcagcccgaaggtccagatgtagctggggcctctcagtttggttctgtacacagggcactcgtaggtctgcttggtttcttgtctctccacgggggtnnnnnnnnnnnnnnnnnnnnnnnnnnnnnnnntcagctccctgagacgggcttcgacaatggttcccgattgggtgtcccagcgggcgcctacagcaaaaacacaacggttgcaattgtgtggcannnnnnnnnnnnnna

SEQ ID NO: 6610 - DNA, 737 bp, Macaca Fascicularis
  misc_feature (1)...(737): n = A,T,C or G
aaaatgtaaataancnnnggtaaacattttgaaagatttattctttttgtgttgctggggtgtatacatttatgtctttgtgaaatacactggtggtgtccttcttacaaaacttttgaaataaaaaaaaaaaacctcaaatcttcactgtctgaaatccccttcagtcttttcagattgcattgactgtcctcttgatttttcatattacatgtggaattacttttgctatcataaataagctccaaagtcccccatttaattggtttttaattttgtgtatgatgggtttcagatctggcttttgttaacattttggggcttttttaatcttttcaatctggcgtagtgctgtttggccttttgcaaggtacttaatcaattgctcttttgttatagggtatggatcactgtcagaacttgattggaggggtttaaagagattgtgtctgtttaaaatcagtttgatttggagaaggaccaaattatatgaatgtcttacaatggaatttacttgttactgatttttttgttctattgtaccactattttttgaggattttgcacagtgtaaaatgacataatcatagattgctatggtttaggctgtatatacagtgaaaactatgggttttaaatgtttggggaaattcctatggaaaaaagagagannnnnnnnnnnnnnnnnnnnaaggttaatgtgcatgcccaaggtcttttgaaatttcagtgtgtaa

SEQ ID NO: 6611 - DNA, 2203 bp, Macaca Fascicularis
agaagtatctttttgggtaaggacccaggggacgtggatgccagatgagtccacctcctctccctgctcttcccgcagggacagagcctgccaggtgctggtgacttggatcctgacaggaggtcgctctgcggaaaactggcaggatcccagagcaacagactggggctcgatgcaccttccccgccaggtctctccgtccgcaactgtccttctagtaccgtgcacccctggcgcggggaggcggagcgcacgtcctctgcgccgtgacgtcataatcgcgactcactggacccggcccttagcaacgggcctggcgacggtttccctgctgctgccgcccccgcaggctcttactttccagtcctccactgccggggctgggcccggccaggggaaggaccgaaggggatcccccgtgtccctacggcggctgcaagaggactaagcatggatggcagccggagagtcagagcaacctctgtccttcccagatatggtccaccatgcctatttaaaggacacttgagcaccaaaagtaatgctgcagtagactgctcagttccagtaagcatgagtaccagcgtaaagtatgcagaccaacaacgaagagagaaactcaaaaaggaattagcacgatgtgaaaaagagttcaaattaactaaaactgcaatgcgagccaattctaaaaataattccaagtcactttttaacaccttacaaaagccctcaggtgaaccacaaattgaggatgacatgttaaaagaagaaatgaatggattttcatcctttgcaaggtcactagtaccctcttctgagagactacacctaagcctacataaatccgataaagtcatcacaaatggtcctgagaagaactccagttcctccccgtccagcgtggattatgcagcctccgggccccggaaaccgggctctggaaccctgtatggcagaaggcccagaagcacattcccaaattcccaccggtttcagttagtcatttcgaaagcacccagtggggatcttttggataaacatgctgaactcttttctaacaaacaattgccattcactccccgcactttaaaaacagaagcaaaatctttcctgtcacagtatcgctactatacacctgccaaaagaaaaaaggattttgcagatcaacggatagaagctgaaacccagactgaattaagctttaaatctgagttggggacagctgagactaaaaatgtgacagaatcagaaatgaacataaagcaggcatctaactgtgtgacatatgatgccaaagaaaaaatagcccctttacctttacaagggcatgacttaacatgggatgagattaaggatgatgctcttcagcattcctcgccaagggcagtgtgtcagtattccctgaagcccccagcaactagtaaaatctactctgacgaagaagaactgttgtatctgagtttcattgaagatgtaacagatgaaattttgaaacttggtttattttcaaacaggtttttagaacgactgttcgagcgacatataaaacaaaataaacatttggaggaggaaaaaatgcgccacctgctgcatgtcctgaaggtagacttaggctgcacgtcggaggaaaactcggtaaagcaaaatgatgttgatatgttgaatttatttgattttaaaaaggctgggaattcagaaccaaatgaattaaaacatgaaagtgaagtaactattcagcaggaacgtcaagaataccaaaaggctttgaatatgttatcgtctgcaccaaaagatgagaacgagatattctcttcaccaactgaatttttcttgcctctttataaatcaaagcattcagaaggggttataattcaacaggtgaatgatgaaacgaatcttgaaccttcaactttggatgaaaataatccaagtatttcagacagtttaacagatcaggaaacttctgtgaatgtcattgaaggtgacagtgaccctgaaaaggttgagatttcaaatggatcatgcagtcttaacacatcactctcccagtctgttcagttctccagtgtcaaaggtgataataatcacgacatggaattatcaactcttaaaatcatggaaatgagcattgaggactgccctttggatgtttaatcttcattaataaatacctcaaatggccagtaaaaaaaaaaaaaaaaaa

SEQ ID NO: 6612 - DNA, 728 bp, Macaca Fascicularis
  misc_feature (1)...(728): n = A,T,C or G
catggaatgagttataaattgttgcctttttttcctttatttctttcattcagtggcaaaaaaacattttttaactcctcactaagcttttggttaatcttccaacttataccttggtatgaactctctttttcaccagtttcaacactggataaaactttaatgttgacttttggtaaagaactttaatttttccaagaatctagattaacataagatggtgatatttaaggaacttggaagagtaagtggtgaggctgtatgtatattttttaagagattaccttttaggaaatgannnnnnnnnnnnnnnnnnnnttcttccttttttgactttgttactggaggatgataatctatttctattagatttgaagtattttggaaaatatttcaagtatatctgaaatacttctaattcttaaaacagaaggagtcagacaatgtttgtatcctaagtgagatgtggagaattactctgtatactaaatgtcaggcaatgaaaatataagtttttgtgtaggaaacctagtaagaagatgtgtttttctttctgaatgagtttatttttcgatcacataccaaaatataaaactcagcctcacatttttccgcaaggttagcttagccttgataaattcctctgtgcttctgagtagcatccttctgcctctgcttagcagctctgcannnggtggattgctgttgtgannnnnnnnnnnnncact

SEQ ID NO: 6613 - DNA, 2248 bp, Macaca Fascicularis
  misc_feature (1)...(2248): n = A,T,C or G
gtctctgtttctctgagctccagctcctcatatgtaaaatgggagatggcagataatccctcccctaccctacagggttgctgagtaagtagataatccagatgtgttttgtaatctaaaagtaaccgtatagatgccataccctcacatacacataggtacttgcaatatgtctatctacgtctgtctgaagagcaaaatggtcttccgggggctaaaatagtttatgaaatgcctgagtgttcaacctagagggagccctctgacatgccattccctccttgaagttgagctacagaggacagtctgcattccctgagactggctgcagcactatttttctaggtgtttggaggcagaagttacccaactcagatagcaagtctttggaccatttactctttaccagctattttgaggagaggatgaggaagtgatagaatgcctagaatcactgggaaatttgagctgggaaggaaccattgcaggctgctttatttttccagttttctaattacttacataatgcttaagactgtgttttcccctttaaggggaaaaaatggctttggctctatttagagctcatcacatttgtacattctacaaatactcttctcctaaatctcaacttgaagacttccaagcactgttctcacagctggctgctttcgctcccactccactatcccgccctgccccatcatctttagttaacgatggatgctcataaacccccaaactggcctccctcttttccgacttcgcatccttgtgttctttctaaggagctcggccataatatcacttttctttagcagcattctaacttctaagaggcttaataggcaaggagattgtggggtctttgacttcctctgagccttagccctaagtggtttattctattaagctgattcctggtggtggatagagctttgctggataagaagttggggtgggggaaagttgcagttggaggaattggatactttcactcccccttccactgtgccccaccctccaacccactcctgccccgattgtgtttttagagctttagaatgaaggaagtggtgatgaaattaagtaaagaactcttagaggacttaagaggtttacattttccccaaaactgtcttttgcctcctcacctcttccctctctgcactttcattcctactcttcagtctgccacttgtggatttttttttctttccttccacctctacttttgcctccactccaacactagcttaaataaaaaagctggggggaataaggaataccaattttgagctatcgttttaaagaaaggaatcctatccaggtgtggaatgtagaaaaaaaataacagataagattttaacaaaggaaacaatgcaaattcttccagatgttttctcctagcattacaccaagttgaatatattgacccagattaaggattttcaggtgtccctattaacattctctcttggttcaggagggccagcaggctgggagagcagaggaagtgtctgttctttattcagtcatgctgagcggcagagaaactgtaagggacatttgtgagcaggaagaatgatgttagagaagtgaggaggggagtcaagagtttaagtgtagaaaaaagtacaggacaaccttcacagggaaggtgggaagaaaaccaaaactagccagagagctaaaaagaaggagggaaaacgtgagatggaggtcggaagatggaaaatgtgaagcatttcaaggaattgtgagtaatttgtttgatggcatacaattgttgatgaaggagtggggaaacagggcctggatgtgtggttggtaggcttataaggcagcagaggctctttggagggcctttcagcaatgtctgtctacaaaaaatttaaatacaaatatcctttgatgggattcgacttaagaatttatcctgcggggcgcggtggctcaagcctgtaatcccagcactttgggaggccgagacgggcggatcacgaggtcagnnnnnnnnnnnnnnnnnnnnnnnnnnnnnnnnnnnnnnnnnnnnnnnnnnnnnnnnnnnnnnnnnnnnnnnnnnnnnnnnnnnnnnnnnnnnnnnnnnnnnnnnnnnnnnnnnnnnnnnnnnnnnnnnnnnnnnnnnnnnnnnnnnnnnnnnnnnnnnnnnnnnnnnnnnnnnnnnnnnnnnnnnnnnnnnnnnnnnnnnnnnnnnnnnnncaaaaaaaaaaaaaaaaaaaaaaaa

SEQ ID NO: 6614 - DNA, 763 bp, Macaca Fascicularis
  misc_feature (1)...(763): n = A,T,C or G
ttcacagaacctttgcgaggtgacaannntgcaagaacgnnnnntttaagtaacctatgtaactcaaggacttttaaaagtaagatgacttgttaatagaatggcctcttcacttaggccatgtaccgtaatggcaaattaacctctataaaggcctaatttatctatgcagtctacatattcatttcctaagaaagtgatctactctgcctgacagtattgtagcatcatcgttgggtttcannnnnnnnnnnnnnnttttcagatcttttgaatttgtaaagagtgtaacatcaaaggtaaaagaacaatagcatataacttctaaatccagggactaatttaaaagcataaacatgcaccatatgcactgaaaaagctactaaaagcaaattgagacttgaggaatatgataatctcttttgtataatctcattttcctctaccttgaatgactagattcagctattttttttttcacaaagtaaagcagctgaatgttctttgatcaacatataattcaatgatttctactttgataaaggaagagctccaaaattacatattgaaaactatttctgtatttgacaaaattttgttttttcttgtgcatttcaaatgttttttgacaaggttagttgctgatgagccattcgccaaatttgttttgtttcgtatttaaaaaaattggaatttaaaatcaaaatgaaatgcatggctacttgttaaactgccttatgttaaacatctaactgcacctatt

SEQ ID NO: 6615 - DNA, 268 bp, Macaca Fascicularis
caccccaccccaggcccagaatcgaggtgccttggactttggaggggccaggcctggttgaatggggggcggggcggcgccctcagggtacaaagcacagatagacattccagagactgtatttgagagtctttataaagtgtgggagatttaaaacaaaacaacaaaaaaaactgataaaaatgcactttttgggagtggggagggagaagctttaaaacgtaataaaaaaacacaaaaacacaaaagatgaaaaaacaaaaaaatt

SEQ ID NO: 6616 - DNA, 996 bp, Macaca Fascicularis
  misc_feature (1)...(996): n = A,T,C or G
ccggttcaccctgcaggagctgcgggatgtgctgcacgagaggaacgagctcaagtccaagctgttcttgctgcannnnnnnnnnnnnnnnnnnaagagtgaagaaatggaagaggaaaatcgaataccccaacccccacccatcgcccacccgaggacgtccccccagccggagtcgggcatnnnnnnnnnnnnnnnnnnnnnntcccgagataagaagcgcctggccaacacgcagagaaacgtgcacatccaggagtcctttggacagtgggcaaacacccaccgtgatgacggttacacagagcaaggacaggaagccctgcagcacctgtgaccttggcccatctccaccctccaacctggactgcccaccaccagcgcctgcaaccgaactgcagcccagggtcgctgctgcctcaagcctctcggtgcagatgcacccggaaaactgacccctcaaacagactgtctgatttgaggatggacattgaaaaannnnnnnnnnnnnnnaaagaaatgtttatttatacccagggctatcactgtttctaatagatgactctgattccataggatatatatttaataatcccacagacagaggccagacttctgcgttaatttcagtaacacaagnttctttaagccaaatacatcacttgccactatcnnngctgtatgacttgctttgtataaaatgctatnnntagaggtgttattatcannnnnnnnnnnnnnnnnnnnnnngcatggaagggctagatcttcattagttacattcatgaaattgtgatggcaacgtcttaaacagaatgtatccatcaggcagacaaggggtctgaagtcacaggctcagtcgcccaactcagacacaaagccacagacaatatggatgatggtcctcctacgcagaaactggagacaactttgcaggcgccctggnnnnnnnnnnnnnnnnnnnnnnnnnnnnnngcaatgttcaaggcaggtgcc

SEQ ID NO: 6617 - DNA, 707 bp, Macaca Fascicularis
  misc_feature (1)...(707): n = A,T,C or G
cacttgtcaccactcctggcaatannnnnaggcttgggcactaccccaaagccccacnnnnnngacnctatgcccacagnnnnnnnnnnnnnnnnnnnnnnnnnnnnnnnnnnttcccccaagcatgtcccacatcctacctgggctctttccctccctccnnnnnnnnnnnnnnnnnnnnnnnnnnnnnagaaaaatgcatacacccaaaatgagttcaaaccagccaaaacaaaacccaggcagtggagactttggacgatgnnnnnnnnnnnnnctttagacatttatcttgctcactgcccttgagtnnnnnnnnnnnnnnnnnnnnnnnnnnnnncaattttaggaagttcacttctagcctggaactgggattataagaagcctacaggccaatatatttgtgggaagcagctgaaaggttagaaaagttctgttgaatataaaatgccccaaatcggccgggcgcagtagtnnnnnnnnnnnnnnnnnnnnnnnnnnnnnnnnnnnnnnnnnnnnnnnnnnnnnnnnnnnnnnnnnnnnnnnnnnnnnnnnnnnnnnnnnnnnnnnnnnnnnnnnnnnnnnnnnnnnnnnnnnnnnnnnnnnnnnnnnngcacctatcatcccagctacttgggaggctgaagcaggagaattacttgaacctgggaggtggaggttgcagtgagctgagatcatgccac

SEQ ID NO: 6618 - DNA, 649 bp, Macaca Fascicularis
cgtgatcctcctgcctcggcctcccaaaatgctgagattacaggcatgagccaccgtgcctggcctctttaataatttttaaaataccctaaaggcttgtgaatatacgagtctactgataaattatgtattgtctgggaatttgatagtcactgttttagataactggattttacgctgtggtagacaagctgtgacactagtgttgcacaggtataattgatcatcctacaccttcaccagaataacttgggagcggtgccacaaactagagtctacaattctcactgtttagagagtgttaatgacatactgtgtatgcataatagccacatgtactataatagcccttaaaattaaactattgggattgctgtaaatattttaaagtactggaggtgccttttacctgtttattagattttgaaaaggtttaaattatttcatgagcaatcttttaaatttcatttaacataaagctgaaaattcaataacaggataaaaaactttttaacaaggctgccatttaacttaaatgtgttcatcttagctttcacatgtataaaattttattctttgaactgcagcaataaaaccctctgctcctaagaagtcttaagagggtattctatatattctgctttgtttt

SEQ ID NO: 6619 - DNA, 589 bp, Macaca Fascicularis
ctgtgtgtatagacacgcccatgcgcactaaaagttatcttgtaacataaattttattgaataatactaccccacaatgagaggcacacaacacctgtggacaaaagggagttacagaggctgcttaaaagatggagaaaagcctgaaattgagggaggaaaaaacccagtatttacatggaaaaactaagtctataaaaaatactcaaaatagtgggtcttcgagtttaaaatactcactgttattttacattctaaagtgcatataggttgatattttttaaaatatcaccagagaatttaatctttataaaaatagagcatttttctgctttctggcaaaagttggggataaaaggaaaagttgtcttaatgtaagtctcaatcccattcagcaggaaaaaaatgcttgtgaattgtgcagtaaaaggtggtaatgactactggaagccaagtcaaaggtgatttcctgcctgagtttacttaaataaaagttacttaccatgggagtgaagaagtgaggcttctattatttagtagagaaatcaactccacatttatttaaaaagatggtaaggtcaaggttcaa

SEQ ID NO: 6620 - DNA, 389 bp, Macaca Fascicularis
  misc_feature (1)...(389): n = A,T,C or G
agnaacnnnnnnnnaaaaaaaaaagaataaaaagataaaaaaaaaaaaaaaaaaaaaaaaaaaaaaaaaaaaaaaaaaaaaaaaaaaaaaaaaaaataaaaaaaaaaaaaataaaaaaaaaaaaaaaaaaaaaaaaaaaaaaaaaaaaaaaaaaaaacaataaaataaaaaaaagaaaaagaagaaaaaaaannnaaaagataaaagaaataaattaagaagagannnnnagattccagccgggatacagatcttaaatttgtcaggtacctggagctttaatacagtgaactccagcaagggaggcactgccttttgtttctagaatgttgtgttccnnngaggtnnngttattttgtattcttttccaagctccttattgaaaggtt

SEQ ID NO: 6621 - DNA, 703 bp, Macaca Fascicularis
tccagagactcctgcaacatgctgttgattctgctgtcagtggccctgctggccctgagctcagctcagaacttaaatgaagatgtcggccaggaagaatctccctccctaatatcagaacatcaacaaggacaaccccaacaaggaggcaacaggccccaaggtcccccatctcctccaggaaatgcacaaggaccaccccaacaaggaggcaagaaacctcaaggtcccccacctccaggaaagccacaaggaccccccaaacaaggaggcaagaaacctcaaggtcccccacctccaggaaagccacaaggaccaccccaacaaggaggcaacaaacctcaaggtcccccacctccaggaaagccacaaggaccaccccaacaaggaggcaacaaacctcaaggtcccccacctccaggaaagccacaaggaccaccccaacaaggaggcaatgcccagcaggctcagccacctcctgctggaaggcccagggaccaccatccgctcctcaagggggcagacccgctggacctccctaaggacagtctccccagtaatctaggattcaatgacaggaaatgaataagaagacgacagtgattcaaatgattcaaatgccgtgacgttggaagaaggtggtcatagctgtaacttcaatgtgccaataaaatcatcagcttgcaaaaaaaaaaaaaaaaaa

SEQ ID NO: 6622 - DNA, 785 bp, Macaca Fascicularis
  misc_feature (1)...(785): n = A,T,C or G
ccagatcacaggaggcatgatgcagtcgcttatgaacanccccnannnngcagctcagattatgttgttcatgagtatgnnncagctgagtgaacagtggaggcagcagctgcccacattcctgcagcagacacagatttctgatctgcttattgctttagccaaccctaaagcattcctagcaatattgcagattgagcagggcctccggctgctggccacagcggctccagttcttctgccttgggttgcaccttacctatggggcttgggttggctttctgcccccagctgcagctatcctgacacagtgctctgttcctggaatgtttcggatatacccgagcctaagggacctgagtgctgccacaaacctggaacagtcctgtagaggctacaatccccagatggggacccttcccaccctctgcaagctcatgagattcgttttagcaaacagatggaatctctccaggccctggaagctgggaaccaccatgccaatctacaggcactcatggctactgaaggggacgccaatgctgctacccacaagctcaagggatcccagagattctaaccaccaccatgcctacttctttgcttgccacctgcctgttgacccacctgaccatctcatatgccttttccacctatcctaatgcttccagccaagagaagtcctggaataagagttatcaaccagtgtgtcttgtactgaataatagatcactggccatggctggaacatctgtcaacaaaattttctacttgccctgatctga

SEQ ID NO: 6623 - DNA, 769 bp, Macaca Fascicularis
  misc_feature (1)...(769): n = A,T,C or G
acaaatagatgatcaaggcaaagtagtgaaagacatagnnagagatatgacnnnnctggcacatgtgcccatgcaannnnnnnnnnnnnnnnnnnnnnnnnnnnnnnnnnnnnnnnnnnnnnnnnnnntaggaggatttaaaactcttttaataggagttataannnnnnnnnnnnnnnnnnnnnnnnnnncttgtttgatacctgcacttcttcaaatgataaaaagcttcatcactaccttagttcaccaaaatgcttcagcacaagtgtactatatgannnnnnnnnnnnnnntcttgcaagaagacatgggtagtgaaaatgaaagtgacaactcccactaataaaatgagtgagagtctcaaaagggggaaatatgggaggagaccacccctcatattgtcttatgcccaatttctgcctccaaagaaaaaagaggtaaaaactaaaaggcagaannnnnnnnnnnnnnnngatggccctgtgccacaccctgggcctggtagttaaagatcaacccctgacctaatgagttatgttatcaatagattacggacattgtatnnnnnnnnnnnnnnnaaatccctatcttgttttgttccgatctaattnnnnnnnnntgcagcccccagtcatgnnnnnnnnnnnnnnnnnnnnnnnnnnnnccctctcacacacacccccttagagttgtgagcccttaaaagggacannnnnnnnnnnnnnnnnnnnnncaacactgagacaggaatcttgccaatgccccc

SEQ ID NO: 6624 - DNA, 2060 bp, Macaca Fascicularis
cagaaataataacagcgtcaccagtgaacatttgtgctagctctgcctgtgccgaaggccagctgagtatgtcactgattctagagtactcccatgaatgtcatgctttgttgccgtcatgccggtgagggaaggaggctctgatgaaggaacgtgcccagagccacacggcccgtggcaagacaaagcccaaacatgggctctgactctatagtcccgggggatcctccccacgtggtgctggctttggcaccggttcccagaattagcaatgccagatgatttcagatgcagtattaattattaagtgaatattaatgtgtgcttttaaaaagagaccaactttccatttgtgacagtggttctcaaccggaggcaattctgtccttctccctaggaatatttgggagcatctggagacatttttagttgtcataaccggcactggggtgctacttggtatctcgtgggtagaggccagggctgttgctaaacgtcatatggtgcacaggacagctccacaacaaggaaccatctggtcaaaatgtcattaataccaaggccgagaacccctgatttatagtattcatgtaaagtttcctttttgaagaagtttacttgaggacaaatagagtagtaatttaaagacgaagtaccagtacaggttcatgcagattgggcagaaatcatgactgcagtacccagctgtctagggattgggagcagtacagcatgcttcatttaaaattagtggtatcaggcacttgtacggactatcagaagtagttttcagccagggctagttttgctgatcaggtttctttctagagaagtgttttctttataattctgcccacccccatcctgatctgtcatcttcctggcatgtccacgggaatgagctcagggtaggctgaaggggttattcagctgccagtacggtttagtttcttctcagaaagtatctgggtccttggagtttctattgcccactgaacgatctttgaattaagacagatggtaaatctcatggtatggaaaaccagaccccactaagaacagttagatttccagtgtgttttctacaaagacaggtggtggacttggaattgattttcaagcttgagtgttcagcctctggactatggactctggcaaagtagcattctcagcctgctcctcttaaacatttgtttgaccacattcctgaaaaatatggctgctgagagtttaggctgggagtattcacagtttgagagatgggagagaggcagggactgggaccgccccaggtaagtagaaatgagttcttgccattggagtcaggttccagattccagagacaggggagaagaaacggatggtaaactttgggggctccctactccaggtatgaggtgtgttggtcctcagcttccaccctacagaaatctgagaacatctacaatctcggcagagtggctttgggagtcagatcaacgcagtcggctctgtcccttattcacccagggtcctcaggtaagtcttagtcccgtgtactcatttgccaagtggagctaatgatcatgcttaatgccaaaggtggtgtggctgtggagaccccctcgctgtcactgacaaataggagctgtcagcagcccagttgccacacaatgatggtgactgtgaggaggccccccatagccctttcctttgctctcatctgtggacattaaagctattggtccccaagtagctgccattaaaaatgacatccagatggccgggtgccgtggctcactcctgtagtcccaggactttgggaggccaaggaggttggatcgcttaaatccagaagttcatgatcagcctgggcaacatggtgaaaccgtgtctctagaaaaaatacaacaattagtaaggcatagtggcttatgcctgtagtccagccactcaggcggctgaggtgggagatcacttgagcctagaaggcagaggatgcagtgagaggatcatgccactgcactgcagcctggatgacagagcaagactgtctccaaaaaaaaaaaaaaaaaaaaaaa

SEQ ID NO: 6625 - DNA, 740 bp, Macaca Fascicularis
  misc_feature (1)...(740): n = A,T,C or G
gtactatgttgggtgacctgtaaatgtaatgaccaaaagaaaagccacagaataaagaagaaatggtcaaagacctggataatatgcaaattggccattatattagaacaatcaagagctgactgtattatcattaccgctttctgcctagggtggccaaattctctagaaatagacatcaagccagttaacttcacttttccctgcaatgtgtctatcactaacatttaaacactattttttaaagacataaccacaataccattatgacacctaaaaaaaaatgaacattaacttaatatcatctgttttcagtttttcccacttgtctcaaaatgtgtatttacaatattatcagtttcattactgataaatattgtgtgcctcctgataagatgcactgaggannnnnnnnnnnnnnttttgtagatttataccaaaaatgcatatcttggatataatgaagaaacagtcaaatccaagtttgagtggtatgatagctcatatctgtaatcccagcactttgggaggtcaaggcggaggatcacctgaggtcaggggttcaagatcagcctggccaacatggcaaaaccccatctctaccaaaaaatacacagattagccaggcatggtggcacgcacctatagtcccagctactcaagnnnnnnnnnnnnnnnnnnnnnnnnnnnnnnnnnnnnnnnnnnnnnnnnnnnnnnnnnnnnnnnnnnnnnngttcagc

SEQ ID NO: 6626 - DNA, 745 bp, Macaca Fascicularis
  misc_feature (1)...(745): n = A,T,C or G
agcctacccagattttttcatgtttttctagctcctccataacctccctccctcctgaggtctctggttcaaagaccaccctaccnnnnnnnnnnnnnnnnnnnnnnnnnnnnnnnnnnngggtgggaagtgtgagaagatacaaatgaaaactggccacatgttggtaattgttgaaactagataatggtacatggacattcattataccattctctccacttctgtatatgtttgcaatttttcataataaaaaaagttttaaaagtcctccagtttccaacacactcaagagagagccctaaccccaaacacagagtttcgtggaaaccccacaccaaggcaagaggcagannnnnnnnnnnnatttcatatatacactcattttctaacttttttttaaaggcccactgctttattttcaatagattaaacctgatttctgagaggtcctgaagttgggcttacttccctggctgggttatgggggagggcagggtaaaggaatccttaaaaaagtttacacttttatgtatctcacaatcttattgtgaggatgtgacttgttcagtgttctgaacttttcgaaggaatcgtgctctcaatgcaaagtgtcattctctggaattgcacctggctcaggaaaggactgtctttgtacttgaatttaaatccaatggagaacnnnnnnnnnnnnnnnnnnnnnnnnnnnnnnnnnnnctgtctttttnnnngtatgtcactt

SEQ ID NO: 6627 - DNA, 747 bp, Macaca Fascicularis
  misc_feature (1)...(747): n = A,T,C or G
agactcactccnnngacgcacccctgtctgcagctgccnnncntgntggtcntgggagcatctgcctgggcctttgagccaggcccactgtctccttactgcttccaggggagtggctgggggagtcctgtggcttcctctgggttggagagggtggctttcaagacgatgatgtcttttctagacacaacgnnnnnnnnacacggnnnnnnnnnnnnnnnnnnnnnnnnnnnnnnnnnnnnncccaaagccaccccaggctcccaagcgccctgaggagcatggctgccaatcccacagctcctcctcccttgccagtggcgccctccaggacacttggaggttgctagacctgggatccagcccttctggcctcacctcnnnnnnnnnnnnnnnnnnnnngctcccggctcctccagcagtcgatagcagccccgtcannnnnnnnnnnnnnnnnnncaccccagggatgaagacggcagcccaggcaaaggccaagcccacaggagcctcccggtctcatcccgcaaannnnnnnnnnnnnnnnnnnnnccccaagatccgtaactannnnnnnnnnnnnnnncttcctccccccgccccgccccacccccctcggggcttccgcatggtgcctgcgctttcacctccgtggtggggtgtgtgggcgcagcgtgcagggtggaggcagggagctgcgggacaggctcccgannnnnnnnnnnnnnnnnnnnnnnnnnnnnnncc

SEQ ID NO: 6628 - DNA, 741 bp, Macaca Fascicularis
  misc_feature (1)...(741): n = A,T,C or G
cnnnnnnnnnnnnnnnnnnnnnnnnnnnnnnnnnnnnnnnnnnnnnnnnnnnnnnnnccccgcactcactnnncagccggctgggatgctaagcttctctacctcccnnnnnnnnnnnnnnnnnnnttcctggtggnnnnnnnnnnnnnnnnnnnnnnnnnnnnnnnnnnnnnnnnnnnnnnnnnnnaagcctcgggtgcatggttgcatggatttggggtgtgctatgacgggtggtgtatccttgggagagaaataaagtggagggagggagatgtcaggtcagtagggcaccgatctcacctccttcattacctcctggccatgattcttctaggagataattctgctctctggagatgttggtaggaaagttcaagttatgcagctgagaagcagggaccaagtagggctcctgggtgcattgtcaccttgggtgtccacttcaatgtacaagtctcttgtgccatccttaggcaacaactggggtgggtgtgagcaggtggaaggagcctcagcctatgccattnnnnnnnnnnnnnnnnnnnnnnnnnntgttaattctgggccagtctgggnnnnnnnntggaaatggcctgggggacatgagagcaccccttnnnnnnnnnnnnnnnnnnnnnnnnnnttggaacctggagcgcaaccattatgcagccctgtaggcctcagtagtcatcccagcagcagtggctgagaggtggtggtctcagtagggatctg

SEQ ID NO: 6629 - DNA, 619 bp, Macaca Fascicularis
  misc_feature (1)...(619): n = A,T,C or G
tttttttgtgttgccctcaaattcacaggaataaggtttttattcatcctttaaaatgaggtcacaagagggggccctattccaataggagtggggtccttataagaagagattagggccnnnnnnnnnnnnnnnnnnnnnnnnnnnnnnnnnnnnnnnnnnnnnnnnnnnnnnnnnnnnnnnnnnnnnnnnnnnnnnnnnnnnnnnnnnnnnnnnnnnnnnnnnnnnnnnnnnnnnnnnnnnnnnnnnnnnnnnnnnnnnnnnnnnnnnnnnnnnnnnnnnnnnnnnnnnnnnnnnnnnnnnnnnnnnnnnnnnnnnnnnnnnnnnnnnnnnnnnnnnnnnnnnnnnnnnnnnnnnnnnnnnnnnnnnnnnnnnaacgcaacaagactccatctcaaaaaaaaacccccaaaaaacaagaatcagaggtaggacacagacaggcacagagggatgactgtgtaaagacatgggaaccgagaaacaggctctccccagacacagattctgtcatgccatggtcttgaacatccagcccctagaactgcaagaaatattcttgatgatacccagtttgtggtattttcattctagcagcccagacaattaaggcacagcc

SEQ ID NO: 6630 - DNA, 712 bp, Macaca Fascicularis
ctgtgttagcattagtataaaatataactcttaataatttcttttctgtacaaagcctttgtacagaaaggcttcatccttaaagtgatgagggtggagtcaaaaaggattcaggcgtttagaggagctgcttttcattatgaccttggagagtcccctcagttttgacacccttgtttcaccacaagaaagcacctgacaccctgggttgcatacttactactgaggggctttccccccagctttcagagcactaaattattgtgagctggtgcctctgcaggcctgagtattagggttggtgaacgctgttgcatacacatttgtgagttaaccactatttaaatgatgctgctttttaaagttttttcaaagtacaatagatttttgaagtttcaggtaactggaaaaatctttaagtgtttggggcaggataaaacaacatacaaaatataaaacaatttttgctttgaaaaattcaatgcaggtgaccatttactgcttattctgtaatgcttactgtctataaccaacttcagtaacactgaaacttgatgaaaagtttttttaaagtatttactgtagggacaaagttatatggaatgtttgtgagttggtttctataccatctgaatgtactgccagtgaagactgtaaagacacaacacactattttggagggaggatacaaattgtttaaaatttttcataa

SEQ ID NO: 6631 - DNA, 738 bp, Macaca Fascicularis
  misc_feature (1)...(738): n = A,T,C or G
ttagccagattgtgtnntccatcactgcttcnnngagatttgatggagccctgaatgttgacctgacagaattccagaccaacctggtgccctatccccgcatccacttccctctggccacatacgcccctgtcatctctgctgagaaagcctaccatgaacagcttactgtagcagagatcaccaatgcttgctttgagccagccaaccagatggtgaaatgtgaccctcgccatggtaaatacatggcttgctgcctgttgtaccgtggtgatgtggttcccaaagatgtcaatgctgccattgccaccatcaagaccaagcgtaccatccagtttgtggattggtgccccactggcttcaaggttggcatcaactaccagcctcccactgtggtgcctggtggagacctggccaaggttcagagagctgtgtgcatgctgagcaacannnnnnnnnntgccgaggcctgggctcgcctggaccacaagtttgacctgatgtatgccaagcgtgcctttgttcactggtatgtgggtgaggggatggaggaaggcgagttttcagaggcnnnnnnnnnnnnnnntgcccttgagaaggattatgaggaggttggagcagatagtgctgatggagaggatgagggtgaagagtattaacctgtgtgctgtacttttacactccattgtcttggaactgtcttatttttgttctgtaaatgtctattgccctaaatgt

SEQ ID NO: 6632 - DNA, 230 bp, Macaca Fascicularis
aggcctcccaagtatgcccctccgcagtagttagggttccaagcataggagcaggggagggagagatttaatacagtcaaggaagtcataacactggtgtggtaacaagaggagcaggaagcaaggccagccctgaatctccatccccatgtgtttcaggggaacaggacctcccccacccccttacccccgagaactttgcagcttcccttcccgccccatttttcatg

SEQ ID NO: 6633 - DNA, 771 bp, Macaca Fascicularis
  misc_feature (1)...(771): n = A,T,C or G
ctgactcatctatcaatatggatagaagttacactagtatataccatttaataaatttacactctcttatttaagaagatattgaatgcaaaataattgacatatagaactttacaaacatatgtccaaggactctaagttgagactcttccacatgtacaatctcannnnnnnnnnnnctataatgaagaaaaagatctagaaannnnnnnnnngctgactctaatcaaatgtgatgatcggaattagaccatttggcctttgaactttcataggaaaaatgacccaacatttcttagcatgagctacctcatctctagaagctgggatggacttactattcttgtttatattttagatactgaaaggtgctatgcttctgttattatttcaagactggagataggcagggctaaaaaggtattattatttttcctttaatgatggtgctaaaattcttcctataaaattctttaaaaataaagatggtttaatcactaccattgtgaaaacataactgttagacttcccgtttctgaaannnnnnnnnnnnnnnnnnnnnnnnnnnnnnnnnnnnnnnnnnnnntgtatctggaatgctttgtgttactcgcacgcttcttagaccagaacatgtaggtccccttgtgtctcaagacttttttttttcttaattgcacttgttggctctattttaatttttttcttttaaaataaataactgggaccctcccaaaagacnnnnnnnnnnnnnnnntttggtcatgtatc

SEQ ID NO: 6634 - DNA, 179 bp, Macaca Fascicularis
agccgctccattggagagcaggccccagactccatctgctcatctgagcaaaggggcaacccactgctctcactccaactccagaggtaggccggggcagtgagaccatcctatatctcatgactctccctcagaacatctccccacactcctggcctctggcccctggccatgcccac

SEQ ID NO: 6635 - DNA, 692 bp, Macaca Fascicularis
  misc_feature (1)...(692): n = A,T,C or G
acagctgcactgaggacaagtgtggagagttagggcagggagatgatgatgcctngaataagaacaccttgaattctaatcaagggaaacctagtccaactggccccgaatatgactgcccttgcctggagctctactaccctccatagctcccgcccagctgctcaagagatgaactgtgtgagtgattggcctttgcagtccagctagggctagttcagaattattccctaggtaagctcaactgtggggtttccagaaacataatttacaaggtatgaagttgtttacttttatttaaaaaattggggtttcatataaatgtttctattattttacacaggataggtaggaattatttttgtaattcttagtctatggcaaatgtggataatggtaaaaagaatcttattctataggagcttaacaatatgttttagaaggtagaatatattttcagttacgaaatatattttcatttaggcaattaggccgggtgcagtggctcacgcctgtagtcttagcacttagggaagccgaggcaagtggatcagctaaggtcaggagttcgagaccggcctggccaacatggcgaaaccccgtctctactaaaaatacaaaaattagtcaggcatagtgacaggcacttatcatgtcagctactccagaggctgaggcagaaaaatcgcttg

SEQ ID NO: 6636 - DNA, 681 bp, Macaca Fascicularis
  misc_feature (1)...(681): n = A,T,C or G
agtaaatacccatctgtcattaaaatgaatagttaggattgggagtagacagtggcttaccaaatnnnnnnnnnnnnnnntgtgggaactctttgttttcctttcacatctgtgagttcaaatataatacaaataatgtagaattagagtactaaagtgaatttttttcagagcatgtatacaatttattttttcattgttctcctctggatattttcagtttctgatggcatagctgaagtcatgttgtggctttattagtttcaggaacttggatgtctgttttaaaccttagctatcattttagtcatcccaggaagtttgacttgactattcttatttaaatatttttcaaagtgttgcaacttaatactaggaaaaaggaaggactagctgagctgaaggaagttaagattgctttcttaaccgcaaggcttagagcctttactatgctaattggcattatgaattttttaggggctccttaacacacagatatcccaaacctgttttttaggacacccaagtgttactacttcagaaatgctgtccagggtctaggggtggttggcaaagtacagccatatttttgtgtagcctgagagctaagaatgttctttacattttttaaatggttggaaaagaatcaaaagaattattttgtgacacgtgagnnnntta

SEQ ID NO: 6637 - DNA, 701 bp, Macaca Fascicularis
  misc_feature (1)...(701): n = A,T,C or G
acaagattaagattctaggatcagaaggagnnnnnnnnnnnnnnnttcttgttgattcttcaaagaaggaaccaaggtggaatttttggaagtatcttgtcaaccctgnnnnnnnnnnnnnnnnnnnnnnnnnnnnnnnnnnnnnnnnnnnnnnnnnnnnnnnnnnnnnnnnnnnnnnnnnnnnnnnnnnnnnnnnnnnnnnnnnnnnnnnnnnnnnnnnnnnnnnnnnnnnnnnnnntagaacagagaaatgtctccatgagggtttggtctcattttaaacacttttttttggagacaatnnnnnnnnnnnnnnnnnnnnnnnnnnnnnnnnnnnnnnnnnnnnnnnnnnnnnnnnnnnnnnnnntttaaacatgctattaaatgtggcaaagaaggatttttttttttaatgtnnnnnnnnnattaagtggtaatgaatgttcccaggatgaannnnnnnnnnnnnncaaaatcaagannnnnnnnnnaatcaacatgaaatatattaactacttcctcnnnnnnnnnnnnnnnnnnnnnnnnnnnnnnnnnnnngtgcctcaatatcttattgttcaacttgacattttctaggactgtacttgatgaaaatactaacacactagaccattctttggattcaagagcactgtgtatgactgaaatttctggaataactgtaaatggttatgttaacg

SEQ ID NO: 6638 - DNA, 2732 bp, Macaca Fascicularis
acataagactgcattcagtgaaaccaaagcaacagtccgagcagctttcagaatgacagtctgcagaagtgagctgagcgtgtgcgcggtacggggctctcctgccttctgggctccaacgcagctctgtggctgaactgggtgctcaccacgggaactgctgggctatggaatacagatgtggcagctcaggtagccccacattgcctggaggaatacatcatgttttccgataagaagaaattgtaggagctagtttttttttttttaaccgtccccccgccccccaaaaaactgtaaagatgcaaaaacgtaatatccatgaagatcctattacctaggaagattttgatgttttgctgcgaatgcggtgttgggatttatttgttcttggagtgttctgcgtggctggcaaagaataatgttccaaaatcggtccatctcccaaggggtccaatttttcttcctgggtgtcagcgagccctgactcactacagtgcagctgacaggggctgtcatgcaactggcccctaagccaaagcaaaagacctaaggacgacctttgaacaatacaaaggatgggtttcaatgtaattaggctactgagcggatcagctgtagcactggttatagcccccactgtcttactgacaatgctttcttctgccgaacgaggatgccctaagggctgtaggtgtgaaggcaaaatggtatattgtgaatctcagaaattacaggagataccctcaagtatatctgctggttgcttaggtttgtcccttcgctataacagccttcaaaaacttaagtataatcaattcaaagggctcaaccagctcacctggctataccttgaccataaccatatcagcaatattgacgaaaatgcttttaatggaatacgcagactcaaagagctgattcttagttccaatagaatctcctattttcttaacaataccttcagacctgtgacaaatttacggaacttggatctgtcctataatcagctgcattctctgggatctgaacagtttcggggcttgcggaagctgctgagtttacatttacggtctaactccctgagaaccatccctgtgcgaatattccaagactgccgcaacctggaacttttggacctgggatataaccggatccgaagtttagccaggaatgtctttgctggcatgatcagactcaaagaacttcacctggagcacaatcaattttccaagctcaacctggccctttttccaaggttggtcagccttcagaacctttacttgcagtggaataaaatcagtgtcataggacagaccatgtcctggacttggagctccttacaaaggcttgatttatcaggcaatgagattgaagctttcagtggacccagtgttttccagtgcgtcccaaatctgcagcgcctcaacctggattccaacaagctcacatttattggtcaagagattttggattcttggatatccctcaatgacatcagtcttgctgggaatatatgggaatgcagcagaaatatttgctcccttgtaaactggctgaaaagttttaaaggtctaagagagaatacaattatctgtgccagtcccaaagagctgcaaggagtaaacgtgatcgatgcagtgaagaactacagcatctgtggcaaaagtactacagagaggtttgatctggccagggctctcccaaagccgacatttaagcccaagctccccaggccgaagcatgagagcaaaccccctttgcccccgacggtgggagccacagagcccggcccagagacggatgctgacgccgagcacatctctttccataaaatcatcgcggggagcgtagcgcttttcctgtccgtgctcgtcatcctgctggttatctacgtgtcatggaagcggtaccctgcgagcatgaagcagctgcagcagcgctccctcatgcgaaggcacaggaaaaagaaaagacagtccctaaagcaaatgactcccagcacccaggaattttatgtagattataaacccaccaacacggagaccagcgagatgctgctgaatgggacgggaccctgcacctataacaaatcgggctccagggagtgtgagatacctttatcaatgaatgtgtcaacctttctggcatacgaccagcccacaataagttactgtggggtgcatcatgaacttctctcccataagtcctttgaaacgaatgcacaggaagatacgatggaaacacacctagagactgagctggacctgagcacaatcacaacagctggccgaatcagtgaccataaacagcagctagcttaactgagatcactggtagcccagggttgctaccaaactttgtaacctcaaggacaaaatgaggaagatgtgttcattgtggactctaaaaacaaagcaaaacacaaaatcccctgttcaaattaacaaaaaatccaagattgattcatgaaataaagaagacatgaattgttttaagtctacactttgtaattagctaagttgtgcagtattttttgacttaaacagagtatgaccctgaaaaataaaagaatctttttttcaaaactcatcctacctacctgtaaaaactgtacaaagctaatgtatttttcatattgtaaagtttcaattgtagaaacaactggtatgtacagtaccataatttaattacattttactttaaaaactttaaaaaaaaaaaaaaaaaaa

SEQ ID NO: 6639 - DNA, 749 bp, Macaca Fascicularis
  misc_feature (1)...(749): n = A,T,C or G
aagnnnnncgnnnnntgctggaagcannnnnnnnnnnnnnnggtacttctcatnnctgatgagtttgtcctttcagnnnnngaactgctgcctttgaaagggggtggaagggagttgttttaaaataggcaaatacacgtgttgattgcgagcgtgtggagaaaaaggcagttcccaccgcagttaggtcctggccatgtttcctcgcctgcgatgctctttgttctcaccctcctctcctgcctctgtcctctgatgagtcaaaggtggcctttttctctccaaccttgaattgttacctgggcccatctgctggtacagtccacacttccaaagccaagacccgagcgggctcctttgctgccccaagcctctctctcactctgtcctcgccttggcatgggtggcattgctgtgaccctgtgtgctggcgctctggcaggctgtggccggcagtgagctgggggattgcattctgctactcaggggtgacctttggattctgtctcggcagaatcctttgtcatcggctcttgctctgtccttcctgtttggccacagctctttcagtcagtgggtattctagaactgcaggatgtcacagctggaagggatnnnnnnnnnnnnnnnagaaggggaaactcctggaggctctgggagggacggaggttgttgctgaccaaggaatagctagnnnnnnnnnnnnnnnaannnnnnnnnngcctcccatcagccgtcttctcccaaaa

SEQ ID NO: 6640 - DNA, 741 bp, Macaca Fascicularis
  misc_feature (1)...(741): n = A,T,C or G
aaagagaccgagtaggtgnnnnnttttccctgtctgagtanctctgaatgactaaaattagtatgaaactaggttttggaccccccttctcaccccaccctgatataatgccaccaatttcaaataactaaaatgtgaccaattactttgcttcaagttctgtacaaatatctctgaaatctgtaagccatatttcagctattctggtttctagaatacattctgtcctaaattaaccaaagaactttttattcagtgtagttcatatttcagcataaggaaggtttgtgcctgatatgggaagagaaagaacactatgttaatttcattgttgcttcaggtctctttcaatctgaaggactgggttgtctggagaattgaacatagccaagcaatattatcagttagtaatgtcatcttaaaaatgttcagttttactaagttttattcagaggatctatgtattattagaaaaatgaagtatttctgatacggaacaaagaaagtggaaactggtacttaatgggagaagcaaaattagcttggactaaaacggacatgttttgttttgtgaattctacctaaatgtctctctatccacagagaaactagtattacttgaagatgtgaaagttcctgtggtagccataccttgaagcacagtgtttgtacataagtaaatatcttgattctaaattaaatccagatttaactaatatatattattttatatccttgttg

SEQ ID NO: 6641 - DNA, 706 bp, Macaca Fascicularis
  misc_feature (1)...(706): n = A,T,C or G
gtgattcaaaggttaatagaggctggggagattgcaggggaaacacccttgccgcatccccaagctcccccggtggaaggaggagctttctcctctggctgagtttgagaagctgccatgcagcccctagccccttccctcctggggcctccagcccctcacactgctgttcccagtgatatttgggattttgattgaagccagaggctctgtaaaatcaggccatagtggaagtcctcagcccccaggccccttccccagtctcctcccccagtctcccaaggagccattgcaacaaagaagggaaatgacaaaggggcagctggccagagaagctgggataagagcagagactcagtgtgtgggtgtcccttcccgcttcccccttcgggtcttggtttgttctgaaggggtgttttatagtcactatccacatgccagtgtgaaatgggctatctgtgacgtggtcagggtgtccattcctaatcatggggcagatgccgcaagcattcagaaaggagtctgaaagggtggccacannnnnnnnnnnnngtgacctggaggcttaggttggcctgaggttggcacctcaagctacaccagagtccagggagtcccagaggcaagtttcacagaactgtcaaatgatcccatttccttgaatctgggttttttgggtttttttgtttgtttttggcagagataa

SEQ ID NO: 6642 - DNA, 698 bp, Macaca Fascicularis
  misc_feature (1)...(698): n = A,T,C or G
ttccaagaagtnnnnnnnnttnnnggggagttgtttacatataccctgcatttaaactaattaaaacaagccaagtttttttttttttttttaaagaaccagaaagaaaaaaaaaaaaaattcaggcttagaattatctaatggaaaaaaatgtaaaaaagtacaaaaatggactaaaaagatatcagtacttgcagtatttgctatgattatttaggtttagactttctcaacttaaatgactaaatgggctgaagacttgtaactaacttgaatagggtagacttcataccctgtgacaaaaaggatggggaagagaatatcattagtcttgccatatacctactagctaaaaggaaaatggtatgtagttgttcttgggcctattgtgttgcttttcagaaggacataagactttatactttatctgatatggatattgtataattcatcattcctttatgatcatttaatgagtagtcacatagaaatgtaaaactcttggtggtactgtattttaannnnnnnnnnnnnnnnnatttattatttatgtatgtacatgtacaggacaccattcnnnnnnnnnnnnnnnnnnnnnnnnnnnttgttatttgctgttatattgtatgtttagttttgtatgtgataaacagaattcatgtaagtttttgtggacttgaatttctccttccttgaga

SEQ ID NO: 6643 - DNA, 1972 bp, Macaca Fascicularis
  misc_feature (1)...(1972): n = A,T,C or G
caacatcaaaagaaatacctaatggctggagcccacaggtgtgcaccacaggattcgcctggtgtgtgtcactgatttcttcattaaatgtaattttgacggtcaaacacaaaccaaagtggcttatttcacccctactgctgcttgccactgcttccttctcgtaagatttctttgaagaggatcagtgaccttggcatcagaactcaccactggaggctacacaagtttgcagatacctttccctgcaggagtggtgacttcacatccttctgtctctaaaaattgtgcagtgacattccgggtcaagttccttggtcaggggttgccaattctgcttttggaaaaggaaggatgtggagggaagaagtaattgtctacaaggaagatgagatgagaaagctcactgactccctgcatctggtacccctcttgatacatagtgggcatatggagaaatggctcaaatgaaaagtgggtctaatgtgggtttctcaactgatgaaccacaaaagcctccagctactattacaatgtgaaaattccaatgatccatttaccagagcagttagactatgataaaaatgcatatcatctgtaacttcttttaattaccgaattgatattaaaaacaaaacatggctaaggcatgtcctgttctgggcaaatcgggatgaaaaggtcacttgctacctttgacaactatgaacatggttaatcttctttctttttttttgagacagtctcactctgttgcccaggcaggagtgcagtggcacaatcttggctcactgcaacatctgcctcccctccgcctgccaggttcaagcaattatcctgcctcagcctcccaagtagctgagatnnnnnnnnnnnnnnnnnnnnnnnnnnnnnnnnnnnnnnnnnnnnnnnnnnnnnnnnnnnnnnnnnnnnnnnnnnnnnnnnnnnnnnnnnnnnnnnnnnnnnnnnnnnnnnnnnnnnnnnnnnnnnnnnnnnnnnnnnnnnnnnnnnnnnnnnnnntcggcaggttaatcttctttcaaaagaatcttatctttctacccaattggcaaagcaaatcctcaggattcactgaacaaatggattaagcacccactgagtgcctagcatgtgcctggacaccaggccactgggaagatgctccccctttgacttagctgtgacattctatgtgtctcaccagatccctttctggaggtcgggcttctgtaacatggctctgcctccaaaatcaaattttcaccacatgatcagggatcggcaaatattttttgtaaagagccagaaagtagatattttaagtcataaggtccttgttaacaactacttgactctgccattgtagcacaaaggcagccatagccaaaataagcaagcagtcatgtctgtgttccaataagactttatttacaaaaacagcaggcacagacaagatctggcccacaggcatagattcccaactcatggtggtgaaggacagaaaaaaacacctgtttacaagcttttgtaagaaattaggctaaatattacctgttttggttggaagatttctttggtttgaggaatgctttcctcttgccttggcatgccaagaggatagatgactctgaacgatgcctcttcagacatacctgtcatcacacgagatcaacttcttcagtttaaatgacacaaatccacattgtggagggaaaatatgtagtgccttagcttcactaatagttgtaaaacttcttttgaagacatcaaaggctagaggattcattttatgcagtgtgaacatctaacactctctgtgtcaaatatatattgtacattaccttaaactattgtaatagctaggtaacaatccttgtataaagaatgttttctcccacacaaagggcacagtattgagcactaatttcctaattattaaaagtacatgtatgtaaaaaaaaaaaaaaaaaaa

SEQ ID NO: 6644 - DNA, 1524 bp, Macaca Fascicularis
taacctgaaccaaggacccagcttggtggaagccatctttaaaatattgtaccattgcagtttttctccacaaacatttgcaaatgtttttgtgagctacatggaagaagagcaattatgggactttttatataacatcccagtctcaacgtgcgtggagtatgagctagaggtcattcgatgcttgagactggcactgaccgatgccgtgaaggacactgtacagcagatagtatctgtgatgagctctaggagaaactgtgagacaaacctaaacaagcacattgttcctgattgtttgcttgagagcatgccaaaagaatggaattatagtccaaaagaaactaaaaggaaagaatcaagcaaaagcttcacaaggcttgctgctcaggcagtatctattgtaatcagcaagttacctacggtgattgcatgtttgcctcccccaattaaatacttcttttttctgtctgagagaaaaatgtcaaaaaagtttgttgaattgaagaaagctggtctgcttgtctggaacttgattgtaattatatgtcggatatttgaggacagaaacactgtggaacttttaacaggtgcctcccttgacagatggagtaaagaaaaactgggtttaatttgtatgtgtttggagagcatcatgggagaccagacaagtatccctaatcaaatgatccaaaaggtcatacagagcattgagcagcagaagcccaactggattgaacgtcaattgttgaaagcaaggaaactgagcactgaatgtgcatttatgacaatagagaaaagcacgtccttacaagaaggagatattgctcttgaactgactgagcagaaaataaacacgatggtcctggatctctgccacaaaccaggtggcagcgagtacctgaggcaaatttatcacatcatgcagctcaatgaggaatatttaaaagaacagctgttttctatgaatagttcagaggaaaagccattacccatccgacctttaaaggcgaccttgaggagtacagaagatcagccttctgcctttaaccctttccatgtgtataaggcgtttagtgaaaacatgctagatcagtcagccaccacaaaatggaagtggaactgggcaaagttgctgccaaattatcggggactggataagatgaccttcagcgtgctactcaaaaacaggtgggaaatgaagaaggatgaaacactacaagaggaagaaaaagcaatgctggagcacttaaaacaaatttgcaccccacagaactcttctgcctcagataacacagaggaacagtaatctgcagaaaacagcaacagctttattttaggaaacaatcccatgtaatggagtaggatttttaccatagtcagaatggacctcatatgtgctgtgaagcatgaaaccaatgactgagtaatctctgtactgaaaaggaatacagcacataaagaataaagtgttacatatcttttttattttaaaaataaaaaaaaaaaaaaaaaaaaaaaaaa

SEQ ID NO: 6645 - DNA, 615 bp, Macaca Fascicularis
  misc_feature (1)...(615): n = A,T,C or G
acaagtggagttcgnnnnnnnnnnnnnnncaaactctgaggatttcttttacacagaattcttgannnnnnnnnnnnnnnnnnnngctgctccctcccaaaggcaggccaggagaagccacatttccagcagtaataccctcagtgggaatgaaccggggcaacccgaaaacacagagaaagcccgagatattgtctcaactctcgttaccaaaaagtgtgtacctaccttcttcaggaggatcgagtagaaaatatttttaattataagcggaaagctatttcaaaaagtcaagggtttctaatatcaacagttaaatacttgacaagtgaaaagagaccctggggaagtgatgannnnnnnnnnnnnnnnaagcaagtttccacatagaaacatcttcaagaacacgtacctctgagcatcacttctttctctaaaaataaaaataaatatgctgttttcctccctttttttctaattggtatcataaaagtacaagacagaagccacaaatgcttagttgccactaagaaaaaaatcttatattatacatatatgaacataattcacttagttgcatatgattgaaatatatgcacgatggtttataaaata

SEQ ID NO: 6646 - DNA, 732 bp, Macaca Fascicularis
tccaatactgatagacatattcatatcattattatatgtaatccagctacaaactctgtgtgtgtgtgtgtgtatatatacatatatatatatatatatatatatatatatatatattcaaaattatgttctcattttcccctggtattcaacaactcatttaactggctctttatcgagagtactagaagttaaattaataaataatgcatttaatgaggcaacagtacttgaagcgcttttcattcatcatcaggactttatataaaggcattgaactagcaaataagatttggaagcagaaaggcaaaaaggtattgctaaaacgagacctccgtgcaaaatgcataagctctcctgtataacattcctcccacttacttgacttgttttctgccatatttggggaccaaagtgctttttccttcatgaagtggagattcatgatcttctccccttccccttttccttctgctttccttcacccatagaaagtaccttggaatagcatagtcagtccttgcacgtgcacaagctatcatttgagtaaaactatacatggagtaaaaatcatattaaggatcagattcaacttacattttctatttcttcttcttcctctcctttcccccaccttctgctgggtagaattgtatcttgatcaaatgtgtatcctgtgccatatgtggaaatgtgcaacatatggtatttgttaaatattcattaattaca

SEQ ID NO: 6647 - DNA, 298 bp, Macaca Fascicularis
  misc_feature (1)...(298): n = A,T,C or G
ccagcctgggagacagagcaagaccctgtctaaaaaaaaatttttatcattgaagtctgggtatgttttaaaaataaaaaagtgggaaaatactgagcacagcannnnnnnnnnnnnnnctgggctttgccccagaagtgcttgtgaacctgatgaaagcctcgggtgtggccggcctgaggctcttccaggagccatgcggggtgattggttccgctagaaggttccggggtgattggttccgctagaaggttctggggaggaactggagtctccggcgtgtcctctgatgagtgat

SEQ ID NO: 6648 - DNA, 740 bp, Macaca Fascicularis
  misc_feature (1)...(740): n = A,T,C or G
gagctgccagtgctgggtnncccccagccccaggaaatgtggggttggccaggaccctcacagctctgaatttgcttctgttatttatggctttgtgctgcttcttggtaccccatctcttgtctgtgtccttccaaccccaagcnnnnnnnnnnnnncaaccccaatcctgtcaactaggcttgaacaccacagcggctgtgctcttctgggaggtnnnnnnnnnnnnnnnnnnnncagggcgctcctcagagctctattttcctgcagacaccagctctccttcctgcctttagatcctgagaaggagggaaatgagggnnnnnnnnnnnnnncctctgggagagctctgcctagcctggtttggcaagggcccttgattaccttgcccctcctccctgtctttgattcttttcccnnnnnnnnnnnnnnnnnnnnnnnnnnnnnnnnnnnnnatcatgtctctgtgggtggggtgggagaaacctctgctgcacacctctgtttggaacctggggagagcaggaggtaaggcaaaggcaggcaggcaccaagagccagannnnnnnnnnnnnnnnnntgggtgggtctttgttctgccgttttgcctttcctgacaggtggggttggggcacacagacattggaatatttgtactcctgctctcgtgccatttgagaggctgctgccccaggcaggccagcccctcctcctcttggctacactcatgtgctcagact

SEQ ID NO: 6649 - DNA, 777 bp, Macaca Fascicularis
  misc_feature (1)...(777): n = A,T,C or G
tgagtaaggaannnaccaggtgtaacaggtgtgtgcagatgaggagtggccttcatattcattgtatattggatgttgnttntgaagtgtgcnnngaggcacacttgttggttgcctgcccagcatcttctctgagaacgcccctcttagaaggtcgtgtctcctatcctccataggcttgtgcagggccgtgtgtgaggacggcatgagtcttaacccctcttttattttatttattttattnnnnnnnnnnnnnnnnnnnnnnnnnnnnnnnnnnnnnnnnnnnnnnnnnnnnnnnnnnnnnnnnnnnnnnnnnnnnnnnnnnnnnnnnnnnnnnnnnnnnnnnnnnnnnnnnnnnnnnnnnnnnnnnnnnnnnnnnnnnnnnnnnnnnnnnnnnnnnnnnnnnnnnnnnnnnnnnnnnnnnnnnnnnnnnnnnnnnnnnnnnnnnnnnnnnnnnnnnnnnnnnnnnnnnnnnnnnnnnnnnnnnnnnnnnnnnnnnnnnnnnnnnnnnnnnnnnnnnnnnnntggccttaacccctctttagattggaaaaaataatcacaacttttaaaatagcttagtgttgaaccctttggtaaactgaagacccttttataatgcaaatattcccaccaaaattaatatattttgtgagattaaacaatgcttgtatatgcttgaactttcttaaaatatgttcatgtcatactactatgaatgtacatttttatgagtcataaatattattttcaaaagcactacaggcccatgaatta

SEQ ID NO: 6650 - DNA, 602 bp, Macaca Fascicularis
caagtaggtgggattacaggcacctgcaaccacacccggctaatacatttttttttttttttttttgaggcagagtctcgcgctgtcacccgggccggagtgcagtggcgcgatcttggctcacggcaacctctgcctcctgggttcaagcaattctcctgcctcagtctccctagtagctagaattacaggcgtgcaccaccacgcccggttaatttttgtacttttagtagagagggggctttcaccatgttggccaggcaggtctcaaactcttgacctcaagtgatccacccaccttggcctcccatcttcctggaactttttgaaacaacaagaactcaaggtgcaacaattacaggtggatactttttcatagcacataccccccaaaacctgggcatcctggattacataatgagctccttcttggattatttgcaagagtcttatacgtgggcctatgtataccaataccaagttccctgtacaccattaccaagttcatgtgtttgaacgtgattctttggtatctgggaggcttagactggaggtatggtgttaattgactcactctgaaagttgactgcaatatttaatat

SEQ ID NO: 6651 - DNA, 1342 bp, Macaca Fascicularis
aactgcttaaatcttcccaaatctggtgcccataccttctatggcaggggcttttagtaccattctttaatgttagacacataaccactacctaatcatgtgaaccatttaatccttaccagcctctaacatcctaaaaccctgaacctcttccagctttcttaaactgtcagcttttcttgaaacgactctgattctaagattattttaactgtaaataggagaagacatctgaaatttaactatgatcagaaattcagattacaacagctttgtttgctgtgctgtttgtaataaaataatcccaccagccccttttggaaaaaccttcaaacggatccatgaatacaagccactgaagacacgcttttacactcacaaagacatactagatattggggcaaatattctgaaaaaagaagagaagtttcaagaagatatactcagagaacgcattgcaaaagcagaagctgaagtatgggctcaggctaatgaacgtcaaaaacaagcagtggagaaagcacttgaagaagcaaatgacagacacaaaattgaaattcagattttgaaagaggaacatcaaaaagatttacaggaagtgacagctaaaactaagacagagatgtatcaaaacatggatgacgaaatgaagagagagcacttggctgcagaacagcgcatggtccacagaatccaaaggattatgatggaatgccacagagagaaggtggaagctgtggagaaagccagggctgaagagagactcatcgcccagaaagcaatccaggcccagaaaagcaaagccacggaggaaattgtgaatactggtatcacagttactaaggatgagaagaccagtgtggcccgactgatgagggaaaaagaacatgaaatgaacgtcctctatggcatagctcagaggcagaagcaagaagaggtacaggaagtgcttcaagaagcagagaaaacacatcaggccactcttggcaatgtgatggatacactggccaacacccagggggagctgctgtctatagcaaaacaactgggaatcatgacaaattggaaagatttcctagaggaggaattacaggaaaccaggatggcatttcaaaaatacatcaattatacctttcctaagctttcaccaggacatgcagattttattctgccagaaagaaagaaaacaccttctaatcttgttattgaggagaacaaaacaactcttgattagaagtcttcaactgaaatttcactacaaaagacatcattctagactaaataaattaactcattacaaaaaccaaaaaaaaaaaaaaaaaaaaaaaaaaaaaaaaaaaaa

SEQ ID NO: 6652 - DNA, 770 bp, Macaca Fascicularis
  misc_feature (1)...(770): n = A,T,C or G
ctgaggagtgacgatgnncgtgntnnnnntgcaagnnnnngctgtggcttagttggttactggttatgtgtccctctgagtgtgtctttgagcgtgtccaccttcccctctccactcccagaagaccaaactgccttcccctcagggctcaagagcgtgtgtctgtggggctggtgtgaacccactgttgtgtgtccttgagacatttgtgttgtggttccttgtccttgtccctggcgttataactgtccactgcaagagtctggctcacccttnnnnnnnnnnnnnnnnnnntgggcgcctggagcagtttcactctgtgaggaatgagggaaccctggggttcgccctctcagaggaagggcacagagaggaagggaagaattggggggcagctggagcgagnnnnnnnnnnnnngcttccttctgcattcccaagctggcagctactgcgcggggcctgcaagtgtgggctgctgcctgcttcagcctccgtcactgcagtggagcagcgaattccctgtggcctgccacgccttcggcatcagaggacggagtgggcgaggctcgtggagtcccagggaccactggctnnnnnnnnnnnnnnnnnnnnnnnnnnnaggaaaggccaagctgggtttgcacatctgtgtctgcaggctgtgtctccaggcatggggtgccaggagggagaggcagcctgggcatgggcaagagatgactgtaaatatttcagccccacattatttatagaaaatgtacagctgtgg

SEQ ID NO: 6653 - DNA, 710 bp, Macaca Fascicularis
  misc_feature (1)...(710): n = A,T,C or G
gcacagaagtgatagaagtgtagtggggttcacttcctcaatgggtgcttctagatttttctctcctgtctcttcctgctttgtttctttaaagaaaaatctgttgtctctttttaaatatttagtgagtttttnnnnnnnnnnnnnnntttaattttgagggaagtaaatccaaaatgatcttgaagcccaaaggatttttagtaaatagattaacagcgatgaggtatttgcaatactctaaatgcnnnnnnnnnnnnnnnnnnnnnnnnnnnnnaaaattacttaatatattttagaatgtaagttagaaagtagtaggacaaggaatagctttattactcttgagaacacttggagaaatgaaaatagagtttgcttccgtgttaagttgtggnnnnnnnnnnnnnnnnnnnnnnnnnnnnnnnnnnnnnnnnnnnnnnnnnnnnnnnnnnnnnnnttcaagagagaggacgtctccacttggataatggcagacagtgtgggtaggggccatgcaccaggggaattatctctgtcaaattaatactctcctgtctactggattcttcttgtgcttcacctggattaaaaagctgtactgcctcttttgaaactgatgaagcctttctgtaagtctcaattaatgagcttgcacaatcttgtatatgtacaggaaacccatcctgtcttcctaatgtgattagtac

SEQ ID NO: 6654 - DNA, 733 bp, Macaca Fascicularis
cccaggaggcccctcgccggtaggtttggcgtcatcacacccgtgggtggtcccgcccgggaggcctgtgcttaatcactgtcaggtgaaagaggttaacatgtgaaaggaagggagagagcaagccgggtttgcaggccgcagccctggtcgtttgtttcatgtccctaacaagcagggtttacctgagcaaacacacttggcggggagctgattttactgcctccccggggcggccacgttcggccccgtccctgcgggagaatcgggagggccacgggccgctgggggcgcggggctgacgcgcgggtaatcccgcaggtgcgtccgcgaggccgcgctgctgccggaacggcggcacctgcgtgctgggcagcttttgcgtgtgcccggcccacttcaccggccgctactgcgagcatgaccagaggcgcagtgaatgcggtgccctggagcatggcgcctggaccctccgcggctgccacctctgcaggtgcgtcttcgggaccctgcactgcctccccctccagacgcctggcagctgtggtaagaggccctgcaattcggtccccagctcaccaccacaccacacactgctgcgccttcactgcagcgccttcactgcagctcaccctccataccgatccacagtgcatcttccattgccaggctacatagcattcagcaaactagatcgattcatcattgaagaaaatcgcattcattggaatca

SEQ ID NO: 6655 - DNA, 1822 bp, Macaca Fascicularis
cgtacatacttgcttctaaaactgaatagaatgatatatttgcaatattagatgccataagcaggctctggaagaaagagaagcaaaaatactttgagagatacatgttatctaacacaaaagaagtggactcagtggaaaagaggccatgacacattgctattattcaactgatgagggatagattttccctctttctcttccaccataatgagattgattagaagagaaataaagttgcaatatatttctggaaaaggagatccagattatggtaccaatttgaattgttcaactagatgattgcccagggttgtaattcattcaaatttcacatataattacatacataagtagtagttccttcaaattagcaatgcaaacaatggttgcatagaaaagacactggcatgttacttaagtttttaagctatatacaatattcaaaatcatttggcatagatattttctttactagtaaaaagaaaatgggagaagaaaatcagtattattcatttagttttttttatcataggccaggcatttttatgaagacactttttctatgctttctatgtaatcctcaggactccactgtgaaattagttttattatgattatttttaagaagagaaaagttagactgagagatacgaagtaattcacttaaggttacagagctgggaagtgaccaaggactttcaatcaagtcctttctactcttaaactcattttctacctactgtatcagatttagcaagcacatagtcatttctcaaggtttttttgtttttgtttttgtttttgtttttgttttgtttgttttttttaagagacgaggtcttgctttgttgcccaggctgctcacaaattcctggtctcaagcaatcctcccacctctgcctcccaaagtgttggattacaggtgtggaccaccgcttctggccttgggtatttattatgaaagtggtagtgttttaaaggatttccagtaattgtgaatagtgtcttagatgccaactaccacaaatgtttctggtgagtgagttggggtacttgtactcttttccagatgattaaatctattgcctgaaaaactcattcagtaatgtgacacaggggaagccatctctgattttttgtaatgactaggctagaaagcagagttctccaatgtttcctttaccttctttaggaaatactagtctactttctagaagtcaaaatttgtcttggctaccctgtttgtctaaaggtagcatgcccagctagcatggtgggatatggctggaactcttggtgacattcttgctttgaccccaattcatggtacaccaataatctttgggctaacttagggggctaaggtgagaatcattccagctttgtggctgtatttttctgagggccattggcattgtttctgtgcatacccacacaatgaaagaaccccataactgactgcccttttgcatggaggaggggcagcacagaccctgaacttcagctgtggattcaacatttctctcagggtggtggcagggtgcgtgctgaggagaagtgattctgtgtacttgctgctttcctccttcttccctcaaatatgcatcaggctcaccttctcagggtgaaaggacaaactataggaccaactgctggtaccttgtaactaagtaacgtacttgctgaaatggattaactctgtgaagtaacagaactgtcagttgtcctggtttccttgggtaagcagacagtgccagagccaatttctaactgtgttagatgatttttcttaaaaaaaaaagaaaaaaaaaaaaaaaaa

SEQ ID NO: 6656 - DNA, 756 bp, Macaca Fascicularis
  misc_feature (1)...(756): n = A,T,C or G
cagaaggtgaannnnnaggggactnnncctnnnnnattgaacatgattgaaaatataactggctctgannnnnnnnnnnnnnnnnnnnnnnnnnnnnnnnnnnnnnnnnnnnnnnnnnnnnnttttcaactgccatccatattctcattggcagcattctgatttttttttttttccannnnnnnnnnggtgagcccggaaccaccgtatcctgtcccaggaatacagtgaaatttccaagcaagagctgaggtgccaataccaaaagaccatggggagtctgcacagttctggttagatcaatagaaaatcnnnnnnnnnnnnnnnnnnnnnnnnntcctccactagcactaaatttgtcactttaaattttgaaaccagggaaannnnnnnnnnnnnnnngtccccattctccatagctcttcaatctttacatgccgcaaaacttttttgatagctcgtactcatcccagtgtctcctgaaaccccatcatgtaatgtaccgggcaccttcttttaaacaaatgtttactctgtgggtttggttcatttcaatttctgcgttctgacacatatttttttaataaagatgagaaagagaaaatgactgttgcagtacatttctagacctactttaactttacctcagatgacagtttgttaacatatatggacacattatttttaactttatgtacaatgcatnnnnnnnnnnnnnnnnnnnnttagaaattttccattaatttctgtaacaca

SEQ ID NO: 6657 - DNA, 1873 bp, Macaca Fascicularis
caatccaagtttatcagaagaacatcagcccttttctggaaaaactggatgtctgttttccccagatcactcagatgagaaactaattgaaaaagaaaatcaaattgatacaaagtttttatctagcactagtaaacatgaaaagcttgaaaaacattcagcaaatcataatgttaaagatacaactaaagaaaacagttgtgaggctaatcaagtaataaatgaaagtaattccatatctttaagttgcataaaagaaaatataaattatagtacaggcaacgattatgatgcaacttgcataggttgcacaaaggtgaaaactgatgtacttatttcagtgttagattcaaatgtgaagcactttttaaatgatctctaccaacaagaaaaccttactttatctgattataaaagaaacctggaagtaaagtggacagctcctatcgagagatgcaagcaaagcattattacaggaaacttccttatggacccattaaacctaactttgatagcaagtaaaaagtacagtattcctcagttatcagcctctgcagtgacagatagtgagggagaatcttcaaaatcttacttggataaacagagaattcttactatagattcttttgcagcatccactactataccatgccgtgagcagagctgtagaggaaaagagcttcttaagacggaacagtgctcttcaggtaactgcctccatacagatgggaatgaaacaaatgtcactgagaattatgagttggatatagcatcagtaactgaagaaagtagaagttatggggaaaatatagtgagattatcttccagtgatagttctctgcttttaaaagataatgtaaaaggctcctcttcagaaacatgtattgcgaagaaagacactgaggacagaataatgtggaaagttaaacaagtggaaaaagcaaaagattctgtttacaaaagtagcatgactgaagaatcagctgttaatactgagtacaaaaatcaaaataatcagatctcagaagaatgctgcttaaatgagaaaattattaaaactaatttgattgattcccatctaagcactaaaaataatactactgagtcagtctctttgaagaacacagtttctaatccacttaacaaaagagagaaggcggaaattaaagttactaatgactcgcagtctgacttgacattacattcagaaatagcctatatttccaaaccagggattctaggagttaatcatacacctattttacctgcccacactgaaacctgtaaagtcactactcttctgaagaaacctgcatcatacatgagtgaacttaaagaaaaacattgctcagctaatcatacggcctttatagctaatctgtctcaaattttgcagagggcagatgaagcatcatctttgcagattctacaggaagaaactaaggtttgtctaaatattctccctttatttgtggaagcttttgaaagaaagcaagaatgttcagttgaacaaatcctgatttcaagtgaactgttggtagaccaaaacctatggaataattgcaaacacacatcaaaaccatctgctgttgacactttggtagaacttcaaatgatgatggaaacaattcaattcattgaaaacaaaaaaaggcgcttagaaggtgaaccaacattccgaagcttgctttggtatgatgaaacactgtacgctgagcttcttggaaaaccacgtggatttcaacagcagtctaatttctatcctggtttccaaggaagattaaaatataatgcattctgtgagttacagacttaccatgatcaattagttgaattacttgaagaaacaaaaaaaaaaaaaaaaaaaaaaaaa

SEQ ID NO: 6658 - DNA, 746 bp, Macaca Fascicularis
  misc_feature (1)...(746): n = A,T,C or G
aacatacnnnngnttnntnnnnnnnnnnnnnnnnnnnnnnnnnnncccattgtggaagaaattctgtgtgcagannnnagaggcgcaaggctgatggcaacataaaaaattattttgcttctaaacccacccggatgtggaaactcatattagctagagtgagctgtagaaaacaaagatttcaggattgcacagtgtgtgggnnnnnnnnnnnnnnnnnnnnnccctattcccaaccacactgcccaaatgttcaagtctcctggatcagacagatgggattttagctgctgctttaaatcctagtgctggaataagtcaannnnnnnnnnnnnnnnnnttgcctctgtcactaatcatgctttatgaactcctttgattttctgaataagnnnnnnnaggttctctattattctattcttcttccaaactggaaatgattgtatctaattctcaggatattttggatgtgtgcctcaggtaatttatgtggaatgtgtaaagtgagatgtttccaattctgaatattccttccccgtttcccagtcgtccactcttggactacctttataacaacaccgagtacgtacagacctgaacccacgcccaagaagcacacacaatgactggagctgttgggaattccagtcagtggcatnnnnnnnnnnnnnnnnnnnnnnaattcaattataattttttaagaatcatacctctgnnnnnnncttttggactgtattgattaaact

SEQ ID NO: 6659 - DNA, 1205 bp, Macaca Fascicularis
  misc_feature (1)...(1205): n = A,T,C or G
tcctccatagccatatctagagtgatctctcgctgtgctaagagcaagcctccttcgcattnnntccactgccatcagnnnnnnnnnnnnnnnnnnnnnnnnnnnnnncactgtagtgagtggcatagagaatgaggacagagacccacctgcccccccccgtgctgagtcctgagtcggggtgggacggccctgcaatgtggcaggctcggtgtgggtttactactctctcccctctgactctggcatcttgataaggagggaggggcaccacccacctgggtggcgacagctggggttcgctccagtgtgtgtagactggcagagcatgtgaaggaggggctgggaagagatgggcctgggcccgtgaggcgcagaactctctccctgcaggtggtctgtctgctctgggacgagctgatgggaaagaacgcccaccggccctctcgttcacttctgttatgaatacatttgcaccaatagccctgttagtttttaaagaaatgagctgggtgggaaaagtggaaatgtaatttctattaagctagggctactttaatttttattctatgaaactgatatcccttgatgtgggaaacaggcagaaaaggctgtggggtggggggctggtgtggcaccgtgcaaacaaaatgacaaatttcaactcacgatctttgtaagaaaattgttccagtttgaatcttgatattaaagtttatgtttacaagattgccagttagatgaactaagtgtgtaaaacaattaaatagaaaaaagacattcacagacgtttcttctatgttattgaatgtgttgtttctggtgtacatgtcaaaagtttcagttttttagtagatcagaaataaatgacaaatagtgtgagatgtgttgtgaacaggcatggtgaccatggtcagctccactattgtttcctgaaatagcttctaagacagaaaatatattttatcatcaagggtgtctggagacacagaccgtgaccttggcacagcggtgtgcatcacagaggcatgtgttgagaagggtgttgttaagctgtggaaaatgactcaagagcaataaatcagtgccaaagcttccctgcacatctgaatagagacaagtgaagcccatgtgcacacagtgcagaggccgagcctgtatttcccagtagacatggactttattgactgtgaattcatttacat

SEQ ID NO: 6660 - DNA, 753 bp, Macaca Fascicularis
  misc_feature (1)...(753): n = A,T,C or G
ctcccgactgctgncttgaggtgggcagagcgggttgtggcacctcctctccctgtgtggaccaggacggtggctcagcctccactccagggaagaatcaaagtttctagagtcgtgagaaaactattgagagtggctctcctctgattcttcactgtgaggggcattcttcatgttctcccagctgttccaagactgggccgtagaattccatgtttcaggagccgaagaccctcccagagcccaggtgcttcaccacagaccccaagccgtcaagcacatcgcccagagcagtggccaacatcatggacccctgtgccttgtcacagatgggtgctggtcctcaggtgttgcagacactgctgggtccatggggtcggattctgccagtttctgcactgcagccaaagatggtcagaagcattgtcgcttcactagcatcaagtgctcaaagacatggcagccgtttggtggtacttaagtattcaaaatgacgacaactgcagattctctgacagaaaccagcacggggtcttcaccttccttcaccccacaggtgacacgccagggacaacagcatctcagtggtgatttccaaaccaagcctttgtttttggtgtggcagtttgggggtttgctttaatgtttttcaaattgtaaatgttgggctttgtattttgatgtaaactgagaataatggcattttagggcctgtgaccaaaaatcaagcttgtaactcgaccatggatctca

SEQ ID NO: 6661 - DNA, 2342 bp, Macaca Fascicularis
atcttttctcccacaagccagttaccctgcttcacttccttgtgtcccagagcctggagaggagcggagccggcgggagcagcatgttgcagccgctattctaggggtgctgggtgaagtaggccgccctctgccaccctctcccaggtgccaggaggaggtggctgactgtcactcagggcctcaccgaaccatgcccagctggggaccgcaccagccacaccttcccagctgcgctgcccaccgccaggtgatgctgacgctgctggtccagggaccatgcttggagacccactacactagggcaagcaggaagagagtcctccttctggaactgaagaaggcagtgtgaagacccatgtggagcgccttaacccgcagcctctctgaccacccagttggcaaagaccctcaggccatgaggactggccaaagacagtgagaggacgtgcaagggtaaattcctgagccccgcagtcttatttgctgccctgacgtccctgcaaaccagcccaagggttaaccgtaagcggatgcctgtatggcggccttactgatgccacgcaggaacaaagggatgaggactcgactgggatgcctgtctcacaagtcagactcgtgtagtgatttcacagctattcttccagacaaacccaaccgcgctctcaattacttaagaatgtacaaatttacagcgacagaattgcaggaatccaggagattatccacagaagaagctacgaggtgggcagattcctttgatgtgcttctctctcataagtatggggtggctgcattccgtgccttcttgaagacggagttcagtgaggagaacctggagttctggttggcctgtgaggagttcaagaagaccaggtcaacagcaaaactggtctctaaggcccatagaatctttgaggagtttgtggatgtgcaggctccacgggaggtaaacattgacttccagacccgagaagccacgaggaagaacatgcaggagccgtccctgacttgctttgaccaagcccaaggaaaagtacacagcctcatggagaaagactcttaccccaggttcctgaggtccaaaatgtacttagatctgctgtcccaaagccagaggaggctcagttagacctcagaagtggactcccggaaatcaccggctttcccctcctcttgctgccaagatcatattctaatgtgaaatgttataggtgttcaaaagtggtggcattgggggtgagaggctgggggtgaggagggaatgaagggccattccaaagtatgacccagctgctggagcttggactctattccatttacccatgtttgtgttttggttagtggtagcgccttgccgctgtcacccttttctgggtcagcaacttgcccttcataatgccttgggtcacctctgctgagagggcagatttgctgtgctaggctaatctgtaaataatgcaaatgcaattcccaccacctccacaccctcctcagttaggattcctgactccacttgttgtaaatccctgggaggagtagctgaaagacttgggctccactctgtgatttgtagtggccagctctgctcactgggacctcacagcttaggagagaggtttctgtggaattccaagtttctagtgctgtcattgacaggtgacctcttggagaaggagtgaaatccatggagttgtttgtttcttccatttccattggaccagtgtgaaaaactgtgattactttccatcttggcctaggaaattcacaagactaccctacccttacatttccagaaagagtcttgggacatgtccttcatgacttctgaagtggaattgccatgaagaaggatacagcttacaaatcttcctcaattctacgaagaacttttccagaagtcaggagacgagggaatgtagcaccagtagacttctattcaaaggggtaccatataacctgtctgttgctctgtgtcttctctgccctcacctctctgcagcatcatacatcactgatctcttaggatgacgacttggcaaagggaggtgaattcctgtagcatggagtgctcccacggtgcctagtactttccctctgccaggtatggaaaaggtggctgggctgggtgtgcgctccaaccccggtagcattagctgagtcacgcggcgagcacacaacagatttgtagcagctcatctgccatataaaccgcttggctgatggtgtcctcattgagttgtttcattaccatgtaaagtggaatcatgtctttcacctttactataaacaaggctgtgagaacataataaacagaacctgaacaaaaaaaaaaaaaaaaa

SEQ ID NO: 6662 - DNA, 701 bp, Macaca Fascicularis
  misc_feature (1)...(701): n = A,T,C or G
aaaaaaaaaaggaagactnnnnnnnnnnnnnnnnnnnnnnnnnnnnnnggcctagtggggtgccaggcnnnnnnctgctgagcctaggcaaagtacttnnnnnnnnnnnnnnncaattctgatcactagtagtcttcctatgcccccgaggctgctgtgctttatggtnnnnnnnnnnnnnnnnnnnnntcttcatgtccctctcatagnnnnnnnnnnnnnnnnnnnnnnnnnnnnntcaaacctttgtgggccaggaatgtgcccaaatttggactagctcatctnnnnnnnctggggctgggtnnnnnnnnnnnnnnnnnnnnnnnnnnnnnnnnnnnnnnnnncgtcatccaacacaaagagaaatgcaaccaatgaagaatcaagccaccgaggcagggcagaggnnnnnnnnnnnnnnnnnnnnnnnnnnnncctgtgcatcacacttacctaactgcttccccggacaccctccacctctagtnnnnnnnnnnnnnntgcnnnnnnnattgctgggggagaaacaaacaaacaccaaccagtattgctacttagtttctaaggctgcacagggaagggaaagactgggctttggacaatgtagaggtaatttatatccgcccctannnnnnnnnnnnnnnnnnnnnnnnggcatgggggtaactgaaagtgagtacataaagtctttctggttt

SEQ ID NO: 6663 - DNA, 941 bp, Macaca Fascicularis
  misc_feature (1)...(941): n = A,T,C or G
tgtttcaacagtattctagagagaagtaagataatggtgttcctctatttgcctctgacttcttgttaatgaaatagtactcattaaagtcttgggagtcacagatattgtttagcttaggtaagcattttacaacttttcagacacaagtacataaatattattttacaatcaaaaatatttaatgtttccaaattgaagaatagatgtgataattaaaccttttataaagttttaaaaagacatgaaacataaacctaattatacataaaagaaaagaattttaaacaagagcttattgtgatgacattactcataactttcacctttaaaaccttttcttgagtagctattcaaaagtaaagaccgcaaattttgttgctcagatatttcttatgttttgtatatttaagctctttatttattgaacagatgtgtcattaattgatttggagcattactattagtaaaatttgattttttccctcagtcatcggtaaatcagctccacctggaatttctaaggacccagttttagtcaatattttcaaggaatgataacatcagaaatacagtcttaattaagataacaaatattagccatcaaaatggaaccaagacaagattctaatgtttgtaaatagtcaatccatatttgtgaacattagcatatgttaatgaatagttaaggcaaaagactctagcagatagctatttccatcaacatgttaaatgttataaaagtctagaattattggtaacatgaaatgattccaagacggaatttctgtgttacagaatttactagaaaagtgctgtgaaagtagaatgaaaaataaaatgatcccttgaaataatgcggaaagataggacaagcttttggatatttacatagattagtgaattaggtgnnnnnttctcctgnngtatacctagttccc

SEQ ID NO: 6664 - DNA, 702 bp, Macaca Fascicularis
  misc_feature (1)...(702): n = A,T,C or G
atgccttgaggtgnnntnnnnctggctttggaaatagctnnctgccccctagnnatggactcttcacagttatttccagtttataaaaaggaaaagctgatcggatccatatttctctctgcgtgtctccttgggaaggttgggctggtaaatatttgcaaggtcaggttaagcagacagacaattgaaaacactgggcaggtccaaaaggatagtcccaggtcataggaatggcttggtgcagttaacgggtgatgaagcaagaaatcttccttcctacttatgtcttaaggatggacagcctgtgtctcttgctgtgcctcttgctggcgtcttcctttattgaagcttgctgatgcactgtacatagtctctctatataggtatagatatattatatatacaaatatcaaacatctcaccacacccaccccaaaagttacactgtgtgtgtggggggagatgtaatcacttctcagtgttttgagttgattcaccaaaggcaaattttggaatgttcttgcgctttgtgcacttggaggggaaaacccagctacatatgcactttctcggttgtgtgtgctatagagaggttggaaggggtggttggaaggggagagaaactgagatggccctctatgacccgactgctgggatgtatctgcttttgggagcagactgagtttcttttgcaatttgtct

SEQ ID NO: 6665 - DNA, 629 bp, Macaca Fascicularis
  misc_feature (1)...(629): n = A,T,C or G
cgttggtggtagtattaagtcctcatttgattggctaaagttaatggtaagcttgctatattcccgtgctttctcccgaacatgccagattgtcaacgtcctttttttttaaacttaaatttaaatttttaattttttgctggctattaggggtttggtgcttcgatttggtagtggaaggggccatctgggttcatgttatacatggtttgtctcaagcgttagttgcgttgtctacttattatagaaggggtttttttccgtagtgtatttgtagttaatcccttttaaaaccttacagttaatgagcattggcagttgagaataggtacagatgtccttggttgctgctttttcttgtctgaagtaagctatttctacaatcccccgccccgctttttttttttaaacagttcttggtcttttctgtgaaatgatccatttttgaccgatagttgattcaatatcagaaattggtggcagaaaccaaagccagattggcttctacattactggcagcgtgggcattacctgggaacttgttagaagcttgtttcaatccccatctagggctggagtcaatctgtatatacctcangatgattgtcatgaacactgatttagaaagc

SEQ ID NO: 6666 - DNA, 710 bp, Macaca Fascicularis
  misc_feature (1)...(710): n = A,T,C or G
gtaaaagactgcnntatgctggatcatgtgctgctggtataaagttctggccttctaccttaaatgagctcatgactggttgatgataaaatcctggcttggtttcagtccaaagaactttcccaaaacttgacacgcaagttacatctctaggaaacaaaacgcctggtgtaagaatatataagggcaggaaggaccaggtgcggtggctcacttgaagtcaannnnnnnnnnnnnnnnnnnnnnnnnnnnnnnnnnnnnnnnnnnnnnnnnnnnnnnnnnnnnnnnnnnnnnnnnnnnnnnnnnnnnnnnnnnnnnnnnnnnnnnnnnnnnnnnnnnnnnnnnnnnnnnnnnnnnnnnnnnnnnnnnnnnnnnnnnnnnnnnnnnnnnnnnnnnnnnnnnnnnnnnnnnnnnnnnnnnnnnnnnnnnnnnnnnnnnaatttgaattttaattatnnnnnnnnnnnnnnnnnnnnnnnnnnnnnnnnnnnnnnnnnnnnnnnnnnnnnnnnnnnnnnnnnnnnnnnnnnnnnnnnnngatacgagccacagacnnnnnnnnnnnnnnnnnnnnnncccagtgacggcggatctgaaaagacagaaagaggcggtcagcttgacttgttttctgatattttcaaggttattagttgcgttattctgttggactgttacaagctgatcgtcagaacttnncgtaagttaag

SEQ ID NO: 6667 - DNA, 578 bp, Macaca Fascicularis
  misc_feature (1)...(578): n = A,T,C or G
cacacccccatcagggcccagctggctgccagaagttaggaggggagagaaccgnnnnnnnnnnnnncccacccagggaccctggggctcnnnnnnnnnnnnnnnnnnnnnnnnnnnnnnnnnnnnnnnnnnnnnnattaagcccccccctgtatggaggtgccacaccaggtgccaaagtacaaaaatggacaagatgcagctttgtcctccagcagctcaccaactgatggagaaggatccccagaggtccctgtagaaaagttgctttgatcttnnnnnnnnnnnnnnnnnacagatagattccccnnnnnnnnnnnnnnnnnntttggagtnnnnnnnnnnnnnnnnnnnnnnnnnnnnnnnnnnnnnnnnnnnnnnnnnnnnnttgccccaaaatggagcccaaatgaggaaaggccctcccctctcagcctttcccagatggggtcgcatgggccactgcagactcaaggtagcaggtgaggttnnnnnnnnngcaggtggttcatgtgagcccaggagaccagctcgagcaacatggcaaaaccccgtctctactaaaaattagccagata

SEQ ID NO: 6668 - DNA, 2470 bp, Macaca Fascicularis
ataaatgttaattttgttaaagtctaaatcaaagatatttgcggcttacaattttctgcatttagatactttcccccaaaacttatgaatttaatcaagaatattaataagcctattatgtatatatgtagtgccagggagaaagtgatatacgaacaagatgcttggcgtggattgacttaggatctcatattcccaagggagtcagagctcacctagttacctagtttgtaatgctgatgggagagggaagaaggaatctggtggaaagggtgattcactcttaatgacctggctcagatcccctcccccgcctcttttctgactttgaggtcagatagttgttgttggcattttccttgtgaattacatcaggcttcagtttggtgtctcatatctgaccgtttaagtgaaaatataattcacactttctaagcattttaaatgtttagctaaagttagcgtgatatgcagccttttcaggatttgattgatagctgataaactggaaagcagatgacttgttaacctcagactttctatctagggctattgtagtcagaccttgtttagagtactggccagctggagggtgtcctgagggagaccaggatggtgacgagcctggaaaccacatcacaagaggaaagctgaaggactcaggcagcttagctgggaggagagaaggcagaagaattagtggtcttaaaacatttagagggctctttaatgtggaagcaaaagaagagttgttttgcatggctctaggggaacagaattaggacagtgggtgttagtttaacacattttcatttggtggtcttagaagccattggtaaagatacattaagcccagtagtattctaattatgtttgcaataaatcttgttttaaacaatgaaaatactgaaatgggatcgtaaaatagagaagttatcataatcaaattttgtattaataattcataataaattgtgtcagagaagatttttaaggcagaattttcaaactattttaagtcaccaaacaatttaaatggaagaccaaatttttttttttaaatttaattttaagttctgggatacctgtgcagggtgtgcaggtttgttacgtaggtaaatgtgtgccgtggtggtttgctccacccatcaacccatcacccaggtattaagccttgcatgcattagctatttatccagatactctctcgcccctcatccccacaacaggccccggggcgtgtgctattcccctccctatgtccatgtgctctcattgttcagctcctacttgtaagtgagaacatgtggtgtttggttttttttttctgttcctgtgtcagtttgctgaggatagtggcttccatatccatccatgtctctagaaaggccatgatcttgttcctttctaaggctgcatagtattccatggtgtatatgtaccacattttctttagtctatcattgatgggcattgggttgattctatgtctttgctattgtgaatagtgctgcaaaaaacatacgtgtgcgtgtatcattataatagaatgatttatattttattggacatataccgagtaatgggattgctggatcaaatggtatttctggttctgggtctttgaggaatctccacactgtctcccagagtggttgaactaatttacatttccaccaacagtgtaaaagtgttcctattcctccaagcctcaccagcatctgttatttcttgacattttaataatcgccatcctaactggtattagatggtatctcactgtggttttgatttgcatttctctaatgatcagtgatgctgagctgtttttcatatgtttgttgattgcacaaatgtcttcttttgttcatgtcttttgtccactttttaatgggactgtttcttgtaaatttgtttaagttctttgtagattctggatattagcccttggtcagatggatagattgcaaaaatttcctcccattctttagattgtctgttcattatgatgatagtttattttgctgtgcagaagctttttagttgaattagattccacttgttaatttttacttagaacaccagaactttaatgaaaaaatatctacctttttattttccttaatttatagtcactattaaatgaatattttaatggcccagcgcggtggctcccgactgtaattgcagcactgtgggaggccgaggcgggcagatcacctgaggttgggagttcgagaccagcctgaccaacatggagaaaccccttctctactaaacatacgaagttagccaggcctggtggcacatgcctgtaatcgcagctattcagcaggctgaggcaggagaatcgcttgaacccaggaggtggaggttgcggtgagccgagattgcaccattgctctgcagcctgggcaacaacagtgaaactctgtctcaaaaaaaaaaaaaaaaaaaaaaaaaaaaaaaa

SEQ ID NO: 6669 - DNA, 2576 bp, Macaca Fascicularis
aaaatgcaggccccagcggaacgcacagccctcctgtcctcctccggtgcccctttagccaccccacccccatctctaagggctctcattctccagctgccgccgcagctgggttccgaacacgccgccgggccccgggagggagaggggcaggtgccagggcggtgcgcagcatccgctcccggtgccaccttcagtgcggcgggcacacgcgcgccccgcaacccctccctcaccctttccccgttgctcaatctccgccagccgcggtcgctgcatcgtcagagagctgcaagagggaggcagcaaggcgcggccgctagcagtgacaccatgtgaccggcacggctcagtgacacgcagctttggttaaagagcgggcgcacaggaggggaggagacggcgcgcgggacagggaggaatgtcctgtcccccttaaaccatcacaagccatggttgcggaagggccacgcgcctcccagtaggagaatgactccgattcgtgaccctcagcgcgggtgcatgtggatgtaagtgcgaggccggcgagcagagtgtgagtgggggttggtggtgaggggagattctgatgcaatcggcccggaaaggaggaggagagacaggcgagcgcggactggggcagccacgccactccgcctgaaggtcgccaggagcctccgcccttcaccttcctcggaaatccgccaggccacgccaagctccctgcccagccctgactgacgggagccaccttttcccggcctccgcagccagaccttgacacaaaggacatcaaactgccgagggtaaaaaccccggaagggcggacacatccacgtcgcctttcgccacctttccctttatctgcggaggtaagatatttattgagtgtctactgtgtgccaggcactatatctatgtgcatagaaaaaccctggaaggccatacaacaatatatatagagagtgatcgtctctgcttgctgagataacaggggtgtcaagcttccatttttggtatctacttctaaatacactcagaacaggagaaatttggactaattttcaaactacagatactttctaaccatgatgcatttcaaaagtggactcgaattaactgagttgcaaaacatgacagtgcctgaagatgataacattagcaatgattccaatgatttcactgaagtagaaaatggtcagataaatagcaagtttatttctgatcgtgaaagtagaagaagtctcacaaacagccatttggaaaaaaagaaatgtgatgactatattccaggtacaacctccttaggcatgtctgtttttaacctaagcaacgccattatgggcagtgggattttggggctcgcctttgccctcgcaaacactgggatcccactttttctggttcttttgacttcagtgacattgctgtctatatattcaataaacctcctactgatctgttcaaaagaaacaggctgcatggtgtatgaaaagctcggggaacaagtctttggcaccaccgggaagttcgtaatctttggagccacctctctacagaacactggagcaatgctgagctacctcttcatcgttaaaaatgaactaccctctgccataaagtttctcatgggaaaggaagagacattttcagcctggtacgtggatggccgagttctggtggtgatagttacctttggcataattctccctctgtgtctcttgaagaacttagggtatcttggctatactagtggattttccttgagctgtatggttttttcctaatagtggttatttacaagaaatttcaaattccctgcattgttccagagctaaattcaacaataagtgctaattcaacaaatgctgacatgtgtacgccaaaatatgttaccatcaattcaaagaccgtgtatgctttaccaaccattgcatttgcatttgtctgccacccatcagtcctgccaatttacagtgagcttaaagaccgatcacagaaaaaaatgcagatggtttcaaacatctcctttttcgccatgtttgttatgtacttcctgactgccatttttggctacttgacattctatgacaacgtgcagtcagacctccttcacaagtatcagagtaaagatgacattcttatcctgacagtgcggctggctgtcattgttgctgtgatcctcacagtgccggtgttatttttcacggttcgttcatctttatttgaactggctaagaaaacaaagtttaatttatgtcgtcatatcgtggttacctgcatactcttggttgttatcaacttgttggtgatcttcataccctccatgaaggatatttttggagtcgtaggagttacatctgctaacatgcttattttcattcttccttcatctctctatttaaaaatcacagaccaggatggagataaaggaactcaaagaatttgggctgcccttttcttgggcctgggggtgttgttctccttggtcagcattcccttggtcatctatgactgggcctgctcatcgagtggcgacgaaggccactgagacccgccaaaaaaaaaaaaaaaaa

SEQ ID NO: 6670 - DNA, 720 bp, Macaca Fascicularis
  misc_feature (1)...(720): n = A,T,C or G
atacaacccactgcttgtttgttgcttttcttctcatatttattgtcaaagattaatgtttcataaagaaatgactaaggaaggaaaagaaacaaatgctctaaagatcttctttccccaagcagttttactggtgaaataaaaaccagtaacaatcaatatcagaaataattaaaatgtctataaacatgtaaagttacttagcaaactcatgctatataaaaatggctcacttccctaaaaaaaagtaatttttgtagtctgcaagttttttttgtttttgtttttttgctgtatatacttgttaatcttacatgttctcctgagagaagataaagccattccttccaggttgtaaagtaccatgaaaaggtctttcaaaaatattcctatcaaccaggcacgnnnnnnnnnnnnnnnnnnnnnnnnnnnnnnnnnnnnnnnnnnnnnnnnnnnnnnnnnnnnnnnnnnnnnnnnnnnnnnnnnnnnnnnnnnnnnnnnnnnnnnnnnnnnnnnnnnnnnnnnnnnnnnnnnnnnnnnnnnnnnnnnnnnnnnnnnnnnnnnnnnnnnnnnnnnnnnnnnnnnnnnnnnnnnnnnnnnnnnnnnnnnnnnnnnnnnnnnnnnnnnnnnnnnnnnnnnnnnnnnnnnnnnnnnnnngggagtgggacgttgtctcaaaaaaaaaataaaattaaatttaaaaaatttcctatcttctga

SEQ ID NO: 6671 - DNA, 742 bp, Macaca Fascicularis
  misc_feature (1)...(742): n = A,T,C or G
cattttacagctcagtaagccaagtacatttnnntatttaaatgacaactttggtgctttaaaatgaggtaccactnnntaaagctagctgtgtcaagttaaagaaagaaatcagcacttttttctcccagaaatgtaattgccaaacactatccattcccatcttaagttttacaagtgatagannnnnnncgttgtagtgatgctggccaaatggtgcccagcgggtgagaacggaaaaaccccagatttcagtgaactaatacacagcttgagtgtttccatgtgctaatgttgcacacttactaaaaacaaaaactttggaaatggaaaataatgtannnnnnnnnnnnnnnacatgcttctttgggcaaagatacattgttttgttccacaatttgtatttaaaggccaaataacatttaaaacgtagacttactggccttagcaatgctggcctgttaactgataactagaacttaggttcacatttatgtaaagtgtgtaaaagctagtagagcgtgcatagtaggcactcaggaaatgtttggttccttttgcccctcagtaagtttattttaccatcttcccgcctgccgttctgactttattaagtcagcctgtggaccagagtgttaatgagagttattgcagaagagactgagaaaattggtatatcatgcagataacatacaaaatctttttgtaacgtaaaaaaatgcagttttattattgcttgtgc

SEQ ID NO: 6672 - DNA, 758 bp, Macaca Fascicularis
agctcagtttacacatctctgactagacaatccataatagacccagatatttatgatcagttattttttataaaagtacacaggcaaccttttcagcaaatgattctggaacaattggatgtttatatgcaaacaaacacaaaatcctgaaccttgacccatccctcataccgtatagaaaaaacacaataatcgatcagagacctaaatatagaacctaaaactgttagaagaaaacacagaggaaatctttatgacctaggattagacaaagatttctgaggatacacaaaaaagcacaagccatggagaaaaaaactcacttttgagaggccaaggcagatggatcacctgagtctaggagttcgagacaagcctgggtaccataggaagaccccatctctacaaaaactaccaaaatcagccgggcatggcggaatgtacctgcagtcccagctactcaggaggcttgaggtggcaggatggcttgagcccaggaggtggacattgcattaagtggagagtgtcctgctgcactccagcctgggcaacagaacaagatcctgtctcaaaaaggaaatagcttttaaagtttagaagtgaagtcttggtgagaaaaatctcaaatacaatgttcaagttagtagttcaaatgtgttactagtttaagattttgaaaacagattttaactcttacatgtgttttctttctcttttatattggtttgactggcatattggagaagttgtaaactgta

SEQ ID NO: 6673 - DNA, 713 bp, Macaca Fascicularis
  misc_feature (1)...(713): n = A,T,C or G
tggttgagtacctcccatctagataataagcattcagtgagaatgnnnnnnnnnnnnnnnnnnnnnnnatgtaaatgatgtctttatgagatgaagtccaagtaggaatgagctcgtccatggtctgtcctcaggtcctgtgttaatttatccctgtcagtgttttgtgatnnnnnnnnnnnnnnnnnnnnnnnnnnnnnnnnnnnnnnnnnnnnnnnnnnntttccacgtgtgcgttttctnnnnnnnnnnnnnnnnnnnnnnnnnnnnnnnnngcatctgcnnnnnnnnnnnnnnnnnnnnnnnnnnnnnnnnnnnnnnnnnnnnnnnnnnnnnnnnnnnnnnnnnnnnnnnnnnnnnnnnnnnnnnnnnnnnnnnnnnnnnnnnnnnnnnnnnnnnnnnnnnnnnnnnnnnnnnnnnnnnnnnnnnnnnnnnnnnnnnnnctcctgcccgggatgacaaagcctcctatgttgcctggggacacagcaccgtggtgaacccttggggggaggtcnnnnnnnnnnnnggcnnnnnnnnnnnnnnnnnnnnnnnnnnnnnnnnnnnnnnnnnnnnnnnnnnnnnnnnnnnnnnnnnnnnnnnnnnnnnnnnnnagcgatcagacctctatgctgtggagatgaaaaagccctaaagtttatgtttctaatgtgtcagannnnggaagatatgattctacagcatannnnaac

SEQ ID NO: 6674 - DNA, 457 bp, Macaca Fascicularis
  misc_feature (1)...(457): n = A,T,C or G
tgtggctgcggggatgcataaggtatgagtgctttttaggatgggaattgagatataagatttgggggtggggttgtgccaattaccttttatttgcatggatttcggttttcatgctctgtcctcccctcctttggtctcaccgggtccctctgactgctctgtgatttttagtgatggaaaagggagtgaggnnnnnnnnnnnnnnnttgctattttgggatggccagtttaccctgaaaattcccatgagaagggagatgacggtagcagcgacatgcccacctgtgatttctggggcccttcttttctctttgctggttcagggactcaagtccaggccaatttgactcaaagtccaagggagaagagaaagaggggggtggggagtgccaaattcctttattttgccaattgtttctcagccaattcgttttaatacttttttttttttttt

SEQ ID NO: 6675 - DNA, 919 bp, Macaca Fascicularis
  misc_feature (1)...(919): n = A,T,C or G
atnnnnnnnnnnnnnnnnnnntgtactgtgtagttctatatagtttgtgttannnnnnnnnnnnnnnnaaactgttgaaaatttttcagatggcctagtttcatccctcttactggtttatctgtaatgaatggttaaaaataagggttatattttaccctcagatgcgtttttgtactttcagagcaggtttaaacggtttttttccccccctatnnnnnnnnnnnnnnnctcatggaaatccttttcccgatctttgtagcaccacctactggcagannnnnnnnnnnnnnnnnnnnnnnnnngtttaaaaacttgcttaggacaattgcatcagatatagaagttttgccatcagaattctttgcagacttggaagttacacgtttgcttgtaactgagatgggcttcacaggaatgtagttgccagttcatatcacaattgccctttctatatgaggtttgaaaatgtaaactgctatgcatagcttgggcaatagccctaaattgctatgacaactaatgaaccagctacgtatactggtattttaggtgcaagttgtaaagcaaaatatctgtgtattctgcttggttaacaaatgtatatttgtagccctttcatgcaatagcattcaagttgttgtttataagagaagaaaaaactgataataggagaaaattgcctttctgaatagaaatatagaatagcaacgtttatggatatcacaaataaagaattcaattctttacatgattgagtgagagtatgtataacctggtgggtgggttcagagtaccttttaatctagtgtgcttaacttgatgttatgataatatttaacttaaatatttgacttaaatattgatgttgaaggctcaaagctatactaagaaactttctgaaagattattgggctta

SEQ ID NO: 6676 - DNA, 718 bp, Macaca Fascicularis
  misc_feature (1)...(718): n = A,T,C or G
gctcacatagctggtnnnnacgcccagcggcccacccgccggcagctgtgggaggttgtggtggctggaggaggcaaggggtagtgtggctggggttgggaccccacagggccgttgcccaggaaaacgaggagcctccctgcagtaagtcggccgaggcctgagcttgccctgcctagctactgacctcaggtcgaggggcccgccggccatcagccagggttgtcctggggtggcaggaggcagggaggagcgggcctctttgatgagggcgtgtgtcgcatggagtcagttgttcatcccagcttccccgtggcccccgcctcccatgtctttggagcaaaattccagggagtcaggtgtgtgctcagccaacctctgtcccattcccagaccctcgtccccaccactgtttttgtcttcatgagctgtcccttacaggcaggggcttcccacaggctgggggccttggggcagggagcatgagctgggctggcccaccatgactgacggctcccggcctggcttgttccccacagcaggctgctcccaggggtgctgccgggactgccatgcccacctggcaggggcccggggtggccatcctcacccggttagggaatttggggtgaggttcctcaggagccctcactctgcctgtggacgctggaaagaccccaaagactctgcaaagaccccaaaaacgctgcaaagaccc

SEQ ID NO: 6677 - DNA, 725 bp, Macaca Fascicularis
  misc_feature (1)...(725): n = A,T,C or G
cacggnnnaatgccccgtccctgtacaacaacccgagcaagaagcggggcgggctgtggtggacgtacttgctgagtctcatcttcaaggccgcnnnnnnnnnnnnnnnnnnnnnnntcttccaccgcctctacaaggnnnnnnnnnnnnnnnnnnnnnnnnnnnnnnccgtggagcctnnnnnnnnnnnnnnnnnnnnnnnnnnnnnnnnnnncannnnnnnnnnnnnnnnnnnnnnnnnnnnnnnnnnnnnnnnnnnnnnnnnnnnnnnnnnnnnnnnnnnnnaggtcttctacctggtgggcaagaggtgcacggagatcttcagccccaggcaccggcggtctcggcgccgggaacgcctacccgacacctgcccaccgtatgtcctctcccagggagggcaccctgaggatgggaacnnnnnnnnnnnnnnnnnngggtcggccccagtggatgcaggtnnnnnnnnnnnnnnnnnnnnnnnnnnngataagatcaccaggtccccccagctgaggccacccaggaaaacaggcaggggcannnnnnnnnnnnnnntagcagggtggtgaggacggtggctgtgggggctcaggaagctcacccaggggccaatgtgggaggtggcgggtagtttggtccctgggtcctgagcctcaggggagggaggttgatggctggcggggattttgtatatggcaatagtgtannnaaacctctaa

SEQ ID NO: 6678 - DNA, 725 bp, Macaca Fascicularis
  misc_feature (1)...(725): n = A,T,C or G
cttattatgtgagactgtattttgctctttattttgaaagatgttttgcctattgcctctattannnntgctgagaagtcaactgttgatgtcatcttgnnnnntgccatgtgacagttgtctatcacttgcttcttacaagatactctcttcnnnnnnnnnnnnnnnncattttaccacattatgtctggatgtggaccttttgtgcctttagcctgcttggagttttttgagcttcctggatgtataatgtttccaatgtttatcatcaaattagaaaaatttcaaccattgattgtttcaatatatatattttttgctgtttctttcattctctattcttcagtttctgctagtgtgaccctcatggtgacatgtggtaccccttgcttggaaactgatgnnnnnnnnnnnnnnnnnnnnncagccacagccactgctttgacnnnnnnnnnnnnnnnnnncatatattgttagtcattccattttcatgcccacatgttnnnnnnnnnnnnnnnnnnnnnnnnnnnnngcgttgggtcttatttctttctaattattcagtagaaacagaaaacgtatttcggatgtacaatgtaagtgataatgaaaagtggtgatataaatgtatagtataaattaattactttcaaagattccattttcttattttgatatgtttattgttactttaccagaaataggtgactaatctttttgttatt

SEQ ID NO: 6679 - DNA, 789 bp, Macaca Fascicularis
  misc_feature (1)...(789): n = A,T,C or G
aatgccaagtcagtgtatgtgttggaaatgctactgcttctctagtgagtaaaattggcctggatacagaaggagaaacctgtggaaatgcagaaaagcttgcagaatatatttgttccagggagtcctcagcactgcctcttctatttccctgtggaaacctcaaaagagaaatcctgccgaaagcgcnnnnnnnnnnnnnnnnnnnnnnnnnnnnnnnnnnnnnnnnnnnnnnnnnnnnnnnnnnnnnnnnncaagggaacctgaacagctacnnnnnnnnnnngggggttccagccagcatcacatttttcagtccctctggcctcacatacagtgtcaagcatattcaggagttatctggnnnnnnnnnnnnnnnaattaagtttgcannnnnnnnccccactacggctcgcgcgctggccgcccagggnnnnnnnnnnaggggcactgcagagagccccacgccacaagccctggccactggcatcaggaaggcactccagccccatggctgctgctgagtcagccacctgtcgcttgccccatgctgcctccctgggctgggctggctctggatggagctgggcattggcaagggctctcaggagctgctgccatcagactcctgcttcaagcctgnnnnnnnnnnnnnnnnnnnnnnggatcaggagannnnnnngggctggcctcaggcccacgtgcacgtgaccaccctctgtggaagccagcttgaactctagccctgtgagagcttcctgtgcccagcaggaaggaaataaaataaac

SEQ ID NO: 6680 - DNA, 688 bp, Macaca Fascicularis
cgcgagccgggaccacggagagcagggagacggagcggctcaggcccccgcgcaggaagtcccgcccttcccgcagcggataggctcaaccctgtggctccccgccccatcagatgcagtcgcttcgacagcttggcgcgcccaggccaagggggaagccttcgcctcacttccgcaccacttcactccacttccgctcaggggtcgggactctccaggcagaggccgacctccagcctcagccccgtgctcgcccccactgaagcacagacacagggcataagagagcagattctctttattgagatacgggacacagcgaagggtggagagacggaacagccccccagcctcagccctctccacgggggccggatgccagagatgggagaagaagagattcagtctctcgcccgggaaactcagtcccgcagagggtgccggcaagggtgggacgcgacccgggtgacgcggtgcagggagtctttaaatagaggaggggctggagcggggaagggcgcccgggccctagcgcaccatgtattccttgcgcttattgagccgaacttggcagaaagagaagcctccgaggaggaggtaaaggcccgcggcgatgaaacagttgtagctgacttgctcgtaaaggttgtatatgttctgggggccattcctgggggtgggaatgaag

SEQ ID NO: 6681 - DNA, 257 bp, Macaca Fascicularis
gagagaatgctctttaaaaatctgcaatttttactatcagggatcatttctatagctcattactcgtgaatttccctgaatgtgtagagcaaaataaaatctgctgttagatgtaggctatttgggattttttttttttaatcgaactagagttaatctatttaggcttgagtcctgcttttgctacttactgggtctatgcctttgagaaagttatttaagcactccaagtctcagttccacttctataaacagga

SEQ ID NO: 6682 - DNA, 2263 bp, Macaca Fascicularis
aaacaggaaggccaccgtggaggtcaagcttccccatgggcaccttctcagattgcaattggggatgaaatgaggggttttcttgaaaccctcacgcaggtaccccttgggcagccttcaactgctcgggggaaggaggccccaggcacagacaactgcagtataaacaatcatccctacagtgctctgtcagggctactgcggggcacgggatggtagggaggaggccgaactgcgcgattttacctggcttctccagaaggggaaggcggccagttggacctggtccttgtgttcggagaacagagtcgacgtcacgcaagcctcgaacgcgtgcgaaggtcggcgtctcttccctgggtgacgcaggacgcggagggcgccggcaagacgctggcgcaagcgcggcccaggagcgccggcctccgagacggtgagaaaatggctagcaacaatcattggtttcagagttcgtaggtccccagctttgcccagatgctgaaaaagaacctgccggttcaaccagcgacacagacgataactacacccacaggatgttcctccgaaagttacagcctgtccaagatggcatccaaggttacgcaagtaacgggtaattttccggaaccattgctttccaaaaatctttcatctatttcaaatcctgtgcttcctccaaaaaaaaatacctaaggaatttataatgaaatacaaacgtggagagataaatcctgtgtcagccttgcaccagtttgcacaaatgcagcgagttcagcttgaccttaaggaaactgtgacaacaggtaatgttatgggaccgtattttgccttttgtgctgtggtggatggtattcagtacaagactggactgggacagaataaaaaggagtctagatccaatgcagcaaaattagctcttgatgagcttctacaactggatgaacctgaaccacgaattttggaaacatcaggtcctcctcctttccctgcagaacctgttgttttacctgaaccagcatatgtttcaaaagtacattatgaagggagacatattcagtatgcaaagatttcacagatcgttaaagaaacatttaatcaactaatttctaatcattcagaatacctgaaatatagcagttcattggctgcttttatcattgaaagagctggacagcatgaggttgtagctataggcacaggtgaatataattacagccaggacattaagccaaatggaagagtattgcatgacactcatgctgttgttacagcaagaaggtctcttcttaggtacttttacagacaacttctgctcttctacagcaaaaatcctgctatgatggaaaaatcaatattttgtacagaaccaacttctaatctactcactcttaagcagaatatcaacatttgcctttacatgaaccagttgcctaaaggatcagcccagattaagtcacagttacgtcttaatccacattctatatctgcatttgaagccaatgaagaactctgtctccacgtggctgttgaaggcaaaatttatctgactgtttactgtcctaaagatggtgttaatagaataagcagtatgtcctcaagtgacaaattgaccagatgggaagtgcttggtgtacagggagcattgctgagtcattttatacagccagtttacatcagcagtatactagttggtgatgggaattgcagtgataccagaggcttagaaatcgctataaagtaacgtgttgatgatgctctcacttcaaaacttccaatgttttacttagtcaacagacctcatattagtttagtaccctctgcatatccacttcagatgaacttggaatacaaatttctgagtctgaattgggcacaaggagatgtttctttggagattgtggatggcctgagtgggaagatcactgaaagttccccatttaaaagtggtatgtcaatggcaagtcggctttgtaaggctgcaatgttaagtcggtttaacctgcttgccaaagaagctaaaaaagaattacttgaagctggtacatatcatgcagccaagtgtatgtctgcctcctatcaagaagctaaatgtaagttgaaatcctacttacaacaacatggctatggatcctggattgtgaaatctccctgcatagagcaatttaacatgtgaaataggcaatccattgtcacattaaaaatcttgtattgtttggtatgttttgactagtaaaaatgtttttaaaaaaaaaaaaaaaaaaaa

SEQ ID NO: 6683 - DNA, 673 bp, Macaca Fascicularis
  misc_feature (1)...(673): n = A,T,C or G
aagcatggatcagacatcacacgatttttggtgaagaagtaaagtagaaaaagatatgaatgaatgacaaatgttttacatgtggaagactttaatacaaaagttttccatgtttgtttaatatattaagagtaaaaattttctgaacaaaaatcaagaactcaaattctcttgtactaattattttagtgttaattacattttgaaagtacttaacagaaactaagatacaatactaaatatttctgtggcctttttgatttgatgnnnnnnnnnnnnnnngtttcagcaatgttttgttaagctctttacccctaatatgcctaatcactgtattgtgcatagatggtgtttaaaaaatgtactctcaattacctaaaaatgcttctnnnnnnnnnnnnnnnnnnnnnnnnnnnnnnnnnnatggaacattgtaaaacctcatgggaaatttcagacacaaatcattatttgggaattctgggccaagcattaccagcttgcttagggttcaagagagattgtacactgaatacctccagaatgagcttggggtacacattttgggtgttgcttttcttgcttttttagccagtcatctttatcaaaaatatccttttcaaaatgaaatacctatggtgtttgcggacaatttgggggttctgtgtaaagt

SEQ ID NO: 6684 - DNA, 2150 bp, Macaca Fascicularis
  misc_feature (1)...(2150): n = A,T,C or G
aaacttagtctttgaaaagccattaaataaaagtcaaaatgaatacaaatttaaactagtcatctcaaatacatttgttatttaaagctattggtttctggaataaatctaccttaaccaatttttattgaccacacaccttaagtggtagtacagtttatgatggttctgcaaagggttcaaaagaaatataactcgtcgtcgtttcccgcagaactgctgactataatgggaaaccagttacactttcatgagaaattgtgaaacaccaaaataaacagtacaccaataaataagtgctttgggagagagcagaataagcaaatttacatggtcagaggatgttgatggagcgaatgggaactcaaggattgttagaatttaagtagacagaaaaaggggagaaatatttattgctggggaacaccttaagtaaaggtgaaaagattatcattaccaaatagtaatgatagtgaattctgataaagtattagtcaaacacccaacactgttctgagaattttacatgtactcactcatttaatactcaaaatatcccataaataggtagttattagcttcatttgacagatgaggaaagtaaagtataataaatgtaagtaacttgcccaagattacagtaagaagaaaatggtagactcaagatttaaacccaaggaatctggtctccctctctggagtcaggttcatttcaacagaggtattttattgtctaagagcatataaatgtgaatcgatatagtggagttaaagtaaggtaaactttgaataatgtatagcaagatttggggtgcaggcagtgtaatttgatacagtaagggttgttagcggtgagatgtagaatgacaaccggattgtcagtgggaaagacagtaaatttgttcacaggtgtatagtggtggaatagagtacacaacccagaactctactgaaaacagtatagtatagaaatctctaacttacagttaactgaagatgtggaataggaaagtatagacactagaaatatggattggatctcccttgttatctaagtgttgtgagatagaaattaatcataattgtcagtcactaactttaggaaaagaagatggctaggctaacatttttatttcttaaaagggatgttaccagtggaggcttcttagcataggcttttgataacctgcttaaaattaagcactatattttataaggatgatttactagttgtgcttgtttcatatacttctcaagtctctaagactatatgaagaagcactcaaaaatatctagaaattaaatctaatattaattccaaaacatcagaatcagatggtttaataatccgattggccatcttcttattccttaccataattttttttaaatgagggtaaaactaattgaactgagcatactacaagtaattagggtcagattacaagaaggattatgtttatttttagtaattgtagcctgttaatatacttgcggtattctctggctatcactcctttcataatgcttttttttttttttcctgcaaatgctgaatctcataagaagttggttaaataacactggaaattagcatttcttacaaaatcacagttacagattaatgtgttaagtacgtactctgtattgctgtctctcaaatttctttatatgtatatatgaagcattttttaaagagggtatcaaccttaattgcataccaatcataatctgctcttaaccacagctttcaaggccgttttgtttgagtcacatgtgcaaatgtgacatccctcatccatgttctgtttcatcttgacctttaagtataaattgaaatgcgtataaaatgcactttatccagttgatagcgtattagtaataaaatgtgtcaggtaaggatattttagaaaagttctctgtccctctctctctctctcccctcctctgttgctgtatatatacctcctaattgaatagtaggcacacttttttaaagttacgcaaaagannnnnnnnnnnnnnnnnnnnnnnnnnnnnnnnnnnnnnnnnnnnnnnnnnnnnnnnnnnnnnnnnnnnnnnnnnnnnnnnnnnnnnnnnnnnnnnnnnnnnnnnnnnnnnnnnnnnnnnnnaaaaaaaaaaaggccaca

SEQ ID NO: 6685 - DNA, 2000 bp, Macaca Fascicularis
  misc_feature (1)...(2000): n = A,T,C or G
cttccatgctatttgtgcagctcagaactgacatccttcgtgagacctgcttgtctggttactaccctgtcacctccagcgcgttgtcattcctcctgccctccagcgcgttgtcattcctcctgctcggcaatctgcatagaggctgcttttatttctctgcgactgatctcagtctgtctgttaatgtgtattttcttctcaactaaatcccaacttggataggtcattttctcttgcacgtcttttccaattctgttctactcattcagtcaacacacaggaattgagcacccacgtgccaggccacgtgctgggtgcacaggcaccaacagtggacaaaaggccacatccctagtcctcgaaaagctcacggtttacaaaatacccgatgggccaagtattcagcgacttcatgagtaactcaaaatggtttcaaacgacgtgtgagccagggagctgtttcagccctagctctggctatttactcttgacagttaaatggagtcaccgggtgtgacctactaaaatccaagctgtcttcataatcataaattgtaaagctcttgggtagacgctaattcaccacatgcttatagctcccctgcacagccatcgccgtccccctttgctgagtccgtgcttccccgtcggtccccaccagtgctcccgtgaacagtttcacagattgtctggggcggagaaccaggttgctcttagtacacagcccactccacatgcagctccccaggcgggttcagcagcacctgagtgcagcctgggcaacatggtgaaacccatttctccagagaatacaagaatnnnnnnnnnnnnnnnnnnnnnnnnnnnnnnnnnnnnnnnnnnnnnnnnnnnnntgagaggatcgcttgagcccaggggcgacagaatgagtactttgtctccaaaaaaaaaaaaaaaaaaaccacacacacaatacatgagtagatgtataccctgttcgggagacaggtccactgatctcacactcggatgctgcaacgatgtcagattgccacagaaacacgtggggcaggttctgtactttcctggtcctggctgtgctgggtagcacggctttaagatgcatcttgagtgtggccacccagtccagattccacattcgagtgggcaggacggcccttctgtgctgctgcaatggccagtaacatttccacagcagaggtccctgctggcgtccatcatgtgtctccctcccgctagacttcaccatccttaggaggagaaactgggccctcttggtaatcccatggcctggcaccaagtgggtgacctgtaaatgtgtgtggatgaagtggacgaatagcccctcccattgaaggagcagctgttagcattaaaccagccggaaccctgccgcagtcgcaggcaggcgagcgtggcccctgtgtgctgccggcactgctctcttgtcctgacagtttgtgctcaggatggggtgcatggctggagtgcttgactttatactgcagtctctactgaacttttcttttagggaaatacatgttttactccccagtgcttgaaaagaagctaccagtttgctactgccaccatcacctccagtcaggatatgagtgtaaattaaaatgatggtctttataactccaactcaccaaaacatagtcgagacaaattttactttgnnnnnnnnnnnnnnnnnnnnnnnnnnnnnnnnnnnnnnnnnnnnnnnnnnnnnnnnnnnnnnnnnnnnnnnnnnnnnnnnnnnnnnnnnnnnnnnnnnnnnnnnnnnnnnnnnnnnnnnnnnnnnnnnnnnnnnnnnnnnnnnnnnnnnnnnnnnnnnnnnnagaagaaacccatttctccagagaatacaagaatnnnnnnnnnnnnnnnnnnnnnnnnnnnnnnnnnnnnnnnnnnnnnnnnnnnnntgagaggatcgcttgagcccaggggcgacagaatgagtactttgtctccaaaaaaaaaaaaaaaaa

SEQ ID NO: 6686 - DNA, 747 bp, Macaca Fascicularis
  misc_feature (1)...(747): n = A,T,C or G
ttacacacactgtatgttatagannnnnnnnnnnnnnnannnnnnnnnnnnnnntataaatcaacaccttaatatgctgcgacaaaatgtagactattcagacaaaatgcatacctaaagactagctcataagggnnnnnnnnnnnntggcaaatgcgtatgccaccaacttacaaaaacactttgttcgcagannnnnnnnnnnnnnnnnatgttggataaggaattatagacctctagtagctgaaatgcaagaccccaagaggaagttcagattttaatataaattcactttcatttttgatagctgtcccacctggtcatttggttggcactagactggtggcaggggcttataactgactcnnnnnnnnnnnnnnncaatagccaatatcagaatttgtgttgaaggaacttgtctcttcgtctaatatgatagtgggaaaaggagaggaaactactgccattagaaaatataagtaaagcgattaaaatgctcacattaccttgacacatagttttttcagtctatgggtttagttctttagatggcaagcatgtaacttatattaatagtaatttgtaaagttggttggataagctgtctatgtggcaggttcatggattagttctctatgaaaaatatatatttactgaagattttgtgacattccttctcccatcgcttccttgccatgcattgtaaataggttcttcttgttctgaggttcaatattgaattctcct

SEQ ID NO: 6687 - DNA, 726 bp, Macaca Fascicularis
  misc_feature (1)...(726): n = A,T,C or G
tggggcccagtgcatagaagttcactgttgtaacagtcaccaccaaatcannnnnnnnnnnnnnnnggctggtttctattccttggactctttatctagaatatttcatttaatcctgaaaataagtctgtgatggtgggcaggggtgatttccccgttttactgaagcagaagctaccactcagagaaaaggnnnnnnnnnnnnnnnnnnnnnnnnnnnnnnnnnnnnnnnnnnnnnnnnnnnnnnnntgtgcagtcctgctgtccgcaaggccggatgggggaggtgatgggggaggtggaaagagtcatggagggatgtggtggccccaggactagggaagcccatggaaggacagatttccttcagagatgagctggcagcctcacattcctcatatccaatttctcagaatgtgtgtgtgtgtgtgtgtgtgtgtgtgtgtgtgtgtgtgtaagttgggggggtcctcctgcctcccggtattctatctccttggggaaatggaggtaggtccatagagccccagggattgggcctccctggcagcccacacccgctctgaggcctggatcctggcagcctggatgctttgattccaagtctaccctggaaattcccaggcacagcatgcctggaggtgtgagccgcctcttagaagctttataatcctggataatgctgctgtaattggcattgttttgcctttacaatcctctcattac

SEQ ID NO: 6688 - DNA, 135 bp, Macaca Fascicularis
  misc_feature (1)...(135): n = A,T,C or G
agtcccataatacttggtggtctcaaattttcacaaggagatatcaatggtgataccatcgttcccnnncaggtttcagtttatctcaagacccaggcatatcatgaaggagccctttcccatgtcagcagcctc

SEQ ID NO: 6689 - DNA, 729 bp, Macaca Fascicularis
  misc_feature (1)...(729): n = A,T,C or G
atcacatataatgggagatccgtaacagagattcagagaggtacatggagttccagggtcattggtcagcaannnnnnnnnnnnnnnnnnnnnnnnnntgccccttgatgctcaactaannnnnnnnnnnnnnnnnnnnnnnntgtccaggtcgtctccgtgggcttttctcnnnnnnnnnnnnnnnnnnnnnnnnnnnnnnnnnntgttttcatttacttgaatttgaaaatgttagggtttcccccaccttttaagaaggaaaagaacctgtcctaccagcatcnnnnnnnnnnnntaggagcccatggctgaaaggagttaaaacgcccagtggtcatgcannnnnnnnnnnnnnnnnnnnnnnnnnnnnnnnnnnnnnnnnnnnnnnnnnnnnnnnnnnnnnnnnnnaaaataagagaagatggttaagtatagctaatgaataaatggttgtttctttagaaaagtaaacacacacagagtgtaagaggagacgacgtggccctccctgaagnnnnnnnnnnnnnnnnnnngtgccctgccctcacttcccacacacaccgcccaggaatgtcaggctgattggttcccggaagggtgtttggcaagaggcagtgcatggaactacgtgtagagggagggaaatttgtgtgtgacttttgtaaatttttacagattgcagcaattaaatagttgattactgtgttgatttaaatacttatggaa

SEQ ID NO: 6690 - DNA, 702 bp, Macaca Fascicularis
  misc_feature (1)...(702): n = A,T,C or G
cctggggacctcccccattccgacccctacacagcttgagagccacagacgcctggcttctccagcctcccctcaccacacagttctggccacagctccggctcctgtgctgccacttctgtgcttgcagagcaggggaacggaatcagcccccatcaccgtggagccaaagtgtttgcttctccctttctgcggccttccccagcccaggctcggctgccacccagtggcacagaaccgaggagctgccatcgcccccccatagggcagcttgtccagcctcactgtcttgctcctgccagctacttcccctaggagtgaagggtggcatggaactgggcacgtgccagcaccgcccctagcttccttcgctgtcccccaccccctgaccctccagctcctcctggccctctcacgtgcccccttctgctgggcctttagccctagaacctgcaggtggtgggggtggctaccaagaaggaacagaggtctcaggaggagtctgggtggtccagccctgaggattgaccccacctcctgctgccccatatcctatcttcatttctgcttattcatttaccctcatttagagccatttgcagagatttagaaagatttacagtaacgaatggattcctatataaagattatttttatannnnnnnnnnnnnnnnggaaattgtaatattgtacaggtccaag

SEQ ID NO: 6691 - DNA, 749 bp, Macaca Fascicularis
  misc_feature (1)...(749): n = A,T,C or G
ctttgattttgtaccatggaaattgtatttaaccatacagggttttggtatgtttatattgtttaccttagtgatgtatttgtttaagtggctaacatccaaacgattgtttgaaggcatcagagtaatcttcagtgtggaatgttaaataacgcttttatactgtattttgtactatgatgtaactccccttccttatggctaggctactgtaacacttgcctgtaatcagtgaagggctgtgcaccttgtactannnnnnnnnnnnnnntgctggacagatactgggccagtgttattgaggtgatcaagatctgttccacagggctattgccacaatctnnnnnnnnnnnnnnnnnnnnnnnnnnnnnnnnnnnnngtatgttgtgtgatgatcagcactaagtcctgcattcctgttaaagccacttgggtcataagaagggagtaaaaaatgaagtctgactagaattctactattgcagaggccaagtacatttagtatggcattgagttgtgatatagttttactttgatgtgcattttgaatttcagctacacctagatagacgtaaaatgataattaaaatgctgtaaccaacttatctaataaaattggcaaccagccactattttgttgactatgagaaagttaaagtttatgttaatttttagggtccgatagaatatttcatgtgtattacagtggtattcctatgctatgtctctaaactttnttcaaaagctaa

SEQ ID NO: 6692 - DNA, 2107 bp, Macaca Fascicularis
  misc_feature (1)...(2107): n = A,T,C or G
gaatattgaaaaaatagatgattaagaaaaagaccctctggtgaagtttaatacaatctcttctataaatctatgcataatcacctctaaggaaatgagaacaccaaagattaaagcagattcagctaaaatattatttatgtctttaagtgcttttcactaattcattagttgcaataaaaagtttttttgttttttgcaaaatgaccccataatgaaaaccttaaattaaataattttgaaacatcctttaattctctatattgctcttctggaaataatatattttgaagcactttcacttccctttagatgagaaaaggtcaaataacctcaagttttcttctttttttcagaacagaaaaacattctgtcccttcttttcataaatttgcgtgtggatatgattttttaaaaatacagaacaaggcccccattactaagctaaactttccatgattgtaaaacactatgccagcaatggagctaaactggctgccaccttgtgttagtccatccttacactgctatgaagaaatgcccgagactggataatttataaagaaaagaagtttaattgactcacagttccacgtggctgggaaggcctcatggtggaaggtgaaggggaagaaaggcatcttcttcacagggcggcaggaaggagaaatgtggaacaaagtggggaaagcccccgtagagactgggtgcagtggctcacacctattatccaagcactttgggaggctgagatgggtggatcatctaaggtcaggagttcgagactagcgtggagattgaaatcccatctctactaaaaatacaannnnnnnnnnnnnnnnnnnnnnnnnnnnnnnnnnnnnnnnnnnnnnnnnnnnnnnnnnnnnnnnnnnnnnnnnnnnnnnnnnnnnnnnnnnnnnnnnnnnnnnnnnnnnnnnnnnnnnnnnnnnnnnnnnnnnnnnnnnnnnnnnnagagtcaaactctgtctcaaaaaaaaaaaaaaaagaaaaaaagaaagccccttaaaaaccatcagatcttgtaagaactcactgactgtcacaagaatagcatgagagtaaccacccccatgattcattacctcccactgtgtccctcccatgacacgtggggattatgggagctacaattcaagatgagattttggtgggtacacggccaaaccctaccacatctctcctatcccgttgattctgaggctgacttagcagctcttgctagttatgggaaggtctctgctttttttcctcaccataagtgttgaaataaagatgctcattttagggctggatgtannnnnnnnnnnnnnnnnnnnnnnnnnnnnnnnnnnnnnnnnnnnnnnnnnnnnnnnnnnnnnnnnnnnnnnnnnnnnnnnnnnnnnnnnnnnnnnnnnnnnnnnnnnnnnnnnnnnnnnnnnnnnnnnnnnnnnnnnnnnnnnnnnnnnnnnnnncagctacttgggaaacaggcacaagaattgcttgaacccgggaggcagaagttgcagtgagatcgtgccactgcacttcagcctgggtgacagagcgagactctgtctcaaaaaggaaaattttaggagaacgtgcatactgatttgtacatatacatactgaatgttcaaagcatattcacagaatattacctttatttgctgagctagtggtactaattccatctgatggactgggatatggatcgctggctaagttaacgtcatataactatgtaccgatgccaaagttagccacatcttacttccagacatttaccttatttctggtttcaaaaattattaaatcttggccgggcgcggtggctcaagcctgtaatcccagcactttgggaggccgagacgggcggatcacgaggtcagnnnnnnnnnnnnnnnnnnnnnnnnnnnnnnnnnnnnnnnnnnnnnnnnnnnnnnnnnnnnnnnnnnnnnnnnnnnnnnnnnnnnnnnnnnnnnnnnnnnnnnnnnnnnnnnnnnnnnnnnnnnnnnnnnnnnnnnnnnnnnnnnnnnnnnnnnnnnnnnnnnnnnnnnnnnnnnnnnnnnnnnnnnnnnnnnnnnnnnnnnnnnnnnnncaa

SEQ ID NO: 6693 - DNA, 1903 bp, Macaca Fascicularis
catgctgtgaggtaatacactcttgcaaggattggatccaggactgacaagcttcctagcagccagctcagagggcaatgtgatcctgtaatgattcagagcacccacacattaaaacaaatctttgtcatttaggaaaatacttagagttcatttcctcagttgcactagccacagctgaagtactcaatagtcttatgtgactagtggctaccacactggatcacgaagagagaatatttccaagttctgttagtgcagaaataggtggaagaaaaggtgcttcctctgggtggtgtccagagtgctgaattctgggcagccagggggcccttgttctgctacgggttgaaggttcagcctgaccacttcttgtcaaagtcggggagtctgagctggttctgggcctagcaaggcaatctactctgttaaagtcgatagagggagaagctggggagaatactgcaattttttctatgagccctctgtagagggtgggtggtaagggttccacagaccgctccttggttccacaggccatgcccggaggtgctggcttcgagcccttcagacaagtaaggtcagctctgccccttcctgcttcacttgccctgtagctgtggatgctaccactagggaggtcctgcctggggtcctgcaggtgtgcagctcagagccagctgagcccccaggaacccctcctgccgctcacagccgtctagatgcagctcctctgcctactgttgtctactctaaaggtagggaaagggtaggggcacttggacttagagaccacccgctggcactgatgatccccactgcaggacttcagggaggctctccagcaggcgcctgggactcggacagaaatggcaactccaagtgtgctttgggggacgctgccactcccatggaaggtcctcgctgcccacctccccgttctccctctcggcttagcctgggccgccgtcacaaactctgtagacctgacctgggccaggccaacaacagtgaaggcatcgaccatgactacctgcccctggtgcggctgcaggaggcaccaggctccttccgcctggacgcgcccttctgtgccgctgtgcgcatctcgcaggagcgcctctgccgcgcctcgccctttgccgtgcaccgtgccagcctcagccccacctcggcctcattgccctgggcacttctaggccctggtgttggtcagggtgacagtgccacagccttctgcagcccgtcccccagctcgggctccgagggtccgggccaggtggacagtgggcggggctcagataccgaggcctcggagggggcggaagggctgggcggcaccgacctgcggggccggacctgggccactgccgtggcgctcgcctggctagagcaccgatgcgctgctgcctttggcgagtgggaactgacagcagccaaggctgattgctggctgcgggcccagcacttgcctgacggccttgatctggccgccctcaaggccgcagcccgggggctcttcctgctactgcgccactgggaccagaacctgcagctacacctgctgtgctacagcccagcaaacgtgtgaaggctgcccgctgctgcttgggttggcgccccacccaacacactagacactgccgcccaggactggcctcttggtgctgggaaggtgtaggctggtgccagcctgtcccccactgcttcctactccctccctagagccctcttgcccccacaagaagtgcctgcctgtgctctctcccgctcctcccaccccacacaccctcccctccatcctctgagctccccgcagcacagtggaaggggagagagccacagtccccaaatcctatgcaataaagtgcctcttaggactgctaaaaaaaaaaaaaaaaaa

SEQ ID NO: 6694 - DNA, 706 bp, Macaca Fascicularis
  misc_feature (1)...(706): n = A,T,C or G
gcnnnnnnnnnnnnnnnnnnnnnnnnnnnnnnnnnncagctcatcggggacaagtggggnnnnnnnnnnncccggggctggtgtgtgatccctcgagatgacccccttgtgctctatgtctacgctgcccctcaggacatgagggctcacacctccnnnnnnnnnnnnnnnnnnnnnnnnnnnnttgggccccagggggacccnnnnnnnnnnnnnnnnnnnnnnnnnnnnnaactctnnnnnnnnnnnnnnnnnnnnnaggagctgaagggccgctgggtgaaggccatggannnnnnnnnnnnnnnnnnnnntcccagctggcccaacgatggggacctgtccgacnnnnnnnnnnnnnnncactctcctgcccacctctccccaccctgaacccagctcctgccacagactgaccctgtggcctcaggacccactgccccaaggggtgctttcacagaattgnnnnnnnnnnnnnnnnnnnnnnnnnnnntcccgatctgggatgcagaaaatatgggtnnnnnnnnnnnnnnnnnnnnnnnnnnnaagtgtctcagtttgccttgcggggagggggctcctgggccatgggacttcnnnnnnnnnnnntgggaaagccccaggtaaccccggactggtggtaccagagtgtggttttcaaccggggctgctcatttgtgtctcccggggagctttaaagagt

SEQ ID NO: 6695 - DNA, 745 bp, Macaca Fascicularis
  misc_feature (1)...(745): n = A,T,C or G
gaattaaaatataaaagtgccctgagtgggcactgtgctcctgttctggcttgtgctttttcccatgatgggcagatgctagtctcagggtcagtggatannnnnnnnnnnnnatatgatactaannnnnnnnnnnnnnnnnncacgttgactcagcacaccaggtatgtcacaacttgtgcttttgcacctaatacccttttactnnnnnnnnnnnnnnnnnnnnnnnnnnnnnnnnnnnnnnnatttgacctggaaacactttgccaagcaaggagcacagaagatcagctgaagcaatttactgaagattggtcagaggaggatgtctcaacatggctttgtgcacaagatttaaaagatctcgttggtattttcaagatgaataacattgatggaaaagaactgttgaatcttacaannnnnnnnnnnnnnnnnnnnnnnnaaattgaatctctaggactgcgtagtaaagtgctgaggaaaattgaagagctcaggaccaaggttaaatccctttcttcaggaatccctgatgaatttgtatgtccaataactagagaacttatgaaagatccagtcatcgcctcagatggctattcatatgaaaaggaagcaatagaaaattggatcagcaaaaagaaacgtacaagtcccatgacaaatcttgttcttccttcagcggtactaacaccaaataggactctgaaaatggccatcaatagatggctggagacacaccaac

SEQ ID NO: 6696 - DNA, 621 bp, Macaca Fascicularis
  misc_feature (1)...(621): n = A,T,C or G
ggaannnnnnnnnnnnnnnnnnatgattgcaccactgcactcnnnnnnnnnnnnnnnnntgagatcctgaatctaaaaaaaaaaagtccacagacggaaggtgccgttgggagccccggtagaaatccacgtnnnnnnnnnnnnnnnnnnnnnnnncgtggccgtcagggcgctgccccctgccccccgggtaggcgcttttgtcnnnnnnnnnnnnnnnnnnnnnnnnngtctaaaaaaagactcctgaagacgaggnnnnnnnnnnnnnnnnnnnnnnnnttttgagctttttannnnnnnnnnnnnnnnnnnnnnnnnnnnnncgatttttcctcagtaggcgtcagtgaagtcaggtccaggccttggtgtgtctggaatgcttcaagcacattcgaacacttgattgtaagggagagccagtactttggaacggaactcacccgaggctgtggccatggcatgggcaggctagctgggagacaagccccgtgtctttgggaacaagggnnnnnnnnnnnnnnnnccctgggactcatgaccggacaggaccccagcagggaggccgcctggcttggagggtctggtctaacagccggacttggccttgaaccgttg

SEQ ID NO: 6697 - DNA, 762 bp, Macaca Fascicularis
  misc_feature (1)...(762): n = A,T,C or G
nnnnnnnnnnnnnnnnnnnnnnnnnnnnnnnnnnnnnnnnnnnnnnnnnnnnnnnnnnnnnnnnnnnnnnnnnnnnnnnnnnnnnnnnnnnnnnnnnnnnnnnnnnnnnnnnnnnnnnnnnnnnnnnnnnnnnnnnnnnnnnnnnnnnnnnnnnnnnnnnnnnnnnnnnnnnnnnnnnnctgacctcatgnnnnnnnnnnnnnnnnnnnnnnnnnnnnnnnnnnnnnnnnnnnnnnnnnnnnnnnnnggcctgaaaggttatttttctaattacctgtttctttgtgacaaattgctccaaaacttcgtggtggaaaaccactaccatttaatcatgcctatgaactctgtggatcagcaaaccacagggcacagaaggagagcttttctttcttccacgatgtctgagcctcagctgggaagaccagaaaggctggagtgactcaagtggcaaggctggaataatctggagacttctcctcttgcatgtctagtgcctcgagtgagataactcaaagtctatactaagatatgatcgtcaactggaatgtctacagataccataaaattcacccagtatactattcagtggcttttagtatattcacagagatgtacaaccatcaccactgtcgaattccagaacattttcatcacctccaaaagaagcctcatatccattaggggttgccctccatttcccctttccactgcccctggaaacccactagctactttctgtctgtggatttgctactctgg

SEQ ID NO: 6698 - DNA, 1851 bp, Macaca Fascicularis
ctgagcctgtttcatttgccttccctggtctgcttgagcagaggagagaggaagaaaagctgtcggcagatgtttttagcaagacccttaagcataagggaggaagctaattttagtcctgtttttcatattgtggtggtttggttgcgtccttcctcttagggtagagcattttaacttttgtttttgcttttgcatttcctgtgtgtatgtcctgaagcaaaatggactgctaaaaatgtcacttggtgtttgttattttgtgcctagaataacattcaagacccgtgagcactgtgagtcacgaaaatagttttaggagaaaggaatgttgtctgtgttactcttttctatatttccttctagaagttttccaggtgattttctgtgcttatgttaattggacatccatactctctttctttcatctacagcaatacagtaacattgtatttgttagcacattgcatctctacttgcatgcagagctctttaattttaaaagtacaataagttttgggagaagatcatggctgaagaagcaagttgctggaaaatacagttgtgctgctcactcagtgaacaaccagccagcaagctgcgtgcacgttcattgtgatgagagcttaaacacaaagcagacatgagtgtgttcccctggtgtccccagttcctagcacatagtagaaactttgtaaatgtttgttgggtgaatgaagtcagtagcactacaggtaggagaccgtaaggaaggatggtttctaaaacaataaaaagggacatcagctaggccagtggtcttccaacctggtgtgtatcagaatcacctggagagcttgttaaaacagattgctgggcctacccccagagtgtctgcttctgtaggtgtggcctggggcccaagaatttgcatttctaagaagtcccttggtgagaaccgctgactgggctaatagctgtgggtgagaaaagaggcttggagaaattgtgttttgcctaattaacaaaacccattagtggctgaaccaacacagaaggctaggtttgtcctctcacttcctaacttgaggacagagaaatgtattctgatgtccctaactggcagtctgctgtggtagtgaccacatgccccagtttctttcttgggatttcatcccagcctgacaaccttgggacagaacaagaggatgggaggtgtccttccaggcacgtgttagctgcatcagccactcttcgtggcatctgctgcccatcaaacgaagtggttgggcttggagccaagttaagttttctcatcatttggcggttgtgtccccagattttcttgcccatcttggagatcttagcacagctggggtgcttgggcaccccttgcccaagctgccttgaaggggagtcagtcccccacacaggtgattcccgtataccatggcgggcactgagattggggtgagggaagcacatttgaggaacccttcacttcctcacagcccttgcccctttcctcagggtgtgctgggaagaacccccagcggctgcccatgcccacctcagaagctgttcagttggggcagaaggaggttattgtggctgcctcctgtccacggttttcttttacatcccttccattgcactgttggtgcccacctcccccttctgagagacatggccactggctccacttaaggaaggcactttattgtcgtgattaagactgtgaggccagcctataatcccagcattttgggaggccaaggtggaaggatcccttgagctcaggagttcgaggctatagtgagctgcagccatgccattgcactccagcctgggccacagagtgagattaaaaaa

SEQ ID NO: 6699 - DNA, 729 bp, Macaca Fascicularis
  misc_feature (1)...(729): n = A,T,C or G
agcagcacgacagcannnnnnnnncgcnnncagtgtccccgaccagnnntgccgtgttcctggtgcaggatgacacatccaacatctacatctgggacctcctnnnnnnnnnnnnnnnnnnnnntgccaaacagcatctcnnnnnnnnnnnnnnnnnnnnnnnnnnnncggtgggtgagccnnnnnnnnnnnnnnnnnnnnnnnnnnnnnnnnnnntggccagggcctccggctccatcnnnnnnnnnnnnnnnaagaggcagtgggcggccccggagggggatgagcgcaacaggctgcgnnnnnnnnnnnnnnnnnnnnnnnnnnnnnnnnnnnnnncacacaagtagcgggtgttgctgnnnnnnnnnnnnnnnnnnnnnnnnnnnnnnnnnnnnnnnnnnnnnnnnataattttacatttctgtgcaagtatatttatgtatatannnnnnnnnnnnnnnntatataatttattttacaagaatattcctttgatattccaagtaaataaatgactacttttgaatggaaacaaagaaaattctagcatttacgaannnnnnnnnnnnnnnnnnngccacatccagggtcctctattccgagagtatttcgagctatttttagaacagtttaaaatattggtacattactactagattttaaagagtctaccatgaaaatgtatcttaatgaactattttcttatgcataaaatatatgcacaca

SEQ ID NO: 6700 - DNA, 689 bp, Macaca Fascicularis
  misc_feature (1)...(689): n = A,T,C or G
gactaaagaattaaggtaacatcaatacctagnnnnnnnnnnnnaccccatccttgatgggcaactccctgccttgtcctgcatgaacagagatcatgaaagagtaagtatttgttcacttacccttttttacttttaatcaatgtcaccataccaagagttgtgttaagaagtnnaaaccaccccctccccccacaccaccgggtccactttccccttccattaatccattcacccagataatcattaaaattaatgtgtgccaggtcttaggatgtgtcttgcggtgggtagggtacccagtgactcttggggatatttattctccctgagtgtatgtcttcatctgtgaaatggggataaaatacttgttgctgtcacaattattaccatctctccagctagcaaaattactaccagagctgttactagacacagaggctattgacccagcacataccacgtgccacacaccttgataagcaattctaatacagcttattatgtactattcaatcttcacgcaatgtcacgggaccagtattgtttactccattttctataaggacactgaagcttggaggagttaaatgttttgaatattattccagagagcaagtggcagaggctggatccaaacccaccttcctgcacctgaagcttatgcttccagccaccccactcctgag

SEQ ID NO: 6701 - DNA, 707 bp, Macaca Fascicularis
  misc_feature (1)...(707): n = A,T,C or G
ctttgcccagctgtgtgggtgnnngtggcgtgcccacctccagtccagcccagnnnnnnnnnnnnnnnnnnnnnnnnnnnnnnnnnnnnnnnnnnnaattcataataatattaataataatatnnnnnnnnnnnnnnnnnnngggcgcggcccgggagtccgtgtggggctggcaggtgcctacgaggggcaggggcgtgtgttggccccggcctgggcgcggtgctgcaggtccaggggctgtgggggcggggtgccgggtcgggccgagtgcagcaccaggttcttgacacagcctgtgatgcccgaggagaacctgccccnnnnnnnnnnnnnnnnnnnnnnnnnnnnnnnnnnnnnnnnnnnnnnnnacagggcttgtgggctccagcagcccaggaggcgaggaaggccgggtgnnnnnnnnnnnnnnnnnnnnnnnnnnnnnnnnnttgccctgagaaggagccccagacttaccgatgtnnnnnnngccnnnnnnnnnnnnnnnnnnnnnnnnnnnnnnnnnnnnnnnnnnnnnnnnnnnnnnnnnnnnnncctgnnnnnnnnnnnnnnnnnnnnnnnnnnnnnnnnnnnnnnnnnnnnnnnnnnnnnnnnnnnnnnnnnnnnnnnccagcgccacgacagagtcccctccctctggcaccgagattccagactcagaagtctgtccctgttccccaagc

SEQ ID NO: 6702 - DNA, 681 bp, Macaca Fascicularis
  misc_feature (1)...(681): n = A,T,C or G
tggctggnnnnnnnnnnnnnnnnnnnnnnnnnnnnnnnnnnnnnnnnnnnnnnnnnnnnnnnnnnnnnnnnnnnnnnnnnnnnnnnnnnnnnnnnnnnnnnnnnnnnnnnnnnnnnnnnnnnnnnnnnnnnnnnnnnnnnnnnnnnnnnnnnnnnnnnnnnnnnnnnnnnnctgaccttgtgatctgcccatctcggcctcccaaagtgctgggaccacaggcctgagccaccgcgcccgacaaagtctctgtttctttaacttcaaaaggaagttagcgttttccttgcagaggtgctgaggattaaatgagataatacgtggaaacattaggcatgtagtacacttagcagatgctggttggctccccccgttttccactagtctgtggtctacagtttaaattttagacaggggaaagcgtgtgagatttgacgctggggaaggatgcactgggttccaggcaagggaggcaggctctgaggcctggagcaagggaccaggggcctgggcaggccacagagcaccacagtgcccttgctaccctattaatgggccaggaatctggaagccagctagtaaacgccctcatgcccaggatcatcctgcaggtggagctgaagagccaagaggctcagcgtctgcagcagcagggagaccagtacctgtgtcacctgcagc

SEQ ID NO: 6703 - DNA, 1821 bp, Macaca Fascicularis
cactgtatgagatcattcctttggaggctgtagtggggacctgctgtgtgttggacctttatacgtattgtaaagggagacccaaaggagtgaaggagcaagatgtgtacatctgtgattatcggcttgacaagtcagcacacctgttttacaagatccaccggaaccgctatcctgtctgcaccaaaccctatgcttttgatcacttccccaagaagctcactcccaaaaaagatttctcgcctcattacgtcccagacaactacaagaggaatggaggacgatcatcctggaagtctgagcgctcaaagccacccctaaaagacttgggccaggaggatgatgctctacccttgattgaagaggttctagcccgtcaagagcaaacagccagtgagatacccagcctggaggagccagaacgggagggggccactgctaacgtcagtgagggtgaaaaaaaaacagaggaaagtagtcaagaaccccaatcaacctgtacccctgaggaacgacggcataaccaacgggaacgactcaaccagatcttgctcaatctccttgaaaaaatccctggaaaaaatgccattgatgtgacctacttgctggaggaaggatcaggcaggaaactgcgaaggcgtactttgtttatcccagaaaacagctttcgaaagtgaccctcaaagaatgagaacctcaagcatctgggatccagtggactgattagctaatcagtcctgcctcctgctctctgggtatagaccggggtggaaagggtctgtccaggcaaggggaatggggccatgttgttgacattaggtacttaataagccttggagctagtggagagggagaggaaggggttctgtccaagacagttcaggttaattaattttcctctccattgcttcaccttaagggttaataatgtagagaggagggagaaccacactgatgaccagaacctactggtactttatagcatttgcccctccccacagcttaggtttttctgtcatcctcagatcccacagacattgctaagaagctacttcctatacccaggtataactcaaaatccaaagggatagggccaggatccctattcctaccccgtctattctctattggctccaagagctaccccagagaccttaaacagaaacagtagctggggcttcttcccagatacctgactagggaagtttctctctcctttcttgcccaaccaggtcaaagtaaaattcaatgtttcctttatagtgttaaacactaaaattttaaaaaagatgaaaaagaaaaaaaactttgtaaaatgcgagaacagaagcaaaagacactacgctctgtcattttatctttcttttgttgaaagactaaaaaaaaaactgaaatgttttttagacaatcaaatgttaggtaagtgcaaaaacttgttttttcttactggtgtagaaattaatgcctttttttatttttcagttattttataataacgaaataaaaagaaccccccagctgccaggcgggttttggtgtttgaaatgcggggcaaagcactacatcactgcaaatagatacagagttagtctgcatgtctgtaggctgtgtgattgcggaaaatataaatgctgctaatatatttcctttttacaaaagcatatctaaatagatgattgttttgatgttaatctttgtaaattatgtattaccaattttaacattggatgtaattgcatacaaagcttgcatctcaatccttgaaagtctagtattaaatggaaaaaacttttcctaaaaaaaaaaaaaaaaaaaaaaaaa

SEQ ID NO: 6704 - DNA, 1839 bp, Macaca Fascicularis
aaagacacgaaagctagatagagctagttgatcctgactaaggcactcaccactgtcgatcttagagcgtatcttccactggccgggcgtgatggcttcgcctgcaatcccagcactttgggaggccaaggcgggcagatcacttgaggataaatcctgatgattctcttagggacctctagtagatgagctcgacactcaagaaccatagcagcttcaaggaatggatactaatgatgaccctgatgaagaccatcttacaagttatgatattcagctaagtattcaagaatccattgaagccagcaagactgcgctttatcctgaaagatttgtacccctaagtggtcaaaacagaaaacttgtggaggccataaaacaaggtcacattcttgagctccaggagtatgtaaaatataaatatgcaatggatgaagctgatgaaaaaggatggtttccattacatgaagctgttgttcaacccattcaacaaatacttgagattgttctggatgcatcctataagacactctgggagttcaagacctgtgatggagaaacacccttgactttggcagtcaaagctggtctggtgaaaaatgtcagaactttgttagaaaagggagtgtggcccaacacaaaaaatgataaaggagagaccccccttctgattgctgtcaaaaagggctcctatgacatggtatcaactctgatcaaacacaatactagtctggaccagccctgtgtcaagcgatggtcagcaatgcatgaagcagccaagcaaggccgaatatggtcactgtgatgtgttagaacatctaatccacaaaggtggtgatgtgcttgctttggcggatgatggggcgtcggtgatgtttgaggcagcaggaggtggcaatcccgactgcatttccctcctgctggaatatggaggaagcggaaatgtacctaatcgagcagggcatcttcctatacaccgagctgcctatgaggggcattatcttgcactgaaatatcttatcccagcaacatctaaaaatgcaattcggaaaagtgggctaacaccaattcactcagcagcagatggacaaagtgcacagtgtctagagctgctcattgaaaatggttttgatgtcaacactctacttgctgaccacatttcccagagctatgacgatgagaggaagactgcgctgtattttgccgtttctaataatgatgttcgttgcacagaagtccttctggctgcaggtgcagacccaaacttagatcccctcaactgtctacttgtggcagtgagggccaataattatgaaattgtccggctgcttctctcccatggcgccaatgtcaattgttattttatgcatgtgaatgacactcgtttccccagtgtcattcagtatgccttaaacgacgaggtaatgctgaggctattgctgaataatggctatcaagtggagatgtgctttgactgcatgcatggtgacatctttggaaattcatttgtgtgctaaactgaagtctgcactagaagtacagagagaatggccagaaatccgccaaatactagagaatccttgttcattgaagcatttgtgtcggttaaaaattcgaagacttatgggtctccagaaactctgccagccagcctcaatggagaagcttcctctaccaccagctattcaaagatacatattatttaaagagtatgatctctatggacaagagctaaaattgccataacttaatattttaaaatgtgattttaaaaaatattttgaaatgtgattccctcaaaaaaaaaaaaaaaaaaaaaaaaaaaaaaaaaaaaaaaaa

SEQ ID NO: 6705 - DNA, 683 bp, Macaca Fascicularis
attttatcctttttagtagccgctccagcattatagggagacagagtatggggaaagtcttgtgtaagtgcaaatggcattccatttgttgagaaaacagcccagcgaagcacgctgaagcggaaaaagctttcctttggggcagcacttggaaggagaagggaacatgtcctaggagtgggatcaggtagcatgttttgcacggggtggggcaggttggctcacctgcagtctgaagtgttgggaaaggagggagtgagactctccaggaaagctttggagatctgttctcagtgtcatcagttctcttcaaacatttctaatttttcaccttttcttcccttccatgttacttgccttgctctacagattttgatccaaacaatatcttcaaggctttcttcggcggtcctggaggcttcagctttgaaggtaggtgggcctgctgttgctgggagttcccagatcacaggccaacacactcactgccacttcggcagctcttcgggagtcagcggggccatgagagggggcggctgagttctcatctagcatggcatccatccactcggctgttgctaaggatgaagacaggaaggcaccccttgccttgggacctttagccactgcatctctgcagggtcagggggcatctctgactgcctactgccgaggcttctcta

SEQ ID NO: 6706 - DNA, 728 bp, Macaca Fascicularis
  misc_feature (1)...(728): n = A,T,C or G
gaaaggagcttttaaactgcagttgtaactnnnnntaagctttttctttatgggagaggttctgtgcaaaactaccacatcctgtccccgaaatgtggaatgcatccaaataggagtcgtctgcctcttgactaaaaagaacataggaattttgtttttggtttctttatcacgctacagagagtgagtacactggaattcagacaccaactctgagctgctaggaacctcatttgtccatgcacaaacgctgtattccgaggcctataaatggcagcctgaggaggttttgcatgcaggctgtgttttcgagcaggactaacagttggaaaataagcaaaaaactnnnnnnnnnnnnnnnnnnnnnnnnnnnnnnnctatacctcacactgaactcaggatgggaagaaaaaaggaaacaagctttggctttttccatctcaaaagtattgtggcacctcaacatttcagtgttttgctttttaaaaaatgccctattgtaagttgttggtttatactgtataagtaacactagtagctgttttgaataacataggtgctcttcctcatctcatctcctacaccgtggtgagcatacagagtgtcctgatttatgttaagtgactgagatgataattacttttggaaaaggatcatggtttttgctctactttataatcaagacaagtgtttattaaaatactgttttganannnnggctgtaatgt

SEQ ID NO: 6707 - DNA, 1213 bp, Macaca Fascicularis
ataatatttttcattactaaatatagtagcatttgtatactgttgactattggtcttatttgtacaattaaatggctcagtctgcagagtttctcaaattgttgcatttctcaaagagtttcatgtaatttagcttattttccccaaacgccattcattttccaggtaggcaaaattaagtatatatacatccacaccctaaaatttgtcattttaatgattgtttatatgttattagacatggtctatcattttacttacaaaatgcattattttaaaaatgtgatatttgttaatgtattacactttcaactatccaaagcaatattaatttttctttttgtcctcaaaattaaaataataggcctcaatattatttgttagttaatatttttcctatcagaactccataactaatgttctacttgatctttttgtcactgaactttaaaaagaacaagtctcattctgtaataattttatttttattgtaaaaaatatttcagctcatgatgttaaacaagatacatggatatttagtttacaattccaaatgataatatcagttgtttatatggattagaaattagttttatgtcttacttttgatttttacttgttagcatttagtagcaacatttatcaatatgttggcagttcactgtcattactatttgttaataacatcttttactttttctattttctttacatttaaaacattctaaattcccttctcatattatagagctgacatttgtaatactaatcccattctttactgattttagtggagattattttactatgtcaacagtaaaatagagttactatgttaacgctacttttctccaattttattcaagtggctatttatttttactctgatctcatttcataacctttttttcacagtatctatgcctttttaagaaaatatttgtgtcaagctagcttctctcatctctagcagatctcgtaaagaattatacttttcagtgtcaatattagtttctattttggtttatgtcgcaaatttttatgggccgcatttcagctttgcatattaagtgaattcatttgtatgagcagaaatctgaacaatctaaataattgtttacaaaatagcacgttatttttattttaattttcttgccatttctgtggccactattaaaatcttacatgatctagaaaaaaaaaaaaaaaaaaa

SEQ ID NO: 6708 - DNA, 525 bp, Macaca Fascicularis
ttgctcttcaccagagaatggaaattgttcatcctggtgaacagtggccaagttctgctccgtaagtatttagtaggagtggggaggtcaaagggaagaaagtcagggggagagaagcaaaggagaacacttccaactccctcccccatctcccaacgctccccaccttccttctcactgctctactgaagggtgtataaatcctgctcttggttggggttctccttattgacagtgttatatacatataaatatatatataaatatattccttttttcagccctgtagacatgaactgatcttcccttgaagatcagaacaaacacatggccattttttgtttgggtttttttcttattcaaggattttcatttttgtttattgggtggatttttttccctgggtactagctctgtgaaggaaataaaaagcgcagtgtgtgtgtttaaaaaaaaaaaaaattaaaattaaaaaatgctttttttcttttctttttcaatgtatctaaattccgtttctctctt

SEQ ID NO: 6709 - DNA, 651 bp, Macaca Fascicularis
  misc_feature (1)...(651): n = A,T,C or G
agaaaagctgcnnnnnaaatgcgtataatctaatctnnnctagtgacagaatgacaatttacatccaatgtttgtggtaggagaagaattgctttatttagcaggaaacagggtatggatggcaatggttgatgtctccgtgtttaacatgtagattgaacaggaagtgtgaactattagaagtagaaggcagatggaaggacatgacaattgaatgaaatgtcagaaagaaaatgaatgcactagattttcttttcacagagtaacagtttcctttccatgacaagagacacagggacatgcttatagatgacaaagcaattttcttcaatttacggtatttctttagtgcagggctgtccaatagaatatctgtaataatggaacatttttatttctcagctgtctaataaaatacccactagctacatatggctattaagaacttgaaatgtagcaagtgctattaaggagctaatgcttttaaatttttaattaatttaaatgtaaatagcctcatattggacactgaagcaggcaaaataggcattgaagccatttctccacctttcctgtcaaatttaataacattgagttttggttacgttttatttttttaagtattatcaagaatttgaagctatattgctg

SEQ ID NO: 6710 - DNA, 2653 bp, Macaca Fascicularis
  misc_feature (1)...(2653): n = A,T,C or G
agcaacacctcacttgcctggaagagggaacctcaatcaatcaaaatgagggcctacaggaatgcctgacatgatgcaaacacttaaaagttatctgttgaatgagacgtctacaaatgctaggccctggggatacaataatctggaaaaccagacttgcaggatgcagacattgatcatataaacagatacgcacagaattaagtgtaaaattgccacctggtaagacctgtgcgaggaaggtactggagtctctacccggtgacctggcctagtttgagaagccaagaacgtttcccctagaaagtgacatttcagctgacattggaaagatgaatgggaattaactaagtaagggagatagtattgggagaaccaaaaagtaatgtggagcttggggggtgggggaagggaatgagatggagctaaccagataaatctagggaccatcaggagttggccttttgttctaagagcagaggctttcaggcagacgagttctgtgatcatatatatgtagcaaactttattttctaatatctctgcacaggtcaggttagaagtgtcaactcactgggaatggtttataaatagagaaacaaaaggagttacaagatgagtcaaaacagtgacagctcagtctattaagtggagggacaaactgcctctctatatctcagtattgtctataatgattctgttattagtattatcagtaataaattgtgcttagtgtactttaagaaagctagaatctgagcaaagtactgaggatgcaataatagaagcccccttcgcctcttcgggctctcactgtagtgagaaaatagacgtgagacagtgtggaaagaaagtaaacactagcagtgtttgggtcgtgggatttgggtaatttccattttcctgtaatatattttggtactttgcatttttttgtaatgttttgcttataaaatctatgaatattacattttcaaagagaaatttacataaatatagtttccaatgagaatgtattcatgcccttggattttagtgacagtcaatataaaatgcatccttatgttgatgatcttcattttttttttgctaaaacttcgaccaaagagatcatcttgttcagtgactattatttaaaagcaaacaaaccaaaaacacaaataaaaccagactgttacttttttctctctttcctttttttttttttttttgagacagagtcttgctttgttgcccaggctggagtgcagtgatgtgatcatagctcactgtgcagcctgaaactcctggcctcaagcgattgtttcgcctcagcctcccaaagcacagatattacaggtatgagccactgtgcctggcccacactgttacattttatattaattgagtgctgtgttctatctttagcttccaggaagctcacccccaacttttgtgcttaaatgcagccatttccctttgcctgtgtttttgataagaatattctccatggctgggcatgnnnnnnnnnnnnnnnnnnnnnnnnnnnnnnnnnnnnnnnnnnnnnnnnnnnnnnnnnnnnnnnnnnnnnnnnnnnagcctaggcaacatggcatgacccagtttctttaaaaaaaaaaaaaagattattctatatatgttccaaagtgctgggattacagtcgtgagccaccacaccaggcctaaaaactgaaaggttgaatagagaaaaagcatgctttaaaagcattttttaagtaaagaaaatggaattttgcctagcacatgtggagtcctaatatgcagctctgtttccttaaattccatgaaagccatgcaatacctttgctagtttctcctcacagatcaggataaccgagggggctcttgcgtgaatcatcttctatttcttgcagcctaactcagaggcttttgttgttcaatatttgtgtgatggttttgatactatttttttgtaacccatgacagttatttttatttctaattttttaagtaagcaaatgggcagagatattaactggtaaaagttcaactgatcacccagggtggattgaatctctcgactgatgctctgttgctggagccctgagaaacccacataccccgcctgggcacctgcctggggttgtctgctgcgtgacctgggatggttcaaatcaccaaggacttcctctggtataaatcttcagcttccttgcatgccctcagttgctatttaagctttctgttttcttccctaaaggaatcagtttagacttgaaattcagtttttcctgaaactgatcagaagttagtgacaccttgattggatccatttttctgtcaggtgatgaatctttgaaaaatttcctttctgtattctttgttgatttaaatctgtggtcattattcattatgtaccctatatgcctatgtacttaaaaaatcttgctaatgcattattttttagacaactttatggaggtaaaattcacacactgtataatttacccattaagttatgcaattcattggcttttagtgtatttacaaagttgtgtgttcattgccacaatcatttatagaatattattattacaaaaagaaactccattcccccccaaacctaaaaaaaaaaaaaaaaaaaaaaaaaaaaaaaaaaaaaaaaaaaaaa

SEQ ID NO: 6711 - DNA, 748 bp, Macaca Fascicularis
  misc_feature (1)...(748): n = A,T,C or G
cccggcccggggggaggaccaacccctagtcacgcccctcagcgctcgccactctcttctctgtcgttgggtccgcatcgtattcccggaatcagacggtgccccatagatggccagctttcccccgagggtcaacgagaaagagatcgtgagatcacgtactataggtgaacttttagctcctgcagctccttttgacaagaaatgtggtcgtgaaaattggactgttgcttttgctccagatggttcatactttgcttggtcacaaggacatcgcacagtaaaacttgttccgtggtcccagtgccttcagaactttctcttgcatggcaccaagaatgttaccaattcaagcagtttaagattgccaagacaaaatagtgatggtggtcagaaaaataagcctcgtgaacatattatagactgtggagatatagtctggagtcttgcttttgggtcgtcagttccagaaaaacagagtcgctgtgtaaatatagaatggcatcgcttcagatttggacaagatcagctacttcttgctacagggttgaacaatgggcgtatcaaaatatgggatgtatatacaggaaaactcctccttaacttggtagatcatactgaagtggtcagagatttaacttttgctccagatggaagcttgatcctggtgtcagcttcaagagacaaaactctcagagtgtgngacctgaaagatgatggaaacatgatgaaagtattgagggggcat

SEQ ID NO: 6712 - DNA, 758 bp, Macaca Fascicularis
  misc_feature (1)...(758): n = A,T,C or G
catgttggccaggctnnncttgaannnctgaccnnnnnnnatctgcctgnnncagcctcccaaagtgctgggattacagatgtaagccaccatgcttggcctagaattctacattgaacattattttcctgctgaattttgtctactgttttggggtgtcatatatgaaaagaggtcactgttgtgatggtgctggtgggactgccgcctctggtgcgttggcttgagttgggcctgaaatgtgggcctccagnnnnnnnnnnnnnnnnnnnnnnnnnnnnnnnactcatcagcttggggaaggcagcatctctgtatcttgaagaaaaaagaacnnnnnnnnnnnnnnnntttggaagatgagctgtgtgctttggtagtattctgcctggtaacagtnnnnnnnnnnnnnnnnnnnnnnnnnnnnnnnnnnnnnnnngacaaggtgatgtatggtagagaccttggatctgcctgtatcagtttgacctctagagggggcaggagacttcgtacctaatgtcagccactcaagtactccatgcgtacaagaccaaccccccagaactcctctgaacatgagggcttggtggaggtcnnnnnnnnnnnnnnnnnnnnnnnnnnnnnnnnnnnngtggctgggagaatacagcactgtctgtatgactgcactggaagacaacagtgggaattctgtgctgnnnnnnnnnnnnnnnntgtcctgggcaccactgacctctgctgacttttatctgtat

SEQ ID NO: 6713 - DNA, 779 bp, Macaca Fascicularis
  misc_feature (1)...(779): n = A,T,C or G
taactcagtataactcatnncnttatntttnctaggacctatttgtagccaggcannnnatttagtactgaataagctatagcccttgcccttttgaaattcattatctagcaagatagtcaaacttataaataattatttatggtacattgtgataagtattannnnnnnnnnnnnnnagtgtggaggaagaagtaattcattctgtctccagagtttagagaatgtgatgcctaggagatagcatgccatcccagctgtaaaagaagaatagatttttctgggtaaaaaaggtaaacaaagtctataaaatatttttgtgtatcatttgattaaatttcctctttggtttgactaatttgtcatcctgaaaatcaaataataatgaatccaaagtctcaagtctacagagctatacttctgagcctatatttttaaaatgtccattttgctttcccaggagtcacttataacatgttcactagactnnnnnnnnnnnnnnnncaagttgacaggagaggaaaccagcttccatattacctcannnnnnnnnnnnnnnnnnnnnnnnnnnnnnncctgtttgaatatatatgccacaagccccatggaaaccccannnnnnnnnnnnnnnnnttgtgtacataaattacatttattacatttaattgtgtacatgtaggggaatgttataggtttggaataagtggcctgacatttctaattatactgactttcactgggctttttaggctgttacactttttctccacatgcttgca

SEQ ID NO: 6714 - DNA, 730 bp, Macaca Fascicularis
  misc_feature (1)...(730): n = A,T,C or G
cccagcatggtacgtttgagtacgaatnnnnncagcgatggaagtnnnnngatgaaatggaaaaacagcaaagggaacaagttgaaaaaaacatgaaggatgcaaaagacaaattggaaagtgaaatggaagatgcctatcatgaacatcaggcaaatcttttgcgccaagatctgatgagacgacaggaagaattaagacgcatggaagaacttcacaatcaagaaatgcagaaacgtaaagaaatgcagttgaggcaagaggaggaacgacgtagaagagaggaagagatgatgattcgtcaacgtgagatggaagaacaaatgaggcgccaaagagaggaaagttacagccgaatgggctacatggatccaagggaaagagacatgagaatgggtggcggaggagcaatgaacatgggagatccctatggttcaggaggccagaaatttccacctctaggtggtggtggtggcataggttatgaagctaatcctggcgttccaccannnnnnnnnnnnnnnnnnntgatgggaagtgacatggtaagaatgattgatgttggctgatactggagtgctcgttcacatgaagtggatagatacttctcaagacatcacacagcgtgagccaatcaaggagggaagccacaagcagttagactgacaacgtttctagcaggatcaggtgagctgtgtccagaaaaccaacaagaaggagggaaggagga

SEQ ID NO: 6715 - DNA, 2295 bp, Macaca Fascicularis
cagatatttcttgctttcaactgaatgactcctcctatgacagcttggaaaatgagctaaatgaggatgttgatgcaccatgcagtgacttggtaaagaaacttggccaggggagcagaagcatggactctgtcttaaccctcagtgactatgatcttgaccagcccgaggtggaaggccttttaaccctaagcgactttgacttggcccattctaaagatgaagatgttcaaatgaaacggcctcttgaatccaagccggtgaacattttagtgtacacaaagatcccactgcgggatcatgccagggccccgtctgccatgtgcacacccagctacctgtccacagctgcagcaaatgctgcaaaaagcctgaggcgacaccggcgttgctcagagcccagcatcgactatctggattcaaagctttcctacctcagggagttttatcagaaaaagctacgcaagtccagctgtgatacaattctttctcaaaaagatgaagactatctgaagcagaatcaacccctccaggaagagggaaagacatgttttaaacagagtttagtcacaggcactgatgtcagcaagaaaaatcccactactcaaaacactaagaagaaaatcttgtctggtggtgaaggaaatcatatgaaacttttccctaagtccaagccagtggccatttctgtggcgtcttatagtcctgtgtcctcacaggatcattccaagaaccagccctttgatgtggatacatctggatactccccaccacacacagcagatgccctcgccgtgtccctgggccccccgaagtggcctgggcgaacactgccctttggcggggtcagccccaggcccaatcctgaatcctgcccccatcgaccaagacagcaaaaggcccaggtgtgtcccttacaattctgagccttcttcctcaagtttggaagccctgactttaagaaatgccaaatgcaaggaccattaagaaaatactccccgaatgaggttcctctaacaaatgatgattaaaactctctctccttgagcagtcacattctagaaacaggacattccacgaggcaggaagagttcagttaatttgttcctgaaaaagtgtggttcagtgtctgtgtggcaatgtacgtgggcagaagaggctgctcacgctgtgtcccccctgagcaggattcaggaaagggaaaagaaggtctctttgactcaaccaatgggccgtatgatggccaatgagattatgtacttaaaagtcctttgtaaagtgtaaactaaaaaccttaaatgtaagatgctgttgttattattactgttgttattgctgttatggacatgccaaaaggcccttgttagaagatggttttgccttctcaatctcatagaaaggaactcaagtctgatgcttcgaaaagacaagaagagaggcaagaagagggagaactcccaagctcagagagaaaaaaaagggaaaaagagccccagggtgaccttcaggaaaggccaggaccaggattgatctaacctttccctttaccagagacaaagctatcaccagactgaaccctaaggtcaagcagtcacccactgcctttgctgggagcagaagcccatagtaacaagtgacctgcccctcacactcaagatcccagatagagctggaggagtcgtagggcattactggtaggcaggaaaactgagggtcgaacaaatggaagaatgcagtgatcatagaccaaaaacacacggataattaaccccaggtgtccacccaggccaaagttcttcctgctaccccacagtgggtgtccaggcagagtgaagcctgagttagaccctctaacactttcttaatggcccagagggtgtcctctgcctccccaacagcagtctcctggtgtaccctcagatgatggggaagctgagggcatagtgtgatttggtgggacttgttcatgttttgtagtgtgggctcaacagtgccaaaggaaacactagaggaaagttagtgaaacatgccagctagcaggaccagtaaaggcataatcgggcatttggcaaagcatgtttttctaactcagcgataggttctaataggaaatttttaaaaatgtttttaaaacagtgttatagtgccacttccccggtatggaataaataacatgcattcttttttcaatatactgtcatattcggatgtcattaaaataaatggatgagtcacagaggagctatcagatgctctcatgactgccataactcaaaaaaaaaaaaaaaaaaaaaa

SEQ ID NO: 6716 - DNA, 616 bp, Macaca Fascicularis
ttccccctctccccaccgcagctctaaagcacttgcttcaagtaataagcacttttgtgaaaaggcctattttaagcgaggaccctgggagcagccccaggtcccagcaaaggaaacagagcgagggcgacataggagacagggaaacagacgtgtgaatcagagggtgagatggaaagagccagtttttagtttctgatttttggggagctatttctgattgggcggtggctctggtagggtcatgtactatatccttcagaaaaacgaatggcacaaactgtgggtcccaggaaggaccagcagacccgggtcactgccactgtccactgagactgacgggccacctcccccaccccgtggccccctgagccataggactgctgaaaaccactgaatgtacagcccaggttggggtggggagcagcccctgggggagggggcttctccttttgtttggtgctgtggggggtgggagagatgagactgagggactgccaccccatgtagacgtgtttcttggggtggaggggctgaggagggcctacctccctctccaaccccagccatggcccctcttccttcctcacccctatccgttttgactgtaagtcca

SEQ ID NO: 6717 - DNA, 752 bp, Macaca Fascicularis
gtgcattgcgtgatcttggctcactgcaacctccacctcctgggttcagtgattctcttgcctcagcctcctgagtagctgggattataggcaccagccaccgtgcccagctaatttttgtatttttagtagagatgggttttcaccatattggccaggctgatcttgaactcctgacctcatgatccacccacctcggcctcccagcgtgctgggattacaggcgtgatctggccactgcgccggccagaaacatgttttagagaatagtctatggacctcggagtgtttattattactgggtggtcactgcttctaggacttgtgaatgggcagactgaggaaatttttgtttgttttttgttttaagagacagagtcttgctgtgtcacccaggctgaagtacagtagcaattcacagacagtcatagttcactgcattctcgaaatcctgggctcaagcgacactcccatctcagtcacatgagtagctgggactacaggcacgcgcctccatgaccagctcctggcccgggtcccacagctcgtgaatggtggagctgggattcacacacacagccaatcttgaccatttgcagctttggtgagcaggcccagccgcccccaccctcactcccttcccacccacaggacagtgggggggtggacgcccatcatctgggctgcagagcacaagcacatcgaggtgatccgcatgctactgacgcggggcgccgacgtcaccctcactg

SEQ ID NO: 6718 - DNA, 718 bp, Macaca Fascicularis
  misc_feature (1)...(718): n = A,T,C or G
gagattaagaacaaaccctgtccaatattcaagacnnnnctgggtccggtcccggattcactnnncagctacctttcccatgannnnnnnnnnnnnnnnnnnnnnnnnnnnnnnnnnnnnnnnnnnnnnnnnnnnnnttttctcatacctgtctctctacttgcaccagtctctctaaattttgcccaaatcttgtctactagtttagtctcagaatgtgaaaattctatacaaatcaaatttcaggaatagttatgggtaatagtatttcnnnnnnnnnnnnnnnnttatcatttgctgtgggtaaactnnnnnnnnnnnnnnnnnnnnaatgttatcaaaccgtatgtgtataatttgatggatttctaaaaggtacacatgtccacataactacttcccagatcaagaaatagagttttataaatacccaagaagcctccctcatgcccctttataatctgtaccnnnnnnnnnnnnnnnagctactacagcgatatatcatagatgagcttttgtatttttaaaatgtttatataaatggaatcatatagcatatgttcttttgtgtatggattttgactaatatcatgtttatgatatatattcatattgttacatatagcagttcattgtttatcgtggcttcatagcattcagtcacataaaaatactactatccattttactgtnnnnnnnnnntttggttgtttccaat

SEQ ID NO: 6719 - DNA, 510 bp, Macaca Fascicularis
  misc_feature (1)...(510): n = A,T,C or G
ggttatattgagaaaaattcctgggaatggaccatgcacggaggagggaaggaccccaggggtaaaggggattggttcagataatgagagaggaggggcccaaatgaatgagccacttcaaagtattgaagaggaaggaacacacaaaccctttttttttaatcttcggtagtaacgacagaagagagagccttaagagccaggaagttcagaaactgtcttggcccaccttcttttcttccccaggatttttttaaaaatacaggaagaagccgggcgcggtggttcaagcctgtaatcccaccactttgggaggccgagacgggcggatcccgaggtcagnnnnnnnnnnnnnnnnnnnnnnnnnnnnnnnnnnnnnnnnnnnnnnnnnnnnnnnnnnnnnnnnnnnnnnnnnnnnnnnnnnnnnnnnnnnnnnnnnnnnnnnnnnnnnnnnnnnnnnnnnnnnnnnnnnnnnnnnnnnnnnnnnnnnnnnnnnnnnnnnnnccggcc

SEQ ID NO: 6720 - DNA, 738 bp, Macaca Fascicularis
  misc_feature (1)...(738): n = A,T,C or G
tgggctcaagagatcnnnctgctttggcctcccgaagtgctgggattgcaggcatgagctaccgtgtggggcctgaacataatttcaagaggaggatttataaaaccattttctctaatcatatgatcggtgtcattttcccatttgccagtgtagtctcacttaaaaaaagaaaaggaaaagaaatggataatttcatccgctgcctttacttggggttcatgtggttcttaaacaccttcatcatggaactcccaaagtggggtcccttttgggttcctggtggtgggttttggaagataagggaaagcacattttgagcatgtctgggtaccatggtgcgnnnnnnnnnggaaccagagctgtttcagaggaatctgaagtctgattttagttttcagagacatggcttgttgtaaaacatcagaagacatgatttccaggactcaagcagcaagccaggattctaggttggctgctgtgtcatctttgaagtcaagacnnnnnnnnnnnnnnncttcaagagtcctcgatttgacaataattcagcttagggaactcatgtgaatactactatgtaaaaataaaacctagaccttgagcgaacatctgtatattggttgaaaatgatagtggtaaccatggatcccccttacttcatttgatgtttggaaaattccagtaattatcatttttgcaatgaatacggataccacatagtactttggtgttacctgc

SEQ ID NO: 6721 - DNA, 310 bp, Macaca Fascicularis
  misc_feature (1)...(310): n = A,T,C or G
accatgtccactnnnnnnnnnnnnnnnnnnnnngggaagtagaaaccactgacatacacactcatattcacgcacacacactcaggcacacacacacacacatacccatgttagtagcannnnnnnnnnnnnnnnnnnnnnnnnnnnnnnnnnnnnnnnnnnnnnnnnnnnnnnnnnnnnnnnnnnnnnnnnnnnnnnnnnnnnnnnnnnnnnnnnnnnnnnnnnnnnnnnnntcaaccaccaacttctccctaactctactaacttccacactnnnagcnnnactaactgtnnnagaaattgcagtagc

SEQ ID NO: 6722 - DNA, 1767 bp, Macaca Fascicularis
  misc_feature (1)...(1767): n = A,T,C or G
ttgaaattagccccattggtgatcaggccctgcctatctcttatctctgaaacacttctgcaatccacctatctctccatccctgctattttctccagcctgctatttcaccagtgccccgctagataaccctagaagcttcctaatggcaccccatgctcctgcccaggtatgttctccacagcaatccttccaaaatacaaatctgatcatgtcacaccctttctataaatccttcagtggctgttgcctataggagtaacttgcccttcaccatgtggacactggaccaagtgtggaggtttgaagtggaagagcatattgggtattaagaaagaaaaacagaaaaaaaaagtttggctaaagagagaactgtgataagttcaaagagaatggactagataatagaagccctccaggcaaggctatcaacctgtacaaaatcaggcagataatggagcagagtgattgtgtaggctagttgtgcatgtactgtaagttggttcatcaacaccatccaactcactttcccctattcttcactttatcaaagctggaaacaaaagtcccaacttctcaacctctttgcagctaggagtggccaagtagcatagatctggcgaatgaactgcaggtgggaatttctaagaaggtttccttcttaagtagaaaggtgaggcctctctgaaagccttttgacttttgttcctccctttttgcctgaaatgtggatatgatgccttggacaaagcagccactttgtgagttcatatgaggtcagaggcacacattaatgacagagcccagcaagagtctgagcttgtgtccttgaagacagcctcttttgatggtcatttgactcttctccacccccagcctcaccactagctctttctctccccttgtgatctacaatccaagcactggcaaaatatctcatgcatataagcccctgtgtcagtgtttctcaatcttttagaaattactgattatgcctgttaatgtgttactactgcaagcttaaactttgtaagaggatcagcagcattgtgggctggactgttcccatagcaaaagagtcaggaagtcttagttctggctttcccattgactggctctacgacattgggcaggtttcagcagtttccttatctgtaaaatgggagaattggatgtgatttgatttttccatcctttttgttcaatgaatatctgagaccaactatgaaatcttttcaagagacaagaaaaaaccataagcaattgatagtgcaaacttcaacaaaagtttatggaagagaaatcaaaaagcagccctgagtagtcaggacacaaataatgccatagtaatgtgtgcaggggtcatggagagaatgacggtggtagtgaataatgtcagcaccaaaggctgtcctctccaggtactaaaggaagggtgaggtaggttaaagtgcaatgtctgggctgggcacggtggctcacacctggaatcccagcactcttgaaggccgaggtgtgtggatcacctgaggtcaggagtttgacaccagtctgaccnnnnnnnnnnnnnnnnnnnnnnnnnnnnnnnnnnnnnnnnnnnnnnnnnnnnnnnnnnnnnnnnnnnnnnnnnnnnnnnnnnnnnnnnnnnnnnnnnnnnnnnnnnnnnnnnnnnnnnnnnnnnnnnnnnnnnnnnnnnnnnnnnnnnnnnnnnnnnnnnnnnnnnnnnnnnnnnnnnnnnntatctcaaaaaaaaaaaaaaaaaaaaaa

SEQ ID NO: 6723 - DNA, 720 bp, Macaca Fascicularis
  misc_feature (1)...(720): n = A,T,C or G
gacaagtgtgtagaactccaggccncnctgcaggtcagctgcttggcacttctgggtcaacaggcgctgggannnnnnnnnnnnnnnngtggctggccctnnnnnnnnnnnnnnnnnnnggtcattnnnnnnnnnnnnnngtgtcaccttggtgagctggggaaggcgggaaggcacaaagccagggtttctacatgcacactctcagcctgacctgcagccagagtgccggtggaactcccagacagcggctggtggactgagaacctcatcttccccctgttcagcagcacaaacggaagaagccaccacatcagcccaggagccctnnnnnnnnnnnnnnnnnnnnnnnnnnnnnnnnnnnntccgcacccaaatgcaannnnnnnnnnnnnnnnnnnnnnnnnnnnnnnnnnnnnnnnnnnnnnnnnnnnnnnnnnnnnnnnnnnnnnnnnnagagttcactgaagaacacactgttttaaagaaagaaaattagtttcctatttaagtcttaaaaaaagcaaaccatgtcctgagatgtctgtgttaatagtgcagacagaacctagggtttgnnnnnnnnnnnnnnnnnnnnnnnnnnnnnnntaacttgaacattctcatcgatacttcctgtacatattttgtgctttttggtttaacttagtatttatttgccttgttcatatgttccattttctgaaatttcaattaaac

SEQ ID NO: 6724 - DNA, 750 bp, Macaca Fascicularis
  misc_feature (1)...(750): n = A,T,C or G
gccatgcccaannncnttgggagaagtatgaatgcgtgtgtctaaattaaaagaaaaaaatatttaaacattttttaacaaaaatttatttttgtatttaagctaaattgccttttaaattccttcaagcttggttcattgaggtggttaagtataaatgctattgactaggaattagctgtatagttaagttatgcctgtgcaaagaggaggctcaaatgctgtcccgggcagctttcctgggggactagagctccttctggccacgttatataaaatgtaattcttattttataaataatgtgatgtagatgtaaccggtgccccctccccgttgtgactgagggtgagtgttcggtggcggggctgctccttcccacccctcagaacagctctgatccttgttcatacccggcggtgtgtgcagctgaggagggagtgaacctcaagcctaaatacctgttaggattggagggtcggggtgggcccgggcctgggcctagaaatcaagcttctacctgtaccttacgtaaggtagaccctcctagtgtcagtacctgagctagtttacctcagttccgcaggcaggacagccggtccgggaacccttgagtgagtgtgagtgtggatgtgtacagtacgcgcactggacagaagcgggaggctgggactttccattacaagtagagacttcattcctgttgagtctagttggaatttttagtatgaatgtgagatttttctcctgct

SEQ ID NO: 6725 - DNA, 814 bp, Macaca Fascicularis
  misc_feature (1)...(814): n = A,T,C or G
agagtagcacagtgctgcccagttctgtcttcagnnncnccggnnnnngtatctnannncgtttcagaatgttacctccagtgaagagctcatgactggttagaagactgacaaactaaccaaaattttacacactccagttatgtgtgttaaaagttataaaaggaatggccaggcgcgnnnnnnnnnnnnnnnnnnnnnnnnnnnnnnnnnnnnnnnnnnnnnnnnnnnnnnnnnnnnnnnnnnnnnnnnnnnnnnnnnnnnnnnnnnnnnnnnnnnnnnnnnnnnnnnnnnnnnnnnnnnnnnnnnnnnnnnnnnnnnnnnnnnnnnnnnnnnnnnnnnnnnnnnnnnnnnnnnnnnnnnnnnnnnnnnnnnnnnnnnnnnnnnnnnnnnnnnnnnnnnnnnnnnnnnnnnnnnnnnnnnnnnnnnnnnnnnnnnnnnnnnatatcaaaagaaaaaaagattataaaagggatgatgaacatggagctgcgtctttttaaacgttgttttttgatgcttcagactcttaatgcttttatataaagctataaactgtgtatgttaatcacggtttataacaaagaacaaataaacnnnnnnnnnnnnnnnnnnnnnnnnnnnnnnnnnnnnnnnnnnnnnnnnnnnnaatccacatgaagtgcaataagcttgtaaagctaagtagttattaatatttctattaacatgatataaaggattatgattgtaagtgtttattgactggcagttttcatttcagtattagcacagtgtcttgccagtgttggaggccatgtattatttcagtcaa

SEQ ID NO: 6726 - DNA, 248 bp, Macaca Fascicularis
  misc_feature (1)...(248): n = A,T,C or G
ggaaaaaagaacaaaatatatgaaagaacagcttataagaaactagacagaaggcaataaacaacagtgatctctaagaaacaagaaacaaagattactccagcttactgctttgtgagaatttttaggctattgtgcagagtgggtcattgcagtcagagcctggcagaaatctggatttaggagactgatatgagaggccagtgagacccaaaagactagagtttgcaggaagggtantggagagg

SEQ ID NO: 6727 - DNA, 668 bp, Macaca Fascicularis
  misc_feature (1)...(668): n = A,T,C or G
acaaagaaaaaagaaaaaaaagaaaaatgtttttnnnnnnnnnnnatattttttgctacttttgctgttttatttttttaaattatgttctaaacctattttcattttatgtccctcaatnnnnnnnnnnnnnnnttcatttttctatgggctgtgtgaaaagggtgggaatgtccactgtaaataatatacacccactggccctggggctagaggtctgtcccgagggcactgcacgctcctggcgcnnnnnnnnntgtaacctcttcttcctatgtcctgcacccagacctcacgacgcacctcctgcctctccgctacttttggaaggtcagaaaaagaagatgtctgcgtcgagggcaggaaccccatccatgcactagacgcgctgggcggagagtcaaggcccagcagccaaccaccatggatggtttcctccaaggaaaccggtggggttgggctggggagggggcacctacctaggaatggccaccaggtagagctaaagtgattaagaggtagccaagggcacagttgcgcacacctgtaatcccagcactttgggacgccgnnntgggcagatcacttaaggtcaggagnnngnnnnnatnccggccaacttagtgaaaccccatctctactaaaatataaaaatatccaggcatggt

SEQ ID NO: 6728 - DNA, 713 bp, Macaca Fascicularis
  misc_feature (1)...(713): n = A,T,C or G
agccactggtgatgagtgagttctcactcagttcgtgcaagacctggtggcttaaaagagtctgctccccctttgctttccattgtgattgtaaccttcctggggccttcatcagaagccaggcaaatattggtgccatgctagtaaagcctgcagaaccataaacaaaaaaaaccttttttctttataaattacccagcctcaggtactcctttatagtgatgcaaaacaggctaacaatatataaattcgtaatttttaagttatatattgtttttattaaacacttatgagtactgtttgaagtgctttatttaatccttataacaatcctatgaatttggtaataatattcacattttacagatgaggaaattacccaagattatgtagctaataagttgcatggcagaaattagcatctggcatcagtttgcaatctttaccactaacactatgtctgtgcatcatattaatcataatcattttctctgtcatgtgttgaaagcgtattgtgccaaacattgtgctaagagttttagaagcatgatctgatttgataaatctacagtatagattctattcttttacttcttgaggaaattttgagacccccccaaagattaaataacttctttcccttgttcattgtattaanactgcagttctccactcatctgtatatttgatgccttttgcaatatggctttgta

SEQ ID NO: 6729 - DNA, 593 bp, Macaca Fascicularis
tttttttattattttgtagaaacagggtctcactgtctgctgtgcagactgccaaaacagagtaaggaggtctgaaactcctagcctcaagcaatccacccacctcagcctccgccccccagagagttgggattacaggcatgagccaccatacccagcacctttttttttttttttttttaaatctccaaattggcgggatgaatgtgtcacagaaataaaagccaagataacactgtaggctcttggcagaatcaaggtattaaagaaagaaacaaacagatctagaacagaaaaatcgtgtccaaagtcttgggcatgcttgtcacagccaatatcctgacatggaaagtttatgtttccgtgcctggggctcctcctacctcccactaaatcatagacattgccagatcgcagaccctccttcatacaaggtaaaatgtaaaagtgcgtgaaagtagtgtgtcaaccaagtacagtggctcacacctttaatcccagcacttccggaggccaaggtgtgtgaattgcttgagcccagtgcattcaggaccagggtgggccacaaaatgagacccctgttttgacaaaaa

SEQ ID NO: 6730 - DNA, 665 bp, Macaca Fascicularis
  misc_feature (1)...(665): n = A,T,C or G
gttaaagtgatcctctggcctcagcctcttgagtagctgggactacaggcatgtgccaccataccccgctgactcgtatctttagtagagatggggtttcactcatcgtgttggccgggctnnnnnnnnnnnnnnnnnnnnnnnnnnnnnnnnnnnnnnnnnnnnnnnnnnnnnnnnnnnnnnnnnnnnnnnnncctgtacctggccaataaatgaatcactttcatcacctcgactactacagcctgagtccaagacactgtcatctcttgccttgagggaagagagagaccctctcatattgttttatattgttttatactcagtacctgttttaagaaaaaacaaggaagtgaaaccaaagacaggcagcccagcgtcaggcccaaaactgggcctgggcctgcctggcctaaacctagtagttaaaaatcaacttatgacttagaaactgatgttatccatagattcccggcattgtataaaagaacactgtgaaactccctgctctgttctgtttcactctgaccaccggtgcttgtagcccctgtcacgtacccactgcttgctcaaatcaatcacgactctttcatatgaaatctttagtgttgtgagcccttaaaaaggacagaaattgtgcactcagggagctcgaatttaaggca

SEQ ID NO: 6731 - DNA, 2379 bp, Macaca Fascicularis
  misc_feature (1)...(2379): n = A,T,C or G
taactttgccaatcctaagcaaattccataaactttctggcctcattttgaggttgtcgaatgtattgatttctaatatcccttccagtaatggaaggatgtggtttattcagaatatgaaatgttgtggataaatcttaagagagtgaaatattaaaattaagaaagctttacagcatcagaatctacaaggtcaatccaaatgctgtcagtgcccttgcctccttattttttctgatactattttgaaaacttagacgtttccatgcaattatttttagcctgccttttagaaatagaaataggaaactacagtatttgagttgcttttctaagtaagctcaaggctttgcttgtcttactgtttaacctgacttgctatgatccctgatatagaactttaagtgaaaacttaagggctaactagtgtggaggatgacctgaaaatttcttcaccaaaaataaccatgtgggccaggcatgnnnnnnnnnnnnnnnnnnnnnnnnnnnnnnnnnnnnnnnnnnnnnnnnnnnnnnnnnnnnnnnnnnnnnnnnnnnnnnnnnnnnnnnnnnnnnnnnnnnnnnnnnnnnnnnnnnnnnnnnnnnnnnnnnnnnnnnnnnnnnnnnnnnnnnnnnnncagctacttagagaaggctgaggtgggaggatcacctaagcccagggaggtcagggctgtggtgagccacgaccctgccagtgcactccagactgggtgacagagtgagactgtctcagaaaaataaataaaaataaaaaataaatataaaaaatattctggttgtatttattgtattgcacaaccatatgaatttttcatctactgttctaaatttaattgtgcatccatatgcaataagtggtgtattccatcttaaaatgaaatagtggcaaatctaaaacaaaaatacaaatataaataatctttaaatggagaccagttttagttctactgtttaatgtctattcatctttgtgcaagttattaaaattctctgttcacttatagttactgagagcgtaatggagtaataccactgctttcatatatatatattttttatatcctgcagggtaagtgctagcatcttccaatgagaaaaggggcttagagtgataacttttgatacttccctcacaaggtcattctaagaaatatattaggcatgcaaaaaactttaactataaagtgctatgcacgtgttcattattattagttgctagcattgtgaaactcattgtgcagaatgtatgctgcttattgaatatttgaatcatcagatttaaaagttttactttgtaaaatagttttcctttcatatgttattgaggcattactgtatttatttggtgctaactagctttcctttcctgaagtagtccctattttgccataatttattttggtttttttttagacaggtattttaaataaaagcatttaagactatatatttatctcttagtttagcttcagttgtgtctcacaaattttaatacacaatattgtatttcaaatgttattgaaattgtactgtgatttaccataaaatccatatgttgcttagtagaagaaatattttttgaattttacagatcaccactcattgcttttccaaggcttaggaaaattcgctactcatttattgaagaaaccaggtcatttgtcttatagcttcccacgttcagatttttactgttgcctcctgtggtgtcacttagtgtttaacttattgccaatgtcattgaaattttatttcaatgtaaatttcccctctatttcctgtaaattgatggttaaatctagaggcttgatcagattttggcaagagatttttttggcaagaatacttcacaagtgttgctatgtacttccatcagcaaacatgtaacgacaagttctttttttctaatgttagccatcaatgatctttgtctacaccttagttaattaggagtcgaaaaatagtgaaagtctattccaaacaatattactaaaaaagcaagcttccccgtgtcagctatatgactgctacagaggttgaattcaatcagaaaaaggtagaataggccagannnnnnnnnnnnnnnnnnnnnnnnnnnnnnnnnnnnnnnnnnnnnnnnnnnnnnnnnnnnnnnnnnnnnnnnnnnnnnnnnnnnnnnnnnnnnnnnnnnnnnnnnnnnnnnnnnnnnnnnnnnnnnnnnnnnnnnnnnnnnnnnnnnnnnnnnnnnnnnnnnnnnnnnnnnnnnnnnnnnnnnnnnnnnnnnnnnnnnnnnnnnnnnnnnnnnnnnnnnnnnnnnnnnnnnnnnnnnnnnnnnnnnnnnnnnnnnnnnnnnnnnnnnttcaagaaaagactcct

SEQ ID NO: 6732 - DNA, 623 bp, Macaca Fascicularis
  misc_feature (1)...(623): n = A,T,C or G
ccagcattcaccttgtagctagtaaaagggcctgcagaaaggtatgaaggtactaaggcaatctggtctttgtagttttccaaaacaaccagtgagaggacatagggctatactgagaaaaactactgggaatagaacatgcacagatgagggaaggaccccaggggtaaaggagagtggctcagataatgagagaagaggggaccaaatgaatgagacaactcaaagtactgaagagggaggaacacacaaaaccgtcttatctaatactctgtagtaacgacagaagagagagccctaagagccaggaagctcagaaactgtcctggcccaccctcatctcctacacaggaatcttttaaaaatacaggaagaagccgggcgcggtggctcaagcctgtaatcccagcactttgggaggccgagacgggcggatcacgaggtcagnnnnnnnnnnnnnnnnnnnnnnnnnnnnnnnnnnnnnnnnnnnnnnnnnnnnnnnnnnnnnnnnnnnnnnnnnnnnnnnnnnnnnnnnnnnnnnnnnnnnnnnnnnnnnnnnnnnnnnnnnnnnnnnnnnnnnnnnnnnnnnnnnnnnnnnnnnnnnnnnnnnnnnnnnnnnnnnn

SEQ ID NO: 6733 - DNA, 712 bp, Macaca Fascicularis
acaaacaagtcactatgtcgtgtcactaaaatcatgctaatagaaatgtttttccttgagattgtttagaggctctggaggagcgtttctcagtttttgtgtgcctgtgtgcacatgtgtgtgcgagcgtgtgtgtgtgtggacttgctcacgcggacacatatgctgtaagcacatgtgttcattgtgcgtatgtgtgtgcatgtgtgcgcgtattacgcttgctaaaatttgttctgaaacatcagggaatctaatattcagaaaaagtgtttccctcttagatctgttcactttaaatttttccattaagtataaagttcagttagttcttaaatcaaggtcacttgcatggtggggtcgtataaaactcttgacactgtctagaccattttctgatgtgaatacttttgagaggatcaactattggctcattaatgatatcagtatcataaggtgagttaattgagggtgtgtgtttattttgaatcatgcctacttaaattattaacacaagagagttaacaaattgacagttaccgtttgctttctcatcatcctcattgctatttattttatagcaagtctactatgtgtggaccaaggctttggcttctgtggttagtatgggaagaataaattgttgaaataaaaaaacccagactattcagttcacaagaagccccccaagagaacagtaaattgtgttgta

SEQ ID NO: 6734 - DNA, 978 bp, Macaca Fascicularis
  misc_feature (1)...(978): n = A,T,C or G
aatataacaaannnnnnncntgncatgaaggaggacagtgaaaaagttccgagcnngttaactgattatannctgaaagttctgtgtnnnacatagagcagcaactttatctacggtgggctccgagctagatttcctannnnnnnnnnnnnnnnnnnnnnnnnnnntaccttcttgctattggaaactcagcacatttgaacttgggtttgatttagtattaacagatcttgactttcactaattctttatattatagaaccaacggaaatatnnnnnnnnnnnnnnnnnnnnnnnnnggtttttgttaaatctactaataattatgaactgttctcttagtagagtaagagagtaatattaattgtgcatgtgcagttatatttctcattaactgacagtatgcccatttgtttttatggctttctaatctaaagtgcactgatgaactagatagattaaagccttgggagatttatactataaattcagtgatggcaagaaccaacactgatttttgtgagaattgtcagtataaatattacctaccagtattgttcagagagactgaaacataataaactcgggctgctcttgaagaagcaaaaccagaatatgcattactttggcttaatacttagtgaacattggaaactgttggtgatgatggattttgttgcttgctgcttgtttaaccattggtcaaattttaaccattaaattgccattcacttttagaatcttgtactgtttaacttttgattttcaaatgttctgcttcaggtgtctgtgaagaattgtactttaaaagttcatatcctctgaggtgcttgacaaagtgtacaccgcagaattgcccattctcattacggtgtcgtattttattcatgcctgtgtgttttaagtatgaattctagatacagctacttatggnnnnnnnnnnnnnnnnnnnnnttttgctggttccaatcaaatcaa

SEQ ID NO: 6735 - DNA, 693 bp, Macaca Fascicularis
  misc_feature (1)...(693): n = A,T,C or G
aatgaattgctctgtgctgaaatttgaagaccagaaaatgaaacttaaaagcaaacaatttnactgaatctgtgtacccttcattcatgagaactccagaatgagtgttgaccactgaagcatcttttaagtctgtgttccattgtnnnnnnnnnnnnnnncgtcgcatacgtatcatctgaaatcatttgaaatttttgtacaataaaatatcctggatttgatcccaaatgaaactagtaagatcagatttttgggtcatgtctgttgtattttcaataatgtgatttcagatagtcatctggattctcccacttctctattttctctacttttccttccagcaaacctgaaacattagggagatggattaatgtgagtaccagnnnnnnnnnnnnnnnnnnnnagtggttacgtttaatcaggcagtaagataatttgggttcttgagttgttttggagcaatatcccacaactggggtaggaagctcaggattttttttttttttaaagctagtcatttcaaaagtacattgtatttttttgnnnnnnnncagtatggacaatttcaaaaaccaaaaccccctttggattggtggaaataaaaactggtaactcactcaagtgaatgaatggtcttgcattttaaaagcttannnagaaactcaatttgaaatgattaaaaaatgtcaa

SEQ ID NO: 6736 - DNA, 694 bp, Macaca Fascicularis
  misc_feature (1)...(694): n = A,T,C or G
agggnnnnnnnnnnnnnnnnnnnnnnnnnnnnnnnnnnnggaggcggggctttccctaccatcgttgagagagagccttgggacggcagggatggcgaggtgagtgtccgggagggagnnnnnnnnnnnnnnnnnnnnnnnnnnnnnnnnnnnnnnnnnnnnnnnnnnnnnnnnnnnnnnngtcctctccatcagacctcagccctggtgcacccgtgggccttttaagaggttcttctctgaagacccttcatcttccttatcacaagtttannnnnnnnnnnnnnntcgatattcttgacagccaannnnnnnnnnnnnnnnnnnnnnnnnnnnnnnnnnattaccttaaagtgaacatttaacctggaattcatgtactttatcttagaaaaacagaaaatgatagctttgaaattagcacttacttctgcactgttgtgtcccaccctcctcaaaaggacatgttcggtggcttccagtgttaaagtggtgagtgatgtgatgtcgaaatgtttcaccagagttcttagcttttccttccgtataatcgtnnntgcgaaggtccgggnnnnnnnnnnnnnnnggagaacctnnnnttgtcagcnnnngtagctnnnnnnnnnnnnnnntnnnnnnnnnnnnnngttggccttccagggcgtccctctgnnnnntcacagtggctttctgt

SEQ ID NO: 6737 - DNA, 394 bp, Macaca Fascicularis
  misc_feature (1)...(394): n = A,T,C or G
ccaagcaccnnnnnnnnnnnnnnnnnnnnnnnnnnnnnnnnnnttatcagcaagaaaatgaatccactaaacagacattaggtagtannnacaaannnnnnnnnnnnnnnnnnnngattaaagtgggagccttaggataggtggatgctgataggaggaccctgggctgccagcgannnnnnnnnnnnnnnnnnagaaagtttggaaataaagtcacnnnnnnnnnnnnnnnnnnnnnnncctgcctagccccttcctccctgggaaacacctgcatagtctcttcctccctgggaaactgatttgtcaagtgacccgatgaaaagaacactccttacactcagctttccaagagttggtgaagacaggacggggatggagagctactgccttc

SEQ ID NO: 6738 - DNA, 717 bp, Macaca Fascicularis
  misc_feature (1)...(717): n = A,T,C or G
ggagccgctcgcgctnnnnnnnnnntagaactgnnnncgactccggggccccgtgaaaagactgagcgcccggggcacggcaaagaagccgcgcccaccgcctgccagttcacaccgctccgagcttgggtctccgcccagctccagtcctgtgatccaggcccgccccctagcggctggggagggaggggccgggttcgcggccggcgaacggggctcgagggggccttgtannnnnnnnnnnnnnnnnnnnnnnnnnnnnnnnnnggatcgcagaccacttctttcggccaggctgaggccctgacgtggatgggcaaacgacaggcnnnnnnnnnnnnnnnnnnnnnncgtccgtgttccactttccacgcacccccacctaccgtcggttcgcaaactgcaaatcctcccttgtgcatgacgccctgctctctggggagcgtctggcgcgacctctgcccgcttactcgggaaatttgcttttgccaaacccgcttattcggggatcccgcgcccccctcctcacgtgcgctgctctcggagcccgagccggctctgactgcttcggcggtttggatattnnnnnnnnnnnnnnnnnnnnnnnntgacaggctgcaggaccccgaacaccccaatccannnnnnnnnnnnnnngagaccccgatattcctcggtatttattgtctgtccnnnncctaggaccccacccccgac

SEQ ID NO: 6739 - DNA, 1988 bp, Macaca Fascicularis
  misc_feature (1)...(1988): n = A,T,C or G
atatcgtgatttatattgagttcaaattaacttgcttaagtgtcatattctactggctttctaactgccctgcacaccaatattccttttaaaccataaatattttaaataatatttcttaagagtgataaataacatttttcctaaaaattatgtttttttagtttcctaataacctgcactgttcatcctcttgcattctaagtaatagaagagcaacactttcaaaccaaatctcactgaatgccagtgatttcatatgaaagatgcaatacctctttggctctttgaacatttagcaagtactgggaattttctattagcagtggtgttttcattggttaaattccacttagttctctagagtgttttgtatgtgttcggggcttgatgattattttgaaagatacattctttttaaagaattaggaacactgtttgcaaaatgctaatcagaatataattttaccagtgtcaggtctagtaagttatcccattcttctttacctggtctccttccttcatctagaaccttcccgaaagtagtctaatcctaactttttctttatgttctttgattagtaatatctcattccactcatgattatagttacccacaaaaaataaaacagaatgacatcaacaaaaaaaaactccacagaattggtgtcaaaacagtctaattgcctagggaataagcttctactgaggggcaaatgtgcacacgtggttataaaatgaatgcaaggtgcaggaataaaatcctctcctgtcgcatttgaagtccctgggttgtgagagggcctcaagttaacagaaaccacaagtccttgaggcttacgtatgttataacctattctagtttataaagacaaagagctgaggccactgtgaggagtgtcaggttttgatattcattgtcaaagctcactttggccaggtgagagctccagctggtcagcagaaggcagaggcattcaggcactcatcatgggtagcggcaaccacccagtctcagcccatgcttctctacagtctcagcagcaaagtaaagctcaacaatactttcaagaatggtattctgagagttgtagaattcgagaaacccagtctggtaaggactcttggggccagcctcccagccgtggcagggcctgcttgaatatgcctgatggaacagcatcctttccttccctgctccttccttctaccatctctgtaccttgaccagaaagtcagcttgaatagtccatgaggagcctctgaacaaaggattcaaaacaaactttggaagtgttctgtgatgccattctatactttgaggagcaactgaatttgcaggctgaatttaaagcctgaaactagtataaatgtcaaataattaatttgttgctaaatggtggcaaattttgtggcctaagttttattttgctattggaacacaaactccaaggagctgttttagggaagactaaacaattttccattctcaccattatttggcaacttgcagagcatttttagtaggactttctccagtatatgtagtatccatcagatctaagattttttgtaggctgtcaagaagtccagaattatggcccaagaggaaaagagttgcatttttcattaatattttttataaaattaggtaaaaaccattattaaaacatgagtgacaagctgggtgtggtagctcacgcctgtaatcccagcactttgggaggctaaggcgggcagatcacgagatctgaggtcaagagcagccgaccaacatggtgaaatcccaactttattaaaaacacaaaaattagtcacggcatannnnnnnnnnnnnnnnnnnnnnnnnnnnnnnnnnnnnnnnnnnnnnnnnnnnnnnnnnnnnnnnnnnnnnnnnnnnnnnnnnnnnnnnnnnnnnnnnnnnnnnnnnnnnnnnnnnnnnnnnnnnnnnnnnnnnnnnncaaaaaaaaaaaaaaaaaaaaaaaaaa

SEQ ID NO: 6740 - DNA, 767 bp, Macaca Fascicularis
  misc_feature (1)...(767): n = A,T,C or G
gagtcaagtcaggtgagttgttagtgtgagaatgagctgtcatgtcatccatccaggtccccgcttcgactgttttacacgatgggacacaagtccatattcgtgaggcagtgctaagggttgctctgtcagtgtaaaagctgtgtccgagccccagggcatgtaaccttacagctctgtggtggagttacatgctttcttgctgaaggaaagagtattttcattaggtttctttatttttgttccctcagtgggatgttattagtcatgtagaggcagaatttctgtcctactccacctccaaccaggaagtattaatcactctttcatctgtgttttcatagcatttgggttattatattattgttttttgctgattattttaatcatacaagaaatacatgagtacattctgtttataaaatttcaaacaataaaaataaaataactgttcccattaatctgcatccattttcccatgctaatctcttcccagagnnnnnnnnnnnnnnnnnntttgtgtatgaccctcnnnnnnnnnnnnnnnnnnnnagatatgcacaaatatatgaatgagtatcatttactccaatggtatcatattctatatattatattatggttttctttattcatttaaccatattgagttagagaagtttatatgtagaataactttattctctttttaagaaacagctgcatagaaggagaatcacttgaacctgggaggcggaggatgcagtgagccgagactgcattgctgc

SEQ ID NO: 6741 - DNA, 719 bp, Macaca Fascicularis
  misc_feature (1)...(719): n = A,T,C or G
atgaagcggagaaagtgcnnnngagacattcacacatttctctggactcagtctgttaacatttcagggagcttgtcagatcacacctttttgccttggaaatcctacagatttcctgtacgccttcatatctgattcttccctaaaacctttgggtatgatttcctccctggtcttgagaatgtcctgcagtctgtgttttataattattcttcgtatttattgaatctagactttaagttattcagagatcagaccagaaccttagagtttctaaattgtatgtggatattaaacaatattaataatgaaagagctaccaaaacagtctatattgtgtgaacaatctcttgtgatattagacgtatttaaagaccagtgttgctgctatttttaatattttggttaatttaagtgaaatgtacatacttaaatttgaagatttatcttgcctttcagaatgtgaagatatacttgcatatattttgacatatttcatggaaaataaaaatgataatccactttgtgaatgtaagtgaatgtatgttattataaatgatttttgtttgcattgatgatgaaacgagagtttttatacatttatattgactggtctctaaatctcctactatgttttcttatcatttttgaaatacagttcccattatgagagttttaaatagattggtgtttcattttgtattatgctactattagat

SEQ ID NO: 6742 - DNA, 719 bp, Macaca Fascicularis
  misc_feature (1)...(719): n = A,T,C or G
aggcagtatcaacccgtgtaaccttgtcctgccttaaatacttntgagaaaaataccaaactttgcttaaagcagcatagttatattgagaaagagactgcatttagtgaggaacaagaccaagaattttctctttctgaatctgacagttgacaggcctcctgatatcctgtgttgccttgagctaacattttccttagtcactagcctagggcagaaaggcagccatgtataaatgaatacccatggtcatgttccaatataactttatttacaaaaactaatttagtccataggttacggtttgctgatttctaagacagagcattacagtgtgtttcagatgtgaagtaactcttcctacggcatgttcaggccctccttttcagggaatgagaaagagtggggagggtatttcaacgaaagacaaattgcaaaataacctccctgcaaaaatacacatatgtcagactctttattatggtaaaagcacaaaacaggtcatctttttgtggaaatgctggagtctaccttttcctttttatcttctgatttttgttcctaaaacaaaatcccaagtgacgttgcctcttccaagtcagttttgtagaccatgtaacacgtcttaatacactgtatggggaaaaaataaaagttagccttagatttctttgttttctatggttattgtgtacagaagaaagatgaactgtaaataa

SEQ ID NO: 6743 - DNA, 713 bp, Macaca Fascicularis
  misc_feature (1)...(713): n = A,T,C or G
tcataatgacttacaaattaaactaggcnnnnattgaactacctcacactaattttctatgctttcccaagtaagctgttgccctgttagatctttactgagtgaattataaatgtgtgttaaatactttttagccaatgttgaaacaataccagtaagtatgtaaagtatataccttacatcagtaagagacacatgtaaaatctttcactgtatatcttggaaaattgtgttagatgtgctcgttgacattattactgtttcgtaagtagaacctgctcgtgatatcagtccattctttacattttacaaaaggagtaaatcttagtaaaattttacgaagaaataaattacttttgtaggcccaatatttggtatatttttgagaagctgttaatcttttagctgaataatgaagttagactgaattacgtgtctccctggactgtgacatctactttctcattacagtttatcctggccagcagggtgtcacacctggaaacctgagtatgataactgacatttgcttttcttcctctgcgatgtcattcctcctccattcctctccttccctgtgttccgttccctctcctttcctctagacaaaacaaaatggggcactttttagggaatgctgagatcattattgtgatttttcatcattcatgccctagtcattaaacatnnnnnnnnnnnntgtaaacaacgtt

SEQ ID NO: 6744 - DNA, 668 bp, Macaca Fascicularis
tggcagttgagatagagaaaagcatctgtccatctgggcaatggaacatctcggtataaaacctgattgtatgtcctgtttacagagaaaggagaaaaccgccttagggtgaaaggtgggacttgctagccgcaatgctgctctttatgcactaaaaaggtttatggagatgtttacatatgcatatcaaggcacagcacttttccttaaacttattcatgtcacagagaacttcatatgtcttactgctgactttctccctataatgatcctattatcctgccacttccttttctttaagatggtaaagataattatcagtaaatactaagggaactcagagaccggtgccggcgtgggtcctctgtatgctgagcgccggtcccctgggcccactttttctttctccatactttgtctgtgtctcatttcttttctcaaggctctcattccacctaacgagaaacgcccacaggtgtggaggggtaggccaccccttcaaagcctctgtgtttttctttaattgaaagtatatgtaaggttaatgcatttagtgaacttgactaacaaagactaatgtgcacattaacagatgtactttttaaggttttatgggaggctgtgcattgctctaaaactgttgggaacaccttttgaacagttgcctt

SEQ ID NO: 6745 - DNA, 759 bp, Macaca Fascicularis
  misc_feature (1)...(759): n = A,T,C or G
gtggtgggggggcaggaaaannnnnnnnnnnnnnnctattttgataatctatgtatctaaaaatgtgagatgtgcgactctannnnnnnnnnnnnnnnnnnnnnnnnnnnnnnnnnnnnnnnnnnnnnnnnnnnnnnnnnnnnnnnnnnnnnnnnnnnnnnnnnnnnnttcctttattttaatgatgtatcattgttaaaaatactgtcaaatccgtaatagctatagnnnnnnnnnnnnnnnnnnnnnnnnnttatttaaagtcacaccttgtgtttttactactttattnnnnnnnnnnnnncctgaataacttttggctgtnnnnnnnnnnnnnnnnnnnaaataagcctgccttcataaaacactaacttttaaaaggaatagctaaatgacttctaaaattatgcctattaacatgtgtaatnnnnnnnnnnnnnnnnngtttgggagtgcaagaannnnnnnnnnnnnnnnnnnnngnnnnnnnnnnnnnnnnaaaagccatgctcattacaaaatgagcagttgatgttttatgtggcnnnnnnnnnnnnnnnnnnnnnnnnnnnnnnnnnnnnnnnnnnnnnnnnnnnnnnnnnnnnnnnnnnnnnnnnnnnnnnnnnnnnnnnnnnnnnnnnnnnnnnnnnnnnnnnnnnnnnnnnnnnnnnnnnnnnnnnnnnnnnnnnnnnnnnnnnnnnnnnnnnnnnnnnnnnnnnnnnnnnnnnnnnntattttannnnnnnnnnntaatggtgc

SEQ ID NO: 6746 - DNA, 2205 bp, Macaca Fascicularis
  misc_feature (1)...(2205): n = A,T,C or G
ggctaggagcggactaggtcaggtcggctgtaggattctgctccggggccggcggctgcttcttccaggcctggctgccactgagtagccgaggggccgccgtgacactctgactgattgactggttggctgcctacgtcggcgctcctcagggccccaaggccgaatttgggggcaagtggagggtcggcggagacagagcagccccgacagggtttggaaggggtcgaggcggaatgacaggggagcggggccggggtgcaggctttggggtgggcgcgccagcccgtggccagtttgggcagcgagtggggagaaccctcttgttcctcgctagcccgcgggccggccactcccgtccagttcgcgtcttggcgcctcgactgggtgtgcagcgcggggccgcgacttcaggtgcgagtagtggcgcttggcagctgcccacgcggtgactgcagcgtgagccgcggccaccacactccagggagcccagggcaggaggcagctctgggtgttctggccgtgggcctgggaatgggcgtgtagacctcgaaccccgctgagccgcagtcctgtcggaagtgctaactgtgcatctttgcatctgcccacagccacagggttggattgctcaagggttgtgctgagacccagcaaggctagaggctagtttcgaagctgtagctcaggctgagtctcaaggcgggcgacgactggacggccagaccggcgagctcttgacaggtttgtggcctgattgtttggatttggtgcttttcacctgtggatgcggtctgaagccatgtcagaggggttgcttgtgtttaagcgtgcatgttataggctatgggagtgataatcttgcctctccccctctgagttcaggaacaatcaaagaaataagcaaaggtgccaagcaggctcctgatgggcaccagcgagcttggggacagagcagtccaagcatagaaaccctggaaagcctggcccttcctagaaagtcctttctctctctcttccaccctggtttgttgctccatatacaaaaaatatttgaatgtcgctcttccgcccaaggtcagccctgggcagtgggtggtgggggtgacacccgagtctgctgggtgcctaaggatctccatcagttagatggccaagatgagaggggacgacaacccgtacctcatgtaggctttcccgcagcaggtgtttttatgctgggcaaattgggcttccagcctctcggtttcagggtttccttcacccaatgtgcccgacctccctgggcacctaggatgtccacctgcatctcagccagagctgccacgtcaggagccctgtgattcactagtttttgccagttggttgtgatacacaatgtcaaaagtgtcattaaggcacagccggaggcgcaagctgagaggaaaagactccacagttaagaggacatgccaccactgccacccaatttaaactgccgcaggctgacaaatgagaagtcgccgtgtttggacagtcccaacatccagtcccaaggaagcttcaagccgagtggccaatccacatgttggactacagtacccagaagtaatttcggtactatgatatattttcgcgactcaatagccttgcaggcctgcggaggagctttgggggcggtcgcctgtgagcatgcgcagagagactatgggtgcgtggtgctcacgcttttggtgtcttgacttttaagtttttccgctggtttcaggaacgcgaccggcaacctcgggcaggggagacaggactgtaggtcagagaagagacggcgattggccgccgggaatcctctgaagcaggagactgccctatccaggttacccttcccaaggggaagccagggtctccttcagaaagctgaggcagggccggggctgnnnnnnnnnnnnnnnnnnnnnnnnnnnnnnnnnnnnnnnnnnnnnnnnnnnnnnnnnnnnnnnnnnnnnnnnnnnnnnnnnnnnnnnnnnnnnnnnnnnnnnnnnnnnnnnnnnnnnnnnnnnnnnnnnnnnnnnnnnnnnnnnnnnnnnnnnnnnnnnnnnnnnnnnnnnnnnnnnnnnnnnnnnnnnnnnnnnnnnnnnnnnnnnnnnnnnnnnnnnnnnnnnnnnnnnnnnnnnnnnnnnnnnnnnnnnnnnnnnnnnnnnnnnnnnnnnnnnnnnaaaaaaaaaaaaa

SEQ ID NO: 6747 - DNA, 749 bp, Macaca Fascicularis
  misc_feature (1)...(749): n = A,T,C or G
tagttggatacagaacacacaaatccagggggattaaagctggaaggggctaagagattagtttacagagaaaaggcgtggtggtgggatnnnnttaaatgtgtgttatgtacatatatatataaatattaaaaaatgaaagttaatctagattttaacattttcagaaacttagtgataatattatgaacaattctaaaagccctgtgatttgaaaaatgtagaatcattaatggcccaagataggccttcacaccctcacaggtgcgaaaggaaaggccttcacatcctcacagaggtgtcatgcaaagnnnnnnnnnnnnnnnntttccaactttccgtctttaggccctggtgagaggcacacttatgcactaaaatgcacatatatgcacatgcattcaaaaataggcatttggtacaatggtgatcttgtacctgatgggctgaaaccagcttaagaacaaatttgttnnnnnnnnnnnnnnnnnnnnnnnnnnnnnnnaaaatataaaggctgctttagtgccttacgcttactaaatttaaatctttatttacctgggtttgagcctacagactatttatgattacatatcaaaattgattaaaacacttccatttctaaaagttcaaatatacttgttaataaaannnattatcggcattaatactttaacttaaagaaaagttgtgttctgttttcctttctgtgtcttactccccccacactgtccctcccccatcac

SEQ ID NO: 6748 - DNA, 103 bp, Macaca Fascicularis
caatagggcagaattattaatcaaaggcatctattttctatctgaagggtatccttccttcagggtttaatagactgagtcagatgggcctgatactcatcaa

SEQ ID NO: 6749 - DNA, 1961 bp, Macaca Fascicularis
  misc_feature (1)...(1961): n = A,T,C or G
ctgggtgcagtaatttgacttctgccttttgaggtcctcaccattttttcaacttcttattcctatcctgtttctcattcctatcctgtttctccatgaacgctttcttgagaactccagttcactttaatctcctcattccctaactttgtatgtactttttatccatactgcccaactgttatttgttatcttgggttttgtcctctgattgctttatttgtgcaagtgtcctattctctcagcaaaatttcaaacttgaactgaaccatgagagcaaattgtagtgttgttttcactgtagcaatgcacaaaataggtgctcaataaatacttgctaatttgtaaatacttgaggtggaaagctttctaccaggatgaaaggaatttgtccaagaattcgactggcctttatattctgttccgctgggctatttgaatatccctgtgtcaatactgcactccataataagtagtttttaaaaataagtcctgatgtccagtagtggagagcctcttatttcgttcttgatcattgttttgcctgttttgggcttttataaatcacacttccatatatagtttacaatgaactgttaagtttccttttaaaaattctgttgaggttttaactgatgttttagttaaagcttaaatcagtgtggaaagaactgacgtctttacaatagtcagtttttaaattatgagtttagaatatctttccatttaattaggccctttgaaaatatcccaacaaaattgtgtaattttttctacagatattttgtatctgccttgttaggtctattggtaggtactccatactttttgatgctattataagtagcatccttttaacctgaagcccagaagtatacagtaaatatagacagaaagctccaagagaagccccctctatttctgttctgaggagcagaaaaggggtctcctattagatagaatgtggatgaaattgcctgtttttcttgtttgccttttctttcccttgtttctctcccatccagtccccaggcaatcctccatggtgtggatgggcagctgtggatgggcaggcacctgaaaccccaaggaagggaaatccatgtctctgaccagaaaaactttggtccaaggacatagatggaatccccactggtttttcttctgttttctcactgcttggccccagaggcacaatcagtctcaggatcgtatgacagagcaaggaaacgaaagcttagacattctactcagaataccaacaagagatgcccaggagcaggaagtatcagggaaatcatggagaagagggagctcaagaaagaggcctcacaattttggctgtgaactcctaggtcttcttgcaagtggtgtatgcatggatctgaccaaagcctttggtctccttggtagaccactgctcgggtcccagcctgactactgggctgcacagcacatgagacaaattcaaacagcactgtagaggctgcggaaacagaacccacattagaaccacagtgcgcagagaggggtcaggagctcccagctggagcctacgtgggtggactgcctgctaaaatgcaacagtcaacgtcctccataggatttaaacacgacctattccagtgtccatacataatattcagaggacacaagatacaattttaaattacccaaaatatgaaaaaccaggaaagtcaacacctctaacaaggaaaaagacagtccaagcatagcagcttcgagactacatggccattgcaatgaacacataaagattttaaataatataaccacactctaagaattaagggtgtagctgggcattgtggtgcacacctgtagtcccagctactccannnnnnnnnnnnnnnnnnnnnnnnnnnnnnnnnnnnntaggctgcagtgggctatgattgtgccactgcactacagcctggctaacagaacaagacactgtt

SEQ ID NO: 6750 - DNA, 773 bp, Macaca Fascicularis
  misc_feature (1)...(773): n = A,T,C or G
ggaatatcatnnnatttcgatttcagaactgcatgtcaatttgnnnntggaaaatgaagttaagtcgatttcattctctaaattttctaagcaggaaagcaatgtaaaccaaaaatcaaaatgtttagaatttgtaaaaatggggttatatagcttttaattttagtttcctttttactgcccaaaaaaacttaaaaagacaacagcgtaatcacctgtttaagcactannnnnnnnnntgctattcagttctgggtagagcctggtcctggagacacactaacaggaaggcnnnnnnnnnnnnnnnnnnnnnnnnnnnnnncgtggggtgcgttctcaccaccccactcagnnnnnnnnnnnnnnnnnnnnnccttaataaggaagcttgctatgtgtgttaacccagttatgattagtcaaactggaaaacacttgatcaaacttaaaattgtaaaatctctctaacttttaaatatactttccatatttatacttaagttcagttaactacagtatggagacaaacaattattctnnnnnnnnnnnnnnnnnnnnnnnnnnnnttaagtttacaaatctcatttaaacatatatctttataatgtaacctctatggttctttctttgttctgccctcnnnnnnnnnnnnnnnnnnnnntcattttgggaacagaaacattgtgtctcaaaaagattcattgtcagttcagccaagatgttctttacctgagattctggaaagatgtttatctatatctgaacacttctac

SEQ ID NO: 6751 - DNA, 672 bp, Macaca Fascicularis
  misc_feature (1)...(672): n = A,T,C or G
ggcacaggcctgtgggttccctggaaatttctagcatgatccagtttctgtgtccagttctgcattctgagagtcaatcagtccctgataggttgtcattgattgttttcttcattggttttaaccttctaaacatctccagaccactttcttagcctttctctaggtactaaaaacaggtcctacccacacctgcctcacacttctcctttccaaggctgactgagtttggcggggcttgggtgtgggtgaacgagggccccgcattgtctaggccagcggttcccaggcttgggttcacttcaccatgcattggcaaaactagaaaagtaagcttgtgaaaaattgctctcagccaggcatagtggtgcacnnnnnnnnnnnnnnnnnnnnnnnnnnnnnnnnnnnnnnnnnnnnnnnnnnnnnnnnnnnnnnnnnnnnnnnnnnnnnnnnnnnnnnnnnnnnnnnnnnnnnnnnnnnnnnnnnnnnnnnnnnnnnnnnnnnnnnnnnnnnnnnnnnnnnnnnnnnnnnnnnnnnnnnnnnnnnnnnnnnnnnnnnnnnnnnnnnnnnnnnnnnnnnnnnnnnnnnnnnnnnnnnnnnnnnnnnnnnnnnnnnnnnnnnnnnnnnngtctcaaaaacaaacaaaaattgctctatgcaagttctttagcc

SEQ ID NO: 6752 - DNA, 764 bp, Macaca Fascicularis
atgtgaggtgttgagcaatcaggtttagtcaattagaacaacaccccacactgagagtaatagtcaaggctttattcacttactgtaatagtgcaagcaagagaagtgctggcttcctagggttccattttcatcatggaacagcattgaaaaataaaaatgaaatcctaagccccccaactgatggaacagacctctccttggccaaggagaccccagagaaaccttgagcctgagttcccaacagtgatgggatggaagggcagacacacctcgttatgcaccttccctccctcactgactgccactgggctttcctccacaagggcttaacagaaaccagccctttcaaagaccccaccatggatatccaccaacagcccgacactgcccctccttttttgcctgataagtgaccactgacccgtggttctggccagtctaaggaaatgcaccgtgagggtttttgtgtcctctgtcacacctttggacatcagagggctgaaaactccaccctcagatgatactaatgctgacattgtttgaacgtgagtcccatggagaggcgtgaagctccattgcacatgcacatgttttttctttcataaatatccatgactcctccttgaatatgtatatttgaccaccctgctcagcatgaattcctgttccctttgcgtctccctcaaagtgtctgtttctggcttctggccagaggctatgcttcccagcctgtcagaatggccaccctgcaggctgcaacc

SEQ ID NO: 6753 - DNA, 744 bp, Macaca Fascicularis
  misc_feature (1)...(744): n = A,T,C or G
agnnnnnnnnnnnnnnnnnnnnnnnnnnnagcnnnnnnnagaggcccagctggggcattcnnngggcatcnnnnnnnngctgaagggagcaaggtgcnnnctgggactgacggccatgacnntnnatgccatccnnnnnnnnnnnnnnntgtatcaaaagagtnnnnnnnnnnnnnnnnnnnntcagaagtctctctgtccaaggaatggcnnnnnnnnccgggctctgagaaacgatgcaagtctcctctgagctggggaccacttggagaaccggctcagtgacagtnnnnnnnnnnnnnnnnnnnnnnnnnnnnnctgagaggctcctggcgcccagaggaggcagacagatgtcttccagctgagtttctaactgcatgatgagactcagaccttccgctgcactagaaaatctgcaacagtgtccctgacacacttctcattagtgggcagactcgtgttaggtttgtgggacccagttctctgatttactccttttggaaaacccatggaatttcatgtataagcctttcgtttgtattttaaggttcttctgtttgttttgagtatataaatggtgctcaatagcannnnnnnnnnnnnnnnnnnnnnnnnnncctcctccctcctgtatgacaggtagccgccnnnnnnnnnnnnnnnnnnnnnnnnaaatcacaaaattctggcttaccgatacagcaatcaatacatttttgttctgtaatgtaaaatttgact

SEQ ID NO: 6754 - DNA, 1810 bp, Macaca Fascicularis
aattcacatagctactaccctaagctgtagtagcttcctaaagggattgcatgcctttggcctttccttccttccttccaatccaccctgcccttcattgttgttcatctttaaaatgctacttggtcacataaccacccagatcaagaactttatgattttccaatgcctttagaataatgctccacaactctacagctgtgccaccctacctccccggctttatcttcaattattattttatgcagagtttatgcttcagcggaatggatgtattctcttaccctctgagagatacatcttatacttttttgtctatgtgcctttttcatacatttctctgcctggaatacccttcccttccctctagtttttgctttttaagaggatgcgtggtctgcttaagaaaggcttccctctttgctcagattgctcaagagttggagagaacagaggcccctggacagaattaaatctaggaatcaaagttccctacagagaggagggagcagagtttctcttccaaatgtgctaatctatttgtggtcaggggacctgtggggagctggtattatgtcacttcttctggcacatttgaaagcatctgttctggcttccaaatgtagatgggagattgggtgaggccagctgcctactgagagaccacatatcccacctacacctctgcgtgctggagagtaacaggcacccagagacagtgagaaatgcctacatcttcttggaggcaagaccaggttgttgcccatgtgaaagctttcaagaagaggggggaaaataatcctgaaactctttatgatttctgcctgatctgggttgattctcttagccacaccgtagagggagcttcagtgagcaaaactctggctacgaaacataaagactgaaagaaatgggtttctacttcttccttccccaattgaagcttccacctgagggacctacaatcccttatatatcagtttccttttcacttactacctagactcaacaccagtgccacatagttttggcttttttatgctgctggttgttatatggctgcataacaaacaaaagccaatgatatccactgtaagcatatgttgttcaagtggctgtgcattggctggggagcagcatctcagctgggctcagcagtgcggttgtgcttcagactgcaagtctggctagcttggctccttcactccaggtaaggtcttgtttgctccacgtgtattcattctgggacctgggttgaaggggcagcagttacccaggagaagttcctatagtggtgatagcagaggtacaaggagcaaagtcaagtctacaagtacgtttcaaggccctgcttctgttttatctgttaacaactcatttgccagagcaagttatgtggccaagctatgtggccaacatcagttggggagtgagaaactgtacttgcctctttgggaaggaatgaaagttacatgataaaggcttagatacagggaagggtgaataattggacccataaaaggttgggcacactggctcacacctgtaatcctagcactttgggagaccgagacagaggcaggaggatcacttgagctcaggagtttgagaccagcctgggcaacatagtgagaccctggtctctacaaaaaaaaaaagtttacaaattggctggatgtggtggcatgtgcctatagtctcagctactcaggtggctgaggtgggaggatcacttgagcccgggaggttgacgctgcagtgagctatgactgcactccatcttgggtgacagagccagaccctgtctcag

SEQ ID NO: 6755 - DNA, 2013 bp, Macaca Fascicularis
  misc_feature (1)...(2013): n = A,T,C or G
tagaatgtggatgagtaaatgtaaatgaagggttgaatgtactagtgatgtcacagtcagcccaggtgaaggtgacagaggctcctagagctacctggtgaatatcgcttcatgaattacattctcttggatctggattttgaactggaggagctactggtggatggcacagaactatattccgcccccgccccccatcctggagtggtagcaatgagttatgattggtatcgtaatattgggaatacggttcccaagacaccttctccttcctttaaatctctggaaagccaattcacttcagctgtgtgaggcaaacatctgttcaccatattgcattggtcatagtggaatctgttcatctgtctctttgggagaagaaacggtgggtgtgactccacacagatatcttggcaggctgataaagaccaccttccaagctccccaggctggagccttccgtaaagctagccatgcacagctcagtcttgctgtagtttgcatgctcacagcagattcccttcttcgagaagtctctgcaaatcaggcccagacagactccaatgcctattcatctaaagttcactaggcaatgtgcctagtgtcatttgagcaagctgcttggcagccaatttttttttttttttttaatgataagattgcccaggctttcaaatcccattatgaaactttttatcctttaatcagagctttaaaaaaaaaattgacattttagtttgatggaaagagatgttgaggagaaatatttggaaaattgctctgtggggccagatgatgcagtgagtcacaatcactgaacatattttggggggaggaggtctgtggttgtccccattctttcctgtcccagagctcttaatgcctggaagtcattggctagtaaggaaatcaatcctaccatggatagaaagaaggcagaactaataattcccaggacagttctgagattcattagaagagttattaggaagagaggcccacccaggccctgccttagggccctctccacccttagtgacagaaaacaaggaggcccctagctatgtcctgtgttgcattccaaaccctgcattgatgcagcttgtctgttattggaaacagttaccagccaacagcagagtgttatgcctgctgcttcactatagccacacataacttcagggctgcaacatgatctgcttcacacagagggaagggagtatacagtacattatacgtacccaaagtcaaagcaggggactggagattggctttaagagaaacagttacatatttccatgaacattctctgagctgctctcagctgttggattttctcacatccacttatctagagaaagctttaggtgataccacggcatggcaccctcgtcccctcaaaagttcacacacatttgactcactgggagaagtgggtgtaggaccctggggtatttaacctcatgagaacaagagagttacttttcatcacagctgagacctggcatctagtgtgatgcctggcacatagtaggaatgaatgaatatagatggcacacaatcactgaatgagccgtccctccctccccaacctcttcctctccctctctcccccatcccactgcctcccaccttcatttcttcaaaaggggggacaaaatcagagtataagttctgatcatgaaacagaaacagttaatgttaagtgactaagagataaaagcagtgttgcgttagttaagaatatgaatttggggactggcgcagtggctcacgtctgtaatcctagcactttgggaggctgggccaggcggttcacgaggtcaggagttcgagaccagtctgaccnnnnnnnnnnnnnnnnnnnnnnnnnnnnnnnnnnnnnnnnnnnnnnnnnnnnnnnnnnnnnnnnnnnnnnnnnnnnnnnnnnnnnnnnnnnnnnnnnnnnnnnnnnnnnnnnnnnnnnnnnnngtttctgagatcacaccactgcactccagcctgggcaacaga

SEQ ID NO: 6756 - DNA, 714 bp, Macaca Fascicularis
  misc_feature (1)...(714): n = A,T,C or G
gatgtaggcactcggtgtatattatagaaatagggacggaaaattatctcacaaaaaattgttgaggaaacagtattaaaaagggacatagcctttcaaatacttgaagacagtgatttccaagagannnnnnnnnnnnnnnnnntcacacttggggaggttaaaaaaatacnnnnnnnnnnnnnnnnntcccaagtattgtgttgtaattagcctggagtgtagcctaaattatttaagattccctaggtgattctaatgtacagacaagtctgggaaccaatatttgaggagtttattggaaaaagaggttgaatttattttatgaaatcccagaacggaaaacttggaccaaataagagaaattggagaagccagttgcggtgtctcgtgcccgtaatcccagtcattcaggaagctgaggtgggaggatcgcgtgagcccaggagttcacagctgcagagagctgtgactgtgccacatctcttaaaaattaaaattaaagccaggcgtgnnnnnnnnnnnnnnnnnnnnnnnnnnnnnnnnnnnnnnnnnnnnnnnnnnnnnnnnnnnnnnnnnnnnnnnnnnnnnnnnnnnnnnnnnnnnnnnnnnnnnnnnnnnnnnnnnnnnnnnnnnnnnnnnnnnnnnnnnnnnnnnnnnnnnnnnnnnnnnnnnnnnnnnnnnnnnnnnnnnggttcacttgaacccgggagg

SEQ ID NO: 6757 - DNA, 687 bp, Macaca Fascicularis
  misc_feature (1)...(687): n = A,T,C or G
tcaggatcccgcctcggagctccctgccccgggtagagggggagggagttgggagaagcccagccgttccccctcgagacccctcccatgtcccctcctggcctggccggaaccccacctcgtgcctttatccgccctgtcccttcctctttgcgcatctcacccgcccggctggcccccgccccccgccccccgcctttgaatcccaggacggaggaggacccccgcaccgccccctccccagggtgtaagtggnnctgctattgtgctttnntgganntggggacccccttgtccctcctccctcccctgttgtctggccgtcgtcaaccccaccttgactgagtgttgagcccgtccttgggctctggccctgcggggcaggctctctcgggcccacggggcagacgatgcataccaatttgccctgcaccgcctgtcccggagacggagcccgaaggcctgccatggcggctgtgtcgaggatgcgtggctcctgccgtggcgggagagtgtgggcaggatcattactgcccccaacccgggcccctggacaggtcagcgcgccctgccccggtgcccaccgctgccccccatccgccctcctgccacttcccgccgactcccctgccgtgcctcccgcagccctcccatgccgttctactccctgcctctgagccgaacatg

SEQ ID NO: 6758 - DNA, 769 bp, Macaca Fascicularis
  misc_feature (1)...(769): n = A,T,C or G
aagatgaaggcaatcagaaaccaagagcttcctgcctcgctgcctgttcttcccaagccccctgtggaatgtggtgacctagtcagctggaannnnnnnnnnnnngaccctggcaactnnnnnnnnnnnnnnnnnnnnnnnnnnnnnnnnnnnnnnnnnnnnnnnnnnnccgggaggagctacagcttcatgaccataacatgtgacctatgtgctggcagcatgactcactgaggctgcgccactgggacccctccctacatgcaccgatgcactctctcccctctccatcaccccatgaaaccctcctgtcactttccttcagagacaccgctttggagaatattcccagcgctatccttgcttgtgacaagtgaaacaaactccttttgatcaaaactcatgttcttgtggagtcatctgttacccaccaggcaaacaaaccctggttttttcagggaacagagaccctnnnnnnnnnnnnnnncctggccagagcagagcatggggaagtatgagttcccagggggtacctgctgcacgtcaggccctgtgctaggagcaaggggtcctgtggtgactcagacnnnnnnnnnncctcnnnnnnnnnnnnnnnnnnnnnnnnnnnnnnnnnnnnnnnnnnnnnnnnnnnnnnnnnnnnnnnnnnnnnnnnnnnnngctacacggcactgtttgtcccataggcatctaaaaccctccagaactaaaacaccgccacagtattttcttccttttaaagaataaaatt

SEQ ID NO: 6759 - DNA, 774 bp, Macaca Fascicularis
  misc_feature (1)...(774): n = A,T,C or G
cacaatacccnnnacatagtagacattcaatatttatggaatgaatacattgtaacctagctcaccaccaaaaataattctaaatacttaaaatgtagggactatgtattggacttttgtaacattccttcacatattgccatagagagagaaacatgctggcttcagaacaagactgacccaaatccccaaattctcaattatttgagtaaatcccagtaattttctctctgagcctcaacctccctatatgtataaaataagcatagtaatacccattatgatggataatcttatatgtcaactatggtgcccagttgtttgttcaaacaccaatatagatgctgctgtgaaggtatttagatgtgattaacatttaaattagtaggattttgagtaaagcagattaccctccataaagcaagtaggcctcatgtaatcagttggccttcagagaaaagaccgaggtttccagaaagaaaagtaattctgcctcaagactgcaacgtagaaaccctgcttgagtttccaatctgcagattcagctctcaagattgcaatatcaactcttctctgaatttctagcctgttgacctgctctatagattccagacctcccagcccacataactgtataagccaattccttaaaatctctctctgtgtatgtacatgtgtgcgtttaattacatatatacaatactatattattttctctgaaaaaccnnnnnnnnnnnnnnnactttacttgaagttaggattaaatgatgtaat

SEQ ID NO: 6760 - DNA, 740 bp, Macaca Fascicularis
  misc_feature (1)...(740): n = A,T,C or G
tacattgcaaaattactaaaaatatagaannnctgactagaattgtgtgaactgtaagctataatgtgtaaccttagttattataacaaagccaacagcatttatagtcttactgtacataattttcttggtggagatagttttagagaatatgccaaggaagttttgaagtattaattaattatccttagcttgtattagtatcagtttctgcaagatgtggagaatgaagtaaattccataaagcagattaatttgttctgacatatttactttgtgtgaactccttttgacaagtacttctcgaactgcaactccaaacgttatttgaactgttagcagatatatatttacatatatattttgttttggctcagctgaaagtttattctgctagagctagaggtattttctttattctgctgaagcaatgcagtgacttattaaattataaggtagtttgctttttaaatgttttaaatcaattactagtccacatttaagaatttctattatagtgacaatgttaattactgctttattatggttttcttaatgacagtaatctataattaaactgtcacagtgaggtatttaccattatagtattaatataatgttcttaaatgtttgcataatggtatgtaagatgaataagcacattttctttggggcagagcccatgttatatttcattgaaatgttcaaaagtactattcagcaagctttgttcacatctt

SEQ ID NO: 6761 - DNA, 747 bp, Macaca Fascicularis
  misc_feature (1)...(747): n = A,T,C or G
tcatgaagcatcatgaaaatagcaggagcatgttgatttcttggttaggttgcattacaataacaagagtcagaaaattaattcaaaacaacttgcagtatgcatttcttcacaccagtacattcttaagtgtacttgtttataaggaataacaaactaatctgtacctttatatatatgtgtgtgtacatatatacatatataaactgtatagtgtacatggtaatgatttattgctatgccccagatccttaatgtagttctcatcctccgcatgnnnnnnnnnnnnnnnnnnnnnnnnnnnnnnnnntgatgatttggcccacctcctgtgtttggacctctagggaggaggttttggttatattctccttttccttgtgcacagnnnnnnnnnnnnnnnnnnnnnnnnnnnnnnnnnnncctctctcttgttccctttctgagcatgtggtccttccccaagctgtgggacagctgccttcctannnnnnnnnnnnnnnntattaagatcattactgcatgtgccctaaaaacccaagttttctattcccttgggacagaaaattgcatgtgaggtgggataatcgagtttcagtgacccacatcacttacacattaaagccaggccccataataaaattccacaaaatggaaataaaactcaaatttctttagcattgtgtaaataaatctgaatgtgtttaactttgtactggtaattttctgtatatttggaatatttgg

SEQ ID NO: 6762 - DNA, 676 bp, Macaca Fascicularis
  misc_feature (1)...(676): n = A,T,C or G
atatagatcaaaagctttgtaactacaggaaaaaatnaactcaccnnnnnnntaaagaatagaatagctggccnntnncatgggaattgggctgtatgtatattgttcttcctccttagaatttagagatacgagagctcttagaacttttcatggatacaatttnnnnnnnnnnnnnnnnnnnnncgtaaagctgttgggaaagaatttccaaactcaggaagtttacagagaacagacagctagagataactcgggaaccagagttggtcgacagatgttagatgtatcctagcttttagctacaaaccactcaaaagattctgtccccagatcccacagtcagaactggttctgggtggttgggaaggcagtggtgggctgggaaggaagccactgctgtggttcagagggggtgggcnnnnnnnnnnnnnnngggtaaaactccttccgccccnnnnnnnntcttctcttaaggagagattgttctcaccaaccctctgccttcatgctgccttcaaaagtagatcatgtttgccttgcttagagaattactgcaaatcagccccagtgcttggcgatgcatttagagatttctaggccctcagggttttgtagagtgtgagccctggtgggcagggttgggggtctgtcttctgctggatgctgcttgtaa

SEQ ID NO: 6763 - DNA, 794 bp, Macaca Fascicularis
  misc_feature (1)...(794): n = A,T,C or G
gttatttgttttattatagcaattattcctaattaaagcagtatttaatgcaatttccagttatttctttggagaatttgatgtcattgttgcattaccttgaatgttggaaagatgtggtgcgtgttgcttgttcatcacaaaaatcagtaagcacaataaagtggatgccaaaccatcaaacacataggtgttcccgctgtgtccctggatatggaataagcaggtataaaaaatattttaattatagttttgttataaatataacttatgggaaaaaaatttgataggaataatactgtatattactaatttttaactatccctacggcaaaccttatgactcacagaattttctcatatnnnnnnnnnnnnnnnnnnnnnnnnnntgattggctcaagtacagtaagttacttctcagtagaactctcaagtctgagtcctatctgtagctctgcttttggctgtacattcctaggatcggggctgcttatgcctttcgtttatccttggggtttgagagcactgtatttgggagagagtttaaaaatacattagaagagggaaaccattaaaagtttccactgtcagagattattgtaggtgctaatactggatttcgtctttcagatttaatttcttttatgggtctgttagtcattcagcaaatcccgtaagtatgtttaatattttaattgtgtaaaactcatttgttactttacagcctgtaatagtgtgtctgccttttcaacccatttgcaataactttgctgaaatataacacattaaaaaa

SEQ ID NO: 6764 - DNA, 402 bp, Macaca Fascicularis
  misc_feature (1)...(402): n = A,T,C or G
gatgacgtatgcctcccactctctgcaaggttttactcatttttatattcatttatgcatcattcattcattcaccatgtattctttcacctaactttcatgaaacacctgcaccatcccaggccctgtaccgagcaacnngaatacaaagatgagacaaaacattgtcccgtgctcccgggggctcacatcccaatgggaacaaccagactcataaactaacaattgaagcaggcgccaaaggctatgacatacgtgnnnnnnnnnnnnnnnggaagtcggagggagcaccaccattcatccaagggtcagaggaggtttcaaggaaaaggtnnnnnnngagnnnnnnnnnnnnnnnnnnnnnnnnnnnnnnnnngcngacaatgcaaggaagggtgttgc

SEQ ID NO: 6765 - DNA, 770 bp, Macaca Fascicularis
  misc_feature (1)...(770): n = A,T,C or G
gaggcagccaaagcagtggcagtgactnggtggagagtgtgtgtccnnnnnnagnnnnnnnnnngctggcttggccccccgaggaacacgctcgggccaccgtggagcgggatctccgcattggccggcgcttccgggaacagcccctgctctttgnnnnnnnnnnnnnngtagnnnnnnnnnnnnnnnnnctgtgctactgttccgtgctgcttcgggggctgctggccgccctcttgggccattgggaagcctctcgccaccctgacacgacccactccccctggcacctggaggcatcctgcacctnnnnnnnnnnnnnnnctgagggaagtctcctgcctccggccctgggtaatnnnnnnnnagtatttagccaactggcacctttcgaggtgcgtctgctgctgcttagtgtctggggatttctccgggagcatgggccgttgcctcagaagttcatcttccaatcagagcgaggtcgcttcatccgggacttctccagggagggtggaggtgagggtggaccccatctggctgtgctgcacagtgtcctccaccgcannnnnnnnnnnnnnngtcttttctctggccgtttccaggcaccttcaccgtccactcttcttcgacaagggacgtagccttttcttgctctggaagcccagggaggttgagcagtgagagagggaagggactaacgtgcgacggcagggtggaggttctaagtccttggcctaaggagcgctgtcacttttttctctcccactttt

SEQ ID NO: 6766 - DNA, 705 bp, Macaca Fascicularis
acttctctgtattcttcctcatacttgcctacccccaaattaatatcaatcctaaagaatggtttgcgtgggcttcgttttattttgttttctttcttttaagctctccaaagccttggctatcttccacctgtgcattcgttctagggaaagctgttggtgctattggtatcaggcacttaattatctaaagacttttgaagatcagtagaatttaaatatttctataaaagaagcctgtgtaactggattcctagaataagtattctagaaagaattttctggaaagaaaattggtttgattcagtctctgaaagaaaatgcctttgcgtttgtaggtatctatattggtgaaagcctttcaatatgtagattgcttgaagagtacgatcagccttccatatccgtgggttccacatctgtggattcaacctactgcagactgaaaatatttgggtagctggggttggtggcccacgcctgtaattccaacaatttgggagggtgaggcaggagggtcgcttgagcccaggagtttttgaccagtgtgggcaacagtgagagcctgtgtctatagaaaagagaaaaaagttagctggatgtggtggcccacacctgtagtcccagctattagggaggcagaggtgggaggctcacttgagcccagaaattcaaagctgcagtgagccatgattatgccatgca

SEQ ID NO: 6767 - DNA, 714 bp, Macaca Fascicularis
  misc_feature (1)...(714): n = A,T,C or G
gacagctgtanncatgtnnnnnnnnnnnnnnnnnnnnnnnngctgctgtgagatgcagtctctggaggtccctcttcaacacatggcctcctttccaggggtaggggacacagcnnnnnnnaggagggtggcagggcacacctggcccacccctcatgcctggcagtggctgtccctgtcctccagacgtgtcttcgtggatcgtgtatcccagcggcaaggtgtatgtggcagcagtgcgcctggagcgtgtggtgctgacctgtgagctatgccggccctgggcggaggtgcgctggaccaagaatggagaggaggtggtggagagccccnnnnnnnnnnnnnnnnnngaagacactgtccgccgcctggtgctgccttctgtccagctcgaggactccggcgagtacttgtgtgaaatcgacgatgagtcggcctccttcannnnnnnnnnnnnnnnnnnnnnnnnnnnnnnnnnnnnnnnnaataacaatccggagttatgcgtcctcttgaaaaagccgaagacccggcggctctggtcccgcttcccccaatggcgacgaacannnnnnnnnnnnnnnnnnnnnnnnnnnnagtttggggcccacattcttccttcccaccgccctgccattgctttttgcctttccccagactgcttcagccactaacctaacctggcccctgtgggcatttgagtttgcgacccct

SEQ ID NO: 6768 - DNA, 742 bp, Macaca Fascicularis
  misc_feature (1)...(742): n = A,T,C or G
cagtatgactgggagtggtactgaattggattcagagggcagtggctgcnccttctgaactggggtgaggtcagctcctccttagccccctttagtagccacagtttggctcagttcgtcgctctgctgaagtcgggggctgcttagttagggggacttctagcctcttgggacccctgggcaggagaaacctggtaggccatctgacgttttcagagcctggactttggagccaggccatgtttccaacctcctgagcctcagtttcaccatctgtccattggggctaaagtcgtacctgcccttgcctgcaccccagggtcttgaggatatactctcctgtggttgtaaaagtctgattgtgccaggtctgtctgctgttctgtcctccctgtcctggcttgagaggcagcgagagttttccagggcgcctggagccccagcacctcccaccagcttggtctgggctgggagtttcagacagaatttctccctcagagctccaagcccagagtcccctgcctggccccacgcccttggtcctcacccagtcctcacgcactgctgacatggaatgatggggatgggggtgggggggcggacaggcagggggcaggattgggcacctgggtggcctacctcctcccatgccctggtgaggcttggctcctaaacccctccaagctctcctcgtggtattttacaatttcctgaagagcccatgagactctcattctgtggg

SEQ ID NO: 6769 - DNA, 592 bp, Macaca Fascicularis
agtgcagtggcatgatcatggctcactgcagcctcaaactcctgggctcaggtgatctcctgcctcagcctcccaagtagctggaactataggcatgtgctatcatgcccagcttggtcccatgaccttttaaaaaatatgttctttagtaataaaaagtcttataatcactttaagtcagaacacaggctcaattcactatccaaaatgctcattcccatgtgagaaccaaaactccgaaagtgatttacagtcaagacttcttcagcacaggcctctagtagaccagtagcctactgagggagaaagatgttggcagctggcgggtgtcttctctagcgtcttgccttctgctgctgctcctcatctttgagcatgctaaccatggttcctcacatctccagggattggcttgcaaagcaaggacacggcgcaggagtgctgaatacgggctggaaggccgctgactctaccctccgctcataggccggctgggcggcgctgaccagcagctaggccccgtcttccctaggaacggccccggggccctgggagggtacgaatgtcttcttgcagtgaggcctctgaaccc

SEQ ID NO: 6770 - DNA, 728 bp, Macaca Fascicularis
  misc_feature (1)...(728): n = A,T,C or G
ctaggtaccttgtgaattccagaaaaagagactgtgcctcatgattgttagtcccatgaacttgcactatctttcatggcgatgttttgaaaatacaatcaggaaaaaacccaacacctttggaatttaaaatagaatcatatcatgaaatttaaaaagaatctctttggtcgcgtttcctcacctctaagtaacagctacatttaagtaaaatgcaggtggtagggaaaaaaaccatggccagatggtggtttagtggaataaactgattattggtcttttttttttttttaaagaaagaagcgtcatcacagatactttccaatttctcttttttacttttttgaaagattactttttaggaacatttggtatgatatgcataaaattatttatcaatttgtgggcaaaatgatacaagtagcatcttgattgaacatcatttacctcagatattcaaccagcagtacgttttttatgcagtctcaacccatatcccatttgttacctctcagaatattggtaagcagttattttcgctttactctgtatttcttgtgttttgggcacaggttattgtactactgtcaaatcgtacttgctattttttctgcaagtatttaacagaaagcttaaaatccccataaaaccaccacctaggataagtgcattgttaaatattgtacacacatcaaatgtatgctannnnnnnnnnatatcataccaaa

SEQ ID NO: 6771 - DNA, 746 bp, Macaca Fascicularis
  misc_feature (1)...(746): n = A,T,C or G
ttccaaagcagannnnnntatattccaagtgctatagagaactagggaaaannncngaagctaggtggtggatgaannnnnnnnnnnnnnnnnnnnnnnnnnnnnaggaggatttggctctccagaaggacctggaagaattggaagtcactttaggagactaannnnnnnnnnnnnnnnnnnnnnnnnnnnnnnnnnnnnnnnnnnggagggggggggggaaggcttttttccttagaccttgctgagatcaggaaaccacannnnnnnnnnnnnnnnnnnnnnnnnnnnnnnnnnnnnnncccccattagttaatttattnnnnnnnnnnnnnnnnnnnnnnnnnnnnnnnnnnnnnnnnnnttgggtttctgttattctctcccttgagtaatctcttgaaaaaaatcaagnnnnnnnnnnnnnnnnnnnnnnnnnnnnnnnnnnnnnnnnnnnnnnnnnnnnnnaacttcaaagctatagnnnnnnnnnnnnnnnnnngtcactttaatctttttcactgacgaataggcctcaatacatatagtcctaagatcatacnnnnnnnnnnnnnnnnnnngggatcagagtagcccataggcattgctttcttatcacctatnnnnnnnnnnnnnnnnnnnnnnnnnnnnnnnnnnnnnnnntgacttccagagtcctgttagcttttggaatgacagcagtggtatagggtttatgatgctataaaacaaacatgtctgaaaag

SEQ ID NO: 6772 - DNA, 718 bp, Macaca Fascicularis
  misc_feature (1)...(718): n = A,T,C or G
tgactnnncccagaagcaggtcctgcttgggccagggcctcccaggaccactctctggggacnnnnnnnnnnnnnnnnnnnnnnnnnnnnnnnnnnnnnnnnnnccagcgacctttccattgagccactcccccaggcgtctccctcaagtctctccaggaagggccctgcagcctcacgccagctcaggcccagcactccctgagggcagcacaggaactccaggctgaaattccacctgcgtttctttccttcctgactgtgagctccttgagagcagggactgtgccaaagtcacaaagcactcgcccctcacaagcccaacaaaacctttcagtaaatgacaagcgttatggttatcattagtgtcaacttgactgtattgaaggatacaaagtattgatcctggctgtgtctgtgagggtgctgccagnnnnnnnnnnnnnnnnnnnnngtggaactgggaaaggcagagccaccctcaatctgggtaggcacaatctaatcagnnnnnnnnnnnnnnnnnnnaaaagcaggcagaagaacgtggaaaactagactggcttagcctcaacctgcgtcgttctcccgtgctgggtgcctcctgccctcgaacactggactccaagttcttcagctttaggatttggactggcctcctttttcctcagcttnnnnnnnnnnnnnnnngggacctcaccttgtgaccgtgtgagtc

SEQ ID NO: 6773 - DNA, 722 bp, Macaca Fascicularis
  misc_feature (1)...(722): n = A,T,C or G
cagacggctttgaaggcaaaactgtggaatcctaacagatcaaattggatgaaatacataattacttggtagcataataaatatagaaagaatttacataaatgtctatattgaaggaagaataatttgaaagatttatgtcagtcttagannnnnnnnnnnnnnnnnnntaaatcactgtgacaacataaaagtcagagttcagttattttgtgttacttgtatccactcatgtttgtttaataataattgcattttctcagaaatattttggtgtcaaatgctatcttttatactacattaaaatagagttgtcagtcattgcatctgcccatacatcttctgagagaacctgcttccttccaccagccatacctaagacctgcacctaagtgaccatgtttgctcaaatgtcctcaccaccttggtctcaactaattaagccaaacagatgtacctcactcaaggataaccaatcatattttctctctctctcaaaaaaaaaaaattgaactgagaccaatgagtaagttnnnnnnnnnnnnnnnnnnnnnnnnnnnnnnnnnnnnnnnntgagctcttcagagatagttgggttcaccaccttcataagacctgcctctgtaccatttttccctggctgtgctttgtttaagtgtctgtataataaatcacacttttttaaagctcagatgaatannnnnnnnnnnnnnnnnncagat

SEQ ID NO: 6774 - DNA, 2636 bp, Macaca Fascicularis
agtgctggaagttttaacaagcggaggagacttcagacccgacaacagtccccttctaggtgcttccgtaacaccaaacatcaaaccagatgcaaacagattcattatctccatcccctaatcctgtgtcgcctgtgcctttgaataacccaacaagtgccccaagatatggaacagtgatccctaatcgcatctttgtaggaggaattgactttaagacaaatgaaagtgatttaagaaaatttttttcccagtatgggtctgtgaaagaagtgaagattgtaaatgacagagctggagtatccaaagggtatggtttcgtcacttttgaaacacaagaagatgcacaaaaaattttacaagaggctgaaaaacttaattacaaggataagaagctgaacattggtccagcaataagaaaacaacaagtagggatccctcgttctagtataatgccagcagctggaacaatgtatctaacaacttcaactggatatccttatacttaccataatggtgttgcttattttcatactccagaggtaacttctgtcccaccaccttggccttcacgttctgtatgtagctcccctgtgatggtagctcagcccatttatcagcaacctgcatatcactaccaggccaccgcacagtatttaccaggacagtggcagtggagtgttcctcagcctcctgcctcttctgctcccttcttatacctgcaaccttctgaggttatttattaaccagtggaaattgcacaggatggtggatgtgttcctcctccactgtctctgatggaaacttcagttccagagccttattctgatcatggagttcaagcaacatatcaccaggtttatgctccaagtgccatcagtatgcctgcgcctgtgatgcagcctgaaccaattaaaacagtgtggagcattcattattaagacaattgggcagctctagtccagctcaactgatttcttgtccaatgatccttgtgtggccgagatccagcttcaacgaaccagctagaagctgcgcgttgtgaaacttagtgttagttaatacctcaccatactcagttattccactataaactgtctaaatttgatgaaatttgccttttcagctgttctacaaaattatttaggtagatgtggcatgttggttttttatgtgctaatctaactgtaatgaccttttctacaacatgttttatccattccataaataataaccacattgggaatagtgaggtgtcttttattttctctgctttgtgttattttttcttaacaaactattagatgttatgtttcatattatttgatatttattttcatatttaggataagaatcatttttaattataatacttttaatactttcatatattttacaacagtatactatttaatcttaatgacttaattctatttttgctttgctgttttgtcatttaatatgcttttgtctaatttttcattcatttgttactgttactccttatttaattttgcgtctgccatggttttcagaatctgaatagtatttatacttcttttttttataacattttccaaatattagaaataccatcaacatgatcaatattcttgccttttcatgtaatttgaccatattaaattttttcttcaatgtttgagacaacattgaaatattcctataacataacttatttggtatcaaattttataaaatatggatccacctttggaattttgataaaagaagggttcatctctgacatgatcccataatattgactgaaattccaccaaattaatgttctttgaatgctttaatccttaaaccttttcttcttatatgcaaccaatatattcaattatatatgtgattaatttttaaaaggacaattgttttcataaaatgcaaaactattttttacaccaaaggaaaattttagatcctgattctaaataaaattttatagtaaaaattggaaaatagatgggagggggagtcattcattgttcaaaaggtacagaacaaatcataggggtttttaatctctaaaatttctacagtagtacaggaaatattcctctttacattcatttgcagttctttcactgacctcctaattttaggtggagggggcaggggagccataaaagttgatattcccctaataaatctatctctttcctctcctgtttcaaccccaaatgtatttcatgctcagcagcagaagaagaaataataggatatagatcacaaaggtttttccggtgagtcaaatagggtgttttcttttgaaaccgtaatgaatatgtttgccatcaaatggtttcatgagaacagtagaaccttatgaatgtatactagcatacaaggatctcaagtacattaattattctcagttttaggaatgtaaatagattaagtcccacaatgaaatttcaaaagtttttgttctgtaagtaaaaaattactaaccactgatgttcgagattttcttttaatagcactatccttgagaaccaaaaagtttatgttttgactttcaaatgttaaacaagatgctaaacaaatcctggactgttaataaaaattaatgatgtattattggataaggaaaaaaaaaaaaaaaaaaa

SEQ ID NO: 6775 - DNA, 748 bp, Macaca Fascicularis
  misc_feature (1)...(748): n = A,T,C or G
agctgtgcccctcccccaggggcgtgaggctgattggtgaaagacgggaggaaggatttcaatttctgactcaagaagcatttttggtttcagattttttttttcctgtaatgttaaactctttggctttaagtaaaaatccaaaaagtttttttaaaaaagcaaaggaagcatacttgtgaactaccttgctagctagccagccaaggataccggacacacctctgctccaaaggaaatccaaaaaagcaaacacaagaaatcaaaatccaaaatttgtcactgccaaagtatgtttttcactgttttacttgcccttgggtttgtttggatgtgggtctttttctcttctgtcctggttttgtttgtgggtgttgggatattggggtgcagagggttggtgcccagtgggtctttttctcttctgtcctggttttgtttgtgggtgtcgggatattagggtgcagagggttggtgcccggtgggtctttttctcttctgtcctggttttgtttgtgggtgtcgggatattggggtgcagagggttggtgcccagtgagaaacgagttttgttcccttccgcgtaggcgttggtgcgtccgccgcgtgtgcgcggtctgtgtgccgtcgccgcggcctgcgtctccatgtgtgtagggaaggacacgccgtctgtcctcacgccccctgtgacttttcatactttgtttttnnnncttgtggaaaaaagtgctaaagttttcttccc

SEQ ID NO: 6776 - DNA, 696 bp, Macaca Fascicularis
  misc_feature (1)...(696): n = A,T,C or G
ttgaaaggcattgtgggtctgtctttaaagtgnnnncaaaaaaaaaaattatataaaaaaaagtctagtgtcgactggtgttttccctcgtgatgtttacagcttgctgtttgctgcccagccataacccactcagtgacagacgaacacagccaagccctcgccgccagccttctgacggtgggcgagcacacagtctcttcccctgccccaactggccttctccaccaccaacttgtctactttgggtttggttttttttcttctatttttctggcttggttttttgctcttttctccccttgagaccctaatatcttgacttcattgccaaaaaacaacccatcgagaactttcttcccactgatcccatctctttttcccttctttcctcctggttccggtcagttcagaggatttaacaatcacaagtgtcctgcaaaaatgcctgaactttattcttaggcccttgtggattttttttcccagaaaacttaaacaaaaaaagacttactaagaaatatgtacagctacccctgttttcaggcactatgtttgagaacattttagccattgatgttcacacgtggcatcagcccatgcaagataggtttctgtatttatatattaaaatacaaaaaaaaaacttataaaatgtttaaaaaaatgttcaaagctggnannnagtcaagatat

SEQ ID NO: 6777 - DNA, 569 bp, Macaca Fascicularis
aggccccgtctctactaaaaatacaaaagaattagccgggtgtggttttgggcgcctgtagaatcccggctgcttgggaggctgaggcaagataattgttgaacctggaaggcggaggtttcggtgagagctgagattgcggcattgcactgcagtctgggcaaccaagagtgaaattctgtctcaaaaaaacaacttttatcagtgtttacaaaaagaaagtcttctgggatttatagttcaatttagggagaaatgacattttaacaattctgagttttccaattgtgaacatggtgtactgtcccatttatttagatctctggatttctctcagtttgcagctctcacacattttgttaaattcatgtatttaatatttctgcatgctatcgcaagtgagaaggttttttaaaagctattttctagttgttattgctggtgtatagaaatgcattagacttgtacattgatcttgtatcaagcaacctagatcagttaacttattagttctagtagcttttttctagattctttagcattttctatgtagataatcatgtcatctg

SEQ ID NO: 6778 - DNA, 638 bp, Macaca Fascicularis
  misc_feature (1)...(638): n = A,T,C or G
ggtgtgtcagcaggcatggggtgagagnnngnnnnnnnnnnnnnnnngggtgcggggaccgagtgtgcctccttgatccttgacttgggccatgcaccccctctccctcacacacacacgagcacttctccaggatggtgccaggacaggtgtnnnntcagtcccctggttatgacctcaagtcccacttgggccctgcagccccgcctgtcttgtaacccctgccgcctcaagaccacacctggaagattcttcttccctttnnaggagaatcatcattgttgcttcatcacttctaagacattttgtagcacctggacaagttaaacagaatgtgctttcctccctggggtcttgctgtcccataggctctcacgagaatgccacaggggccgtgcggtgggccgtngggtatgaggaactcccaggggcttcagcccagacggcagcatctcacccttagcctatagcagggagtcctgaacttgtgcattcacaagccacctccacaattgttctaaccaaagacctcctgttctgttctttcacttaaatcaacatgctattttgttttcactcacttctgactttagtcttgtgatgagccatgtatcatgcagtcatgttcacgtgctagt

SEQ ID NO: 6779 - DNA, 1567 bp, Macaca Fascicularis
atctccttaagccaaacacttgtactcatgcactcatttttaaataatgccttttctagtgtctatttacctctcagcattgattctttacaattcggggcttccataatctcttgatgtgatctagagctctagtgtcaaattcagatattgggctttcttagtttggtccacccactactcatgaaattcatgtatccatctgtagtatatctctatgtggtatttataatattaaagtaaagagcttgatattttagcaaaagatggacttttaaatgttataattttccatcaaaatcttgtcccaagttttttagtttgctataaaaaataaaattgattagtcataataaagaaggtcatagagagaaggcaaaaaacttggaaaaatgaaaaaggttgtttttctcactttgctctgtggagtctgagttagttgcagagtatcctatccgtatcagaaagagagatatttgaaagttttctaaattgagaagattgaagaaaacggtaaaaaaaaatacacaaaatttgaaagaattaaagaagactatgttgactttagtataccatttttttgccccattgaattacaacttcacatgcacttaaaaaaaataaactggacaatttttaagactctgtggatcatcatttgttatagatgatagatagtatcgtctcttaggaatgacaatagctgtgaaaaccaatgttccagacatcgattttagtttatgagtatttattccatcagggagaagctggagattattgattttgacatgtggagagggagaagggaagatcactaacagacaaaagattaataaaaattagaagacttgctgagaaatcaggaatattctctagaaagatgatcagatttaaggaaatttttctctcaagtataagagcagcagtatgaaaaatataaaaagtaaattacacttatggtatctgtgaaaattttaactgtaacatttgagcataataggtgctgattagacatcaaatttatctgcagaagtatttgcccagactgtacccaaattaatttatgtatacacttttaaaattcaaaggatttctaagaagaaagtatataatttaccttttaatttttgtataaaaccataaaaactgtcaagtgaatcaggaaagtgttagatcatagagaattgaggtcactaaagctaaggttattttcaccttttaatttcctgacaggtctctggctcaaggatcaaaaactgacatgaaacattagtgtgtttaaattaatgttcccaatataccccagcaatttctataagagaagcatttttggataccagattaaagttatttaaactagtatttagataatgggttttttttttaacttacagctaaacaatagaaatctcaaagtaaatccagatttaaggattcttttagtgattacaagcaagaaactttttatgtcttaataagggaggtgatattaactttaatagtatatcccccatgctttctttaaaaaagaataaattaaagttaaggagaaaaaaaaaaaaaaaaa

SEQ ID NO: 6780 - DNA, 723 bp, Macaca Fascicularis
  misc_feature (1)...(723): n = A,T,C or G
gtcatataataatagtttgnnnnnnnnnnnnnnnnnnnnnnnnnaggcaaccaaagctgtgcagttctccttcctcaggtatnnnnnnnnnnnnnnnnnnnnnnnnnnnnnnntaattgggaagaaactaccagtctttccaannnnnnnnnnnnnnnnnnnnnnnnnnnnnnnnnnnnnnnnnnnnnnnnnnnnnnnnnnnnnnnnnnnnnnnnnnnngcatggagaaaagaagaaacgctcgcgagaggatgctggagataatgatgatacagagggcgctattggtgtcaggaacaaggtggctggaggaaannnnnnnnnnnnnnnnnnnnnnnnnnnnnnnnnnnnnnnnnnnnnnnnnnnnnnttctgtgaaagagaactggagaatgaaaccnnnnnnnnnnnnnnnnnnnnnnnnnnnnnnnnnnnnnnnnnnnnnnnnnnnnnnnnnnnnnnnnnnnnnnnnnnnnnccattctgggttggagtttacnnnnnnnnnnnnnnnnnnnnnnnnnnnnnnnnnnnnnnactgttttttnnnnnnnnnctcttnnnnnnnnnnnnnnnnnnnnnnnnnnnnnnnnnnnnnnnnnnnnnnnnnnnnnnnnnnnnnnnnnnnagtcgnnnnnnnnnnnnnnnnnnnnnnnnnnnnnnnnnnnnnnnnnnnnnnnnnnnnnnnnnnncaaatgatatttaagccatcttggcttgtactt

SEQ ID NO: 6781 - DNA, 776 bp, Macaca Fascicularis
  misc_feature (1)...(776): n = A,T,C or G
gcttaacagcctnnnagattcgggacaggggtgcgtnnnagccaaattggtgagcctgggagaggacacttctcaaatgagagtcatgtcnnnnaacagggatccccaaaaaagaggaaataattttacagagcaaatgatattccacagtaccaatcactcatcatgtttaaaaactgcatatgtaattctctttccatgtatccatcttggaagaatactgtttctgaaaaacatctcagaaaagagaaactttagaaccaatacaatatacaggctttaatttctgcttctctgtagttgtgcctgtaggtctctattttttattcaggccaaagattatgagaattaggagcataaattatatttttaaaatttgttacagtacagagggatctccttattcaacggtggctaaaactgcccccttgttgacagtgtccacagaggccagaaacaactccgcttgttatgataactttgnnnnnnnnnnnnnnnnnnnnnnnnngtcccagcacttggagacgctgaggcagacagattgccctgagctcaggagtttgagaccagcccgggcaacatggtggaaccgcgtctctacaaaaaannnnnnnnnnnnnnnnnnnnnnnnnnnnnnnnnnnnnnnnnnnnnnnnnnnnnnnnnnnnnnnnnnnnnnnnnnnnnnnnnnnnnnnnnnnnnnnnnnnnnngttgcagtgatnnnngatcacatcactgcactccagcttgggcaacccccagtctttctctctccca

SEQ ID NO: 6782 - DNA, 760 bp, Macaca Fascicularis
  misc_feature (1)...(760): n = A,T,C or G
aagaatcaagttcctatggtcccagcacctgtcaaggatgaaggtcccatggtctcagcacctgtcaaggatcaaggtcccatggtcccagcacctgtcaaggatcaaggtcccatggtctcagcacctgtcaaggatcaaggtcccatagtcccagagcatccgaaggatgaaagtgccatggccacagcacccataaagaatcaaggttccatggtctctgagcctgtaaagaatcaaggtttagtgatctcagggccagttaaggnnnnnnnnnnnnnnnnnnnnnnnnnnccaaaggttcacgattctgcagttgtggcacctgtaaagaatcaaggtcctgtagcccctgagtctgtgaagaatcaagaccccattctcccagtactagtgaaggatcaaggccccatggtcctgcagcctccaaagaatcaaagtcctatagtccctgaacctctgaagaataaagttcctataatcccagtgcctctgaaggatcaagattctctggtgccagcaccagcaaaggaccaaggtcctgcagtccctgaacctctgaagactcaaggtcccagggaccctcagctacctactgtctcacctctaccccgagtcatgatcccaactgccccccatacggaatacattgagagctccccttgacacaccaatgaaggagctgacagtgagagtgctcccctcccaggggcagtgaagacacatatttaatctgcatgaaacnnnnnnagtagcctgc

SEQ ID NO: 6783 - DNA, 792 bp, Macaca Fascicularis
acacacatagactgcaaaggaatacacacaatgcacaggtatacccatgtcacacaggatgtacagtcatcacaagggcacatccatttggcatatgtacagtctcaggttcatacttggacctggatattgacattgtgaaaggagaatgaatctcaggacccccaaatcattaagccaaggggaaagtcaagctaggaattgtgtcaggcaaacctgcctctcattttattcctaagagagataactacaaagataaaaataaactacttacctccctcacaattggtccacagggaaattccttgtgggcctcaagatctttaccttaagacggttgtgttgaatttcaccctgacaatgtaaactgatagcttatcttcacaggtgcagtacaatggccagatcgcaaagtcatccctctgctcacctgagacaaatgcatatctaattgcttcttctgccctattgtttatgcaaaaatgcagattcactgagccagactaaggcatcagtgtgactattcctttactccccactccatgtaaattgtgtagtcagtgaaagattgatcaaagacccaaaagaatgcagccttttgtctcttatctacctatgacctggaagccaccacttcgagttgtcccgcctttccagactgaaccagtgtaacatcttacaggtattgattgatgtctcatgtctccgcaaaatgtataaaatcaagctgtgcctcgaccacctttagcacgtgttgtcagaacctcctgaggctgtgtcatctcatgagtg

SEQ ID NO: 6784 - DNA, 704 bp, Macaca Fascicularis
ggagggtggacccaaggggaagactgaagctgggagctccaagggagggtggggcaaggaacctgggtgcgtgacgacaacgttggatcagctgagctgggggacaagaaaagggagtgggttgatagagacactcgggaagctgtgggaagctgaggcaagtgggttatggagctgcggggccgtggggtggggcagggagatggtggggactgccttgatataggaccagggaggaggagcaggtttgggaaagatgatatgcctggtggggaacttggtagatgtaggggccctgaggatgtccagggtgtggcattcaggaggctgcaggaaccctggtctgaggctgaagctgggaacagaaatgagggctttgtcagcagagacaggaactgacactgctggggttaagacgacctcttgtggggggtggttccaagtccccactatgggactttttttttttaaagagatggggtctcgctatattgcccaggctgatcccaaactggcctcaagtgatcctccctcctcagcctcctggattgctgggattacaggtgtgagccactgcccctggctagggactttccatatttaagggtgatgcaaagaaaaacccaacaaagactaaacaggaacagcagggagaggggcagggggaagaagaccaagcaattcagaccctaagagactcttgt

SEQ ID NO: 6785 - DNA, 722 bp, Macaca Fascicularis
  misc_feature (1)...(722): n = A,T,C or G
cagtcatnnnnnnnnnnnnnnnnnnnnnnnnnnnnnnnnnnnnnnnnnnnnnnnnnnnnnnnnnnnntccttgaggnnnnnnnnnnnnnnnnnnnnnnnnnatactgactcccagctctttagggaaacagtttccagtccctggtttaagggctgtgtggcaggaccccaggatcttggtcagattgttcctcnnnnnnnnnnnnnnntggccttcgctagtatgtctgcaaagtttgagtgctatggtgcctctcatgggggcattgagctctttcgtgctagatttcagggtatctgcctcatggtcatctgtctcaccaacagagaccctgtggccagattgaaacaagcaggaactgttggtctttggcagcagggataccttagagctgagctgacacccaccctgaggtggtcccatgacacccactgtctgggtcaaggttggggcagggctggtgtcctgaactgccgtgcgatgtagatcataatagccagcgggggagagggggctattactccccacatcgcggagggtgcctcactcccctgcgatggggatcttaatagccaattaatccccaccgcaatgtgtgtccattattagtagtctcttttttttcnnnnnnnnnnnnnnnnnnnnnnnngttgtgtgtacacagcctgcgattgnnnnnnnnnnaccacaatttgcacctctggatattaggaaccatatc

SEQ ID NO: 6786 - DNA, 155 bp, Macaca Fascicularis
ggccgaagactgagccttgagggcccgacacagatcctggataagaggccagccctccagggggaggggggccaccaggactcacctccctgttcatttagcatctccagatattggacagccagcatcctatcattcctagggagccagacctg

SEQ ID NO: 6787 - DNA, 625 bp, Macaca Fascicularis
  misc_feature (1)...(625): n = A,T,C or G
caannnnnnnnnnnnnnnnnnnnnnnnnnnnnnnnnnnnnnnnnnnnnnnnnnnnnnnnnnnnnnnnnnnnnnnnnnnnnnnnnnnnnnnnnnnnnnnnnnnnnnnnnnnnnnnnnnnnnnnnnnnnnnnnnnnnnnnnnnnnnnnnnnnnnnnnnctgacctcatgatccgccagtctcggcctcccaaagtgctgggattacaggcttgagtcaccgcgcccggcaaaaatctcatgttttaagaaagtttacaaatttgtgttgggctgcattcaaacctgtcttgggctgcattaggcccgtgggctagagttggacaagatgatttcaggttataaaaccagaagtacaattcaaacaaaaaaggagtaagtcatcattataaatattagcagatgagatactgctacatctctatttaaagtaaaataaaacagattttaaagttcctgaaaccacagtcatattttgacatttcacaaagaatggttctagtctactagagtacatttggctaagttgataacttagctaaagttgcttcaaagctaagtcacaagtaaacatatttatgtttaaaacatagaaataaataacttaagattcttatctaagcggtcag

SEQ ID NO: 6788 - DNA, 693 bp, Macaca Fascicularis
  misc_feature (1)...(693): n = A,T,C or G
gacagatgacttttgtacaaaatgagaaaaaaaaaaaccctgtacttttttttgttgttcttttgtgattaagggtatatacatttagtagtctttgttattaaaggaacctgctgataagtacaagtatgaccatctcattcagatgtttgttgttatgatgcaaatggatattggtttcaatagaagctggatccttaatactgcattttccaaattttgttttaatatttttgttaaagtagacatagctgaactcacatgaaatcttggaatttnnnnnnnnnnnnnnnnnnnnnnnnnnnaacaaagaaaccaaagctgagtattttaaggaatgaacatacctggaaatccttgctctcaaaacaaaacaatgtaatctnnnnnnnnnnnnnnnnnnntcagtgttctaatttttaaaaaattttatctgcatatttgcatcaaatatttatgtgcaaaatgtatgttttacctccttaaaatgcctaaaagttagttaatagttactttggtttaatctatacacaatgattaagtgcatttaatattggtaatttaatgaaaaccattccttgcccaatggatgtataaatttttgaaagaataagcagaattatataatatgaaatgctatgtaaagttttctatgtaaaaatattatgtataatactattaaaatatcccatg

SEQ ID NO: 6789 - DNA, 722 bp, Macaca Fascicularis
  misc_feature (1)...(722): n = A,T,C or G
gcatgacagnnnnttgtatctacacttatggctnnnaagctcttgtccggcgtccaggaaaaatgaggtcgcacgaacaaattgaagtaaggtatatacagggaattttattgccaatgaaagtaactctcaacaggaaagggagttgaaaaggggttggggcgggtaggtagtctacccgtgaagtgcagccgtctccagctggattcttctccaaagatatgctgtccctctgaagtcaagccgattctctctgatgtccagccctagtcccatctaccggctgagtctgagtttttataggcacaggatggggcaggacggtgccatgggtggtttaggaaaatgcaacattcaagggggaaaacagggatataagttctcactttgggctgcggtttcaggcttttgagcttgagggtggtgtttcaccaggtacctgcacttttctgcctagaatttctcttccccatgtcgctatcattatgactactactctaggcagaagcccaactctaagatggatactcggcctgtttcacttttctagcctccaactcacaaagaattaatcatatggtggtgattgttgcacaatgttatgaatgtacttaataatgctaaactatacagttaaaatgttaagaaggtaaatttacaacgtgtatcctgccacaataaaatggaaaaaaatcttaaaataataataataaataaataaa

SEQ ID NO: 6790 - DNA, 2319 bp, Macaca Fascicularis
atgcggaaaaatggcgggccgggctacttgagagccgcgggtctacctcctcctttcccgtcttcgtcgggagttcccgggcacgtgaggcagtgccacgtttgctggcgggtgggacggcctagccgggcggggccttggaggacgccgcggatccgtcagtttctgggcccttggaaatcggcgcgtggggggcggtgatcgagctgcgcgcgagagggcgggagagctcgcggggtgcgaggggagcgggacgcccggccgggcagcatgagtcagcagcggccggcaaggaagttgcccagtctcctcctggaccccgcggaggagacggttcgccgtcggtgccgagaccccatcaacgtggagggactgctgccatcaaaaataaggattaatttagaagataatgtacaatatgtgtccatgagaaaagctctaaaagtgaagagacctcgttttgatgtatcactggtttatttaactcgaaaatttatggatcttgtcagatctgctcctgggggtattcttgacttaaacaaggttgcaacgaaactgggagtccgcaagcggagagtgtatgacatcaccaatgtcttagatggaatcgacctcgttgaaaagaaatccaagaaccatattcgatggataggatctgatcttagcaattttggagcagttccccaacaaaagaagctgcaagaggaactttctgacttatcagcaatggaagatgctttggatgagttaattaaggattgtgctcagcagctgtttgagttaacagatgacgaagaaaatgaaagactagcatatgtgacctatcaagacattcatagcattcaggccttccatgaacagatcgtcattgcagttaaagctccagcagaaaccagattggatgttccagctcccagagaagactctatcacagtgcacataaggagcaccaacggacctatcgatgtctatttgtgtgaagtggagcagggtcagactggtagcaaaaggtctgaaggagtcggaacctcttcatctgagagcactcatgcagaaggccctgaagaagaagaaaatcctcagcaaagtgaagaattgcttgaagtaagcaactgatggcatttgagaatttgtgtattactgagtcttttgggaacatctttgtggagaattatgcgtcaaatttgattctcagagcaataaattatccatgaagtgctctcgttctcagtagcggcatcatggccagtagtgtctttgaggagttcgccacttagattactgagtaattgtggtttccacatttgaaaacaactccttttataattattcactgctttttgtcagtgaaatagacatcttgcctcctgaagtagtttcatcacagagtgtcatgaaaacagacagtcgggctgaaatggacagttctttgtggactctacccttcccttcaaggagtatgtcatatatcacagaagaaattgccttacactggttcatgtttgcagttactgttgtacattggatagatgtacacacgtatttaaatgtgatgtctttgtatatatctgtataatgtttcgattacttacaaaatacgtctgagtgacacttttccccttgtacagccaaaataatgtatatatggaaagtgacagacaaattctctaatttctttggtgtctataacttattagaatcctctggatgagggttagaagagagtttttccaaacttctacatgtagaagtatcataaatgtgctacacatttatgtttgtggatttaattaaagtattttaatatggttttcaatgctgaaattggagtcagatacttcttggttttaagctgtctacctacttgctgtctcccagcagcctggtggcatgcccagtgttttggggggcagggatagaagtgccatcaggaaatagctgaatccattgtgaaatatgaattcagtcatggtgatcattggaaactcttttaaggtttttgcaagtagattttgtaatgtttgtgtatgcagccttgctgttcagtcagtcaaagggattttacttacgacaagttgtaccttgccctctctccagctctactcccacattttcacgtacgtagctatttctacctcattgggtaagtcatttaccactctgtgcctcagtttactctgtagtttaccattagactgtgagctccttgagggactttgtcataatcactgttatatcccagtgcctcacaccatgcctgacccttaagaagtgctcaataaatgtttgttaaaaaaaaaaaaaaaaaaaaaaaaaaaa

SEQ ID NO: 6791 - DNA, 573 bp, Macaca Fascicularis
ccacttcaggcccgcaaagtgttgagattacaggtgtgagccaccatgctcagccgtgacatgattatttacagtgattgcttgtgatgaaaaaactcgatgatagggatcacttggattaggaaacaaaaagttgatggaagtgagaaaggcagtgttatgctaaagtggctggttagataaaacttgtgcattgggagaaaccatcaaaagaagtccttggcttcctcagtaagttaaatgtagacttagcatatgacctccacagttccacttgtaggtgtatacccaaaagagtggaatacaggttgccaggcacagtggctcacgtctgtaatcccagcacttggggggctcgaagctccctgtttcgcatgactccgactttctcgcgtctttccaccttttgctcctgagtccttgtgctggcaatcctcgagtttgtccctctgccgggatcactgtaaataatcatgtcacggctgagcatggtggctcacacctgtaatctcaacactttgcgggcctgaagtgggacgatcacatgacgccagaagttcaagatcagcctgg

SEQ ID NO: 6792 - DNA, 697 bp, Macaca Fascicularis
  misc_feature (1)...(697): n = A,T,C or G
ccccctgcccnnnaaatccagacnnnnntcccaaactagccccaggagcttggcgaacccgctcgctnctgaagagaaagacccaggacccttccccatcaccccccaagagaggttcgccatcctctggcctcgagcccttggtccgtccgtccgtctgtctgtcctcagggccccgccccccggtggcccttggggaccaaagcgtgggccgctctccaggagggcgggcaggggagggggtggtagggctgtgccattggggtgtccggaagcttctcagccagggtgggggtcgtggggttggggaggggggccagccgggctcccgagggtcagggcgcgacgagaaccaactctttacctaactttgcatggtgcttagtcaaggactcctgcgacctggctcccgaggtcagctggcggcgctgacacacatgcatggcagattatacctggctctatctccctccccctcgccccccctctgccccccacttcctctttaaaaaaaaaaaaaagatacaaaaaaaaaccttaaaaaaattccatgtttcctaatttgcacgaaattttctaccacaagatgtgccttgccttccgagaataagtattacctttaaacaatatcagcgcacacacatagctgcatgttctgctcgtgtagtttaaaaaaaaaaaaaagacaaaacagtga

SEQ ID NO: 6793 - DNA, 1259 bp, Macaca Fascicularis
agccgtatttccgctggcgcagagcaccagagagtcttgtggctgcggtttgcagactgctcttcgcccccctccgcgaggttacccctgtactcgccgccatccatcctgacgcccgggatgagtcactgagaggcagcgcccgaggcgtggtcttcccaagaacccccagtggcctcccaaggccggtgctgtgtacctccttcccgacaaaaggggaaactgaggccccgaggggagtgggaagagccggccggacgtcaggcccagcccctggtgcagtgctgcgtcccctccaccggggtgggcccctcaggattcgcgtgtcctcgggaaagagactggcgggcctcgtgggctgtgcggctctcctggagacagatgacagctctcccttggatgactttgctggttccgcaccagccacagcccccgtttttcccgcagcaccctgatctgcactccctgaggggctcccactgtccgcgcggtgagaatgtccctggatagtccactgtgtgcagaggcatgggagttgtcatgtcgggaacatgctagacctccgtgtccttgagcttgaagaaagatggcagagcactggcgaccaagcacttgcagcctcctgctctgtggcccctcctcactccagggatgccgccctgggtctggagactgttggaggaaaccccaggaggtgcaggcactgagcctctcgagacaatgacctggggtcccagcttccctggaggggtctcctcatggtaagtgaatgccaagaggttaagtcggcctgtgtttcccaggcagaaattccaagccgctggcttcatttgtcttctcttttagattgtttgagggttgatcacagaccaaaagtgatgagtgatgtcactccatgacgcatggctggaccttcttgcccctattgtctgagcacaacactaatcgacttttccctcagcgtgggtggagggtgggcagaggaaaagccctgtggctctggggacttgggatccagaggtgaagacctttcaactggctctgccctgccagtgccacagagtgccatggcccaggaagactggttttcttccatctaggccaggccatccagtggccatcctccgtgtcctcctgcctgttcctggtgtgacttctgaaaaccaagaatttgttcctgttgactttttctgtgctgtggaccattgtcctctcacgcactcaataaatcttgaaacatgaaaaaaaaaaaaaaaaaa

SEQ ID NO: 6794 - DNA, 711 bp, Macaca Fascicularis
  misc_feature (1)...(711): n = A,T,C or G
aataaaaaatcattttnnnnnnnnnnnntacatnggggnnnctagaaggnnnnnatttccannattttattcccgctatatctatgttaagatacaannataaggagagaagtgactttttcattgattaggcaagaagnnnnnnnnnnnnnnnnnnnnaataattaatgaaacatatttagnnnnnnnnnnnnnnnctgttttcaatataattattgatttcatttttctgtggaatatattggccntctacagctattacngaattaccgaaactggttttcttctggcagcaagaagcagtgccacctgagttccacatnnntactttctgtgtaaacagctggatcgattgtgacaaagaagatgcttccaatcaaatagaaaaccacctagatgagaaggctgtgatcctcgtgccctcagaggcacttccctcctaagtcaaagaccatcctcattgactgtgtgccaatgcctcgtttcaggcttgtgactcaacaannnggcttttccattgatagaagacannnnnnnnnnnnnnnnnnnnnnnnnnnnatagttacctgnnnnnnnnnnnnnnncaactgacttcnnnnnnnnnnnnnnnnnnnnnnnnntaagggagctacacatgtggtttattcttaagttacgtggataaactaacctctaacagaaatatactttggctaattttgaatatgtgtc

SEQ ID NO: 6795 - DNA, 736 bp, Macaca Fascicularis
  misc_feature (1)...(736): n = A,T,C or G
ggatccatgattctgctttggtccaatggcttcctctctgcagaggaacaaccctaaaaccagatcactccacacaggacaggcaggagagattcttcctaaagcctcccccataaaaagggannnnnnnnnnnnnnnnnntcagggcnnnnnnnnnnnnnnnnnnnnnnnnnnnntgcccagatgtnnnnnnnnnnnnnnnnnnnnnnnnnnnatggtatgagcttctagatgcgtgtggaannnnnnnnnnnnnnnnnnnnnnnttataaactccccatcatctgacatgcagaaatccagctttgtccagaatcctcctggaatttcttggannnnnnnnnnnnnnnngaattattgggtactgggaagactgggtacaagggtgaaaaatatctcccataatacacatggttgactatggtgatccaccttgtgatggttaatattaggtgtctggagaaggatgcttcattggccccgggacctctctctgcaggaggagagacccctgcctctcctctggattggtcccaggctctctattggnnnnnnnnnnnnnnnnnnnnnnnnnnnnnnnngagggggctaaagggactggatccaccaagacagttcacggcgnnnnnnnnnnnggaatgaaccactgaattcagggaatggcggttgggggggcggttctcgagatgtgtnnnnnnnnnnnnnnnnnnnnntatgggtccagcnnnnntccatc

SEQ ID NO: 6796 - DNA, 739 bp, Macaca Fascicularis
  misc_feature (1)...(739): n = A,T,C or G
ctgatgatgccttatcaaaggaaaacatggttgtatnngagacggaagttttactaaaagagttggagcaaatgctacagcaagcactgcaacccacagtcacacctgatgagtctgaagaaggatatggagaggaaataaatacgggagaaaagttatctaaatgcagcccagaagctcctgcaggcaatctgtttgaaaaccactgtgaagaggactatcttgtaattgatgggataaaattaaaagctggagaatgtattgaggatataactaataaatttaaagaaatagatgctttgatgtctgagttttagaatactatacatttttaagttaattataaaaatattggcatctttatatttatccgaagttaaaaccttaaaaatgtttggtgaaataagtataaattataccaaagtttatatttgcaataactttctacttcnnnnnnnnnnnnnnnnnnnnnnnnntagagccagtcaaatggtatttaagttagtgttaaaaatttagaattaaaaaaccctgatagttgtatttatatatttcttgtttgccttaatttttaaatgatttgtgaaattgcctcacaaacatnnnnnnnnnnnnnnnngtttaggccgtttattcaaaaatggataacttaaaatggctggccaagctattataaatctcagaggtaattcaaatctaatagacttagagaatgtatatttgtggtggaatcaaacta

SEQ ID NO: 6797 - DNA, 3513 bp, Macaca Fascicularis
aatgctgctgcctcccggagcagagggaggcagaagaggagggagggagaagaggggaagggagggggaggcggcacttgggctgcagctcgcaaccagaggcagtctctctcagctctcggagggaccgagagaggcaaccgctgagtaggatgctctgcggggcgcccagagccgggggcgcttgaagcagcttcggggactggggcaaccgggcagttttcaccatgcatcagtccctgactcagcagcggtccagcgacatgtccctgcccgattccatgggagcattcaatcggaggaaacgaaactccatctatgtcaccgtgactttgcttattgtgtccgtgctaattctcacagtgggccttgctgcaaccaccaggacccagaatgtgactgtaggaggttattacccaggagttattctcggctttggatcattccttggaatcatcggatcaaaccttattgaaaacaaaaggcagatgctggtggcttctatcgtgtttatcagctttggtgtgattgcagctttttgttgtgccatagttgacggggtctttgctgccagacacattgatctgaaaccactctatgctaaccggtgccattatgttcccaagacatcccagaaggaagctgaggaggtcataagttcctcaaccaaaaattctccttccacgagggttatgaggaaccttacccaggcagctagagaggttaactgccctcacctcagccgtgaattctgcacacctcgcatccggggcaacacctgcttctgctgtgacctctacaactgtggcaaccgggtggagatcactggtgggtactacgaatacatcgatgtcagcagttgccaagatatcatccacctctaccacctgctctggtctgccaccatcctcaacattgttggcctgttcctgggcatcatcactgccgctgtccttggaggctttaaggacatgaacccaactctcccagcaatgaactgctctgttgaaaatacccatccaacagtttcttactatgctcatccccaagtgacatcctacaatacctactaccatagccctcctcacctgccaccatattctgcttatgactttcagcattccagtgtctttccatcctcccctccctctggactttctgatgagccccagtctgcctctccctcacccagctacatgtggtcctcaagtgcaccgccccgttactctccaccctactatccaccttttgaaaagccaccaccttacagtccctaaagaggaatgcctgctggctattgagattattgtggcttttgtatttctgcttcagtggaagtgtgtagggttcaaaatttaaagtgtgacttttatgcataaagttttacaatggcctgccaggctagggaaagatagggatgaagcttattcattattagtgcagagcaggggtggctaggctgaacccagcacagaagaagggcagctcacactctctaagcaaggctggggagccagcccagcaagaagtttgtcgtgtttggacctgcattaccctatgctccacctctgtattcagcagaagtgtggttgccgtctgtttcactttatgtaaagaagtgttgtcctcaggcccttggcagattgccaccccagcacctaggttgaagcacccggcttataggtcctatctttccctaccactaaagtcagtccctaaggacaatttcccagctgatggggctacacagtagttccaatacagagagttctggctaagattttgtttgcttgtgtctggatgttgaaaaaggctgcccatatctcttactcctttcttctctgtattgtaaaaatggctgttgtgatcactcagctcagcttttgttattggtacctcctaaagggaaaagtgcaatattcttgcatcttgagtagtggggaacaggatgtattgttccggaaacactgaaatacacagcaacatgtgagatgctttaagtagatcacttaggagacagtggttctactacatgttgcattattacaaaatacatttgctacaggagatataaatcttatggttgtaattaagagtttaaaaatgttataaattaggttcttgggtcgtgatatgaattgttactaatctttgtgactatttaatcttcaagtattgtgcttaaccccagcaatccgcacgtatcctgcaccccaccccaaaagactgtattttaataccactggtcttactggtccttttttctgttgagaccagtcatgacagcattcaagattatgaaagtgttacaatgccgcttcaagtctgcaaaacctcaaacatagccaacttgacaaatacttaagtgttatggtagatttaaaatccatctggcacaccgtggtagattatttgtacagttcttttaattacacatagctttaaaccatcaacctgataagtttaaaacacttttgcacccatgccttcacttcagaatgaacaccttcattgtgatctcatgttaacctgagaattgatttaaaggaagattgataatcctaaactttataacgtaaaaaatacaggggctacaggacggtacctaattagacagttctccaaacacagaacacacactagaaaaatttccagccaatattgctacctcccaacttaatggattagaggtagcagacaaatgctggtgctcccatctaccttgtagacacccagccatcaagaatcaaggcacaagaagtgcactctcattattaacagtaaatgtttgcaagatatccagtttaactttcagcatcatgaatgttgtcttatccagattttgaatctaaaaaactataatccttttgtgttatacaaaattactatgattttttacagttctgagcatattaaaattctactggatttcaaagagactaatatccaattgacttactaaacaaataccaacttgtaatactcaatgaagttttttgccatttacacttgaccatttgctttagtgaatgtctatatttaattttttaaaggcaccattacacagtatatcctacatttatcacatttcttaaagtgttaagattctatggctcatttctatgtatttttcttactttacaaaataacctgaaacagtatagattttgtaacacttaatttgagcagcttttattacattgaattatataaagtgcatgttactttggaaaaattatttgctgctttactcttttgcaaaacatttgctgtaatgaagggatttgtatttccaatatgtatcttgactgcattttgtaatatttactgctttattcctaattctgctttaaagtattgaactgggcatgaaacattaaagtattaatccagaacctgtataaactggatgttgcttaaaatctgtatcactgccatgttgaaaactcagactgcttttgtgatgtttcaaatgaataaaactatcctcctccttaaaaaaaaaaaaaaaaa

SEQ ID NO: 6798 - DNA, 738 bp, Macaca Fascicularis
  misc_feature (1)...(738): n = A,T,C or G
tagactctgtttttttctttnnnntcattctgctggacaatcannnaaggaataaactggactgcatggaaatcaagactagaagagagggagtaagagccggagctatcctacctcaccagtgctttgtcttctgttgggataaactttgctaaaactaatgcatggttaagatgaagggcagaaggaagnnnnnnnnnnnnnnnnnnnnnnnnnnnnnnnnnncagtgttctgaagtaaatacagaacctcttcggttacccacctaccttaatatacagaccatgacaattctacgagttcctggaaacagaactcagaactcgtctccagagaaccctgatgcaaattctctgaaatggtagtcagtatnnnnnnnnnnnnnnnnnnnnnnnnnntcaacagctttcaacagatcttcaaagggttacttgatccaatgaagttaagaaccactgaagaagaaacctaaaaagaaaatccaggtcatgaactttgcaatttttattcacatacagagaagaggggaggaatctcttgtgtatgtttcacttaggtataccagtggttcttaataaagggcttttttgcccccnnnnnnnnnnnnnnnnnnnnnntttttggttgtcacacctagggggatgctactgggattcagtgagtagaggccagggacgctgctaaacatcttaaaacgaagtttgctatcactctaaggttttgcatgcgacttaaac

SEQ ID NO: 6799 - DNA, 632 bp, Macaca Fascicularis
tgttcagcatgtacgacaacaattccgattacagcctggtccaaaaatgctgttctgtgggttggcttcccagtttgagttttctttctggaatctgttcatggctttcatagcctctgttgatgtagaatccatttttgccatcacctgaataatctgtcctgtttgtgggaggccaggttgagtcttctgccagctgcttttgccaagtcctatattgacttttagaggagaatccaaattctcttttgatcaacagccagagctcatgattttgaaggatggcatcttgaaaaatcagatgcgaaagacaatcaatttattgcgcaggtgcccctgcagccaggccgctggccaccacacccgccccctttccccaggcctccctctgaggtgtgcttattgctgctgtatctacgtctccttttccaagtcctggaattcttcccttaagaagcaagagggtgcttgtgttcacataaatctgccaaaaacttcctttccacacatttcctggttaagtcctggctagggattttcttagaatgattttaccctcagactgaaatgataacagcagtaacgtgctcaaaatgaagaaaagaaaaatcaccattagccctgctacctgc

SEQ ID NO: 6800 - DNA, 732 bp, Macaca Fascicularis
  misc_feature (1)...(732): n = A,T,C or G
gcannnnnnnnnnnnnnnnnnnnnnnnnnnnnnnnnnagagnnnnnnnnnnnnnnnttgagtaaagtggtgnnnnnnnnnnnnnnnnnnnnnnntgctgtagggagaataatgtggcactggnnnnnnnnnnnnnnnnnnnnnnnnnnnnnnnnnnaggaatgagtaaggctgttcttgcagtaatgtaaaattgagaggaagagaggccctaaatgttagggtgtcagtaactgagaaagaaaaaatggtgggtagtcaggaaagaaaagatggtttttctgatatagtttatacttacataaaaaagcaaaacggttgtatttgatataatatgtatgccaatgacaggatatctattcaaaaaagttaagtatgaatctttaggatctgaacttctaaatgtttgcctagaggtcgtttactaatctccaactctgggaaatctcctttccttcaaagcaggaagaaagcttccagcctctctcaggatgcctgtaatcccaacactctgggaggccaaggcaggaggannnnnnnnnnnnnnnnntttgagacatgcctgggcaacatagcaagacactgttctctacaaaaacattaaaaaacaaacaaacaagaactaaccaagcatggtggtgcaagcctgtggtccaagctacttggtgggatgagctgggagaattgcttgaccctgggaggtcaaggctacaatgagccatgatcgcaccac

SEQ ID NO: 6801 - DNA, 430 bp, Macaca Fascicularis
  misc_feature (1)...(430): n = A,T,C or G
ctgcaatagatgcttatggcagagggtactggttgtcccccaatatccattctttcattcacatgtgttaatacacgctccagcttttgttgttttataaacagctgccaaacataaagacaacattttccatctccttgtatgtaagtggaaataggtaggactgtcatgtggggccagtttctttttctcttcctctgacctgctgcttgaaacatagatgctgctatcttagatcatgaagttgaggccatgcaaagtggagcaacaagaaggaggctgtgtccctgacgccataagcaccacacctgtcctgaattgctgtgaatgacacnnnnnnnnnnnnnnnnnttgtctcaatgtcctggacataaaagccataaatgtttgtcctatgcagcacaaaacctttgtatctttgccttttatg

SEQ ID NO: 6802 - DNA, 2453 bp, Macaca Fascicularis
ctaggggactgagggagggccggggcggtacgaagcgggggagggctgtgcgcgtaatggcagcgccgtggcctcgcgtccatctttaccgttctctcggacctgtcacaaaggagtcgcgccgccgccccctcgctccggtgggcccgggagctagagaaagtcagtgctgcagcccgaccgcgctgctctgagaagccccctgggcacgcggagcgggagggagtgtgagggttggaggcgactgtgagggagggttttccaccgaggcccgcgcttgaggaatccgaagaggttcctagaagagggtgttccctctttcgggggtcctcaccagaagaggttcttgggggtcgcccttctgaggaggctgaggctaacagggcccagaactgctattggatgaccagaattccctgtagttgataatgttgggaataagctctgcaactttctttggccttcagttgttaaaaacaaataggatgcaaattcctcaactccagattatgaaaacagtacttggaaaactgaaaactacctaaatgatcgtccttggttgggccgtgttcttagcgagcagaagccttggccagggtctgctgttgactctcgaagagcacatagcccacttcctaggaactagaggtgccactactaccatgggtaattcctgtatctgccgagatgacagtgggacagatgacagtgtcgacacccagcagcaacaggccgagaacagtgcagtacccactgctgacacaaggagccaaccacgggaccctgttcggcctccgaggaggggccgaggaccacatgagccaaggagaaagaaacaaaatgtggatgggctagtgttggacacactggcggtaatacggactcttgtagataatgatcaggaacctccctattcaatgataacattacatgaaatggcagaaacagatgaaggatggttggatgttgtccagtctttaattagagttattccactggaagatccactgggaccagctgttataacattgttattagatgaatgtccattgcccactaaagatgcactccagaaattgactgaaattctcaatttaaatggagaagtagcttgccaggactcaggccatcctgccaaacacaggaacacatctgcagtcctaggctgcttggctgagaaactagcaggtcctgcaagtataggtttactgagcccaggaatactggaatatttgctacagtgtctgaagttacagtcccaccccacagtcatgctttttgcacttatcgcactggaaaagtttgcacagacaagtgaaaataaattgactatttctgaatccagtattagtgaccggcttgtcacattggagtcctgggctaatgatcctgattatctgaaacgtcaagttggtttctgtgcccagtggagcttagacaatctctttttaaaagaaggtagacagctgacctatgagaaagtgaacttgagtagcattagggccatgctgaatagcaatgatgtcagcgaatacctgaagatctcacctcatggcttagaggctcgctgtgatgcctcctcttttgaaagtgtgcgttgcaccttttgtgtggatgctggggtatggtactatgaagtaacagtggtcacttctggtgtcatgcaaattggctgggccactcgagacagcaaattcctcaatcatgaaggctatggcattggggatgatgaatactcttgtgcgtatgatggctgccggcagctgatttggtacaatgccagaagtaagcctcacatacacccatgctggaaagaaggagatacagtaggatttctgttagacttgaatgaaaagcaaatgatcttctttttaaatggcaaccagctgcctcctgaaaagcaagtcttttcatctactatatctggattttttgctgcagctagtttcatgtcatatcaacaatgtgagttcaattttggagcaaaaccattcaaatacccaccatctatgaaatttagcacttttaatgactacgccttcctaacagctgaagaaaaaatcattttgccaaggcacagacgtcttgctctgttgaagcaagtcagtatccgagaaaactgctgttccctttgttgtgatgaggtagcagatacacaattgaagccatgtggacacagtgacctgtgcatggattgtgccttgcagctggagacctgcccattgtgtcgtaaagaaatagtatctagaatcagacagatttctcatatttcatgacacatgtgaagaggcatcgtggacttttttctactcaattccagccaatgttgaaaagaaaaagaaaaaaaactctctaatcagttgtacacatactgaaacttatagccatggccagattttatgctaaaaatggtagtttgtcaaagacaaaaaaaaaaaaaaaaaaaaaaaaaa

SEQ ID NO: 6803 - DNA, 800 bp, Macaca Fascicularis
  misc_feature (1)...(800): n = A,T,C or G
cagggacatagctgtaagctcatgagtgaggatgcnannnnnnttccagnnnngtgatcttatattctgtatatagtatgtgtctggagattttatattgtgtatatgtatgtgtgtatgagagagagagagagagagaggaaatgactgccgctcacttaagctcatgcagcacagactccaattagggtttgcactggcttccttgctgcttgtgcatgactcttcagctgccctcccatgtnnnnnnnnnnnnnnnnnnnnnnnnnnnaaagaggtagataaataagtctccttgggatcaatagcagaaggaactccaaggctgatggtnnnnnnnnnnnnnnnnnnnnnngaaagggaactggggtctccatggtgataagaggctggggaccaatgagagctgaaggcggagcaggacttgtggggaagactcatgggagttgggagtcatttaactatttgtttgcttcttgaaaatttagacaccagctgtaactacattgcacaggatgtattgatattatcattcttgctgacatattctggaagctttcagccccaccaacactgccccgcccaggacttctgcagctgagagttcctgtgtcagtagggtctgatatttgtacataggttatacatatatgtgtacatatgtgcctcaatnnnnnnnnnnnnnnnnnnnnnnnnnnnntgtacatagacttcatagagctccacagtcttttgtaaatattgacacaagtaaataagtatataaatatatattactgaggatttattttaacatcatt

SEQ ID NO: 6804 - DNA, 1298 bp, Macaca Fascicularis
agtcagcccctagtggatgagagcacctatgccccagaaagagcaggctcccaggatggacacctcgccccctgaagaacgcttagagaagcaaaatgaaaaactgaacaaccaggaagaggagatggagtttaaggaactggacgatctgagggaagccttggcaaacctgcggggactgtcagaggaggagaggagcgagaaggctatgcttcgctcccgcattgaagatcagtcccagctcatctgcatcctgaagcggaggtcagatgaggccctggagcgctgccagatcctagagctgctcaatgcagagctggaggagaagatgatgcaggaggctgagaagctcaaggcccagggtgagtacactcggaagctagaggaacgctttatgaccctagcagccaaccacgagttgatgatccgcttcaaggatgaatacaagagtgagaacatcaaactgagggaggagaatgagaaactgaagctggagaatagcagcctcttcagccaggctctgaaggatgaggaggcaaaagtattacagctcacagtccggtgtgaggctctcactggggagctagagacgctgaaggagaggtgtgctcaggatgcttgccaggcacaggcgcgcgagaaggagctgctggagctacagagccagcaggcctgcacccacaccaaaaagacagaacagctgcgcagccagctgcagactctcaagcagcagcaccagcaggctgtggagcagatggctgaagcagaggagacacacagcagcctgagccaggagctgcaggccaggctgcagaccgtcactagagagaaagaggagttgctgcagctgtcaatggaaaggggcaaagtgcttcagaacaaacaggcagagatccgccagcttgaggaaaagttggagatagcaaatgagggcaggaagcatgcgctggagcggtttaagcaagaggcagtggctgtggacagcaacttgagagtcagggagcttcagtgcaaagtagatgggatccagaaggcctacgatgaactcaggctgcagtctgaagccttcaaaaagcacagcctggatcttttaagcaaggagagagaactcaatggcaaactccgccatctctttccataagcaagtttctgcttcctctggcctgcaattcagaattcaaatatttgtgtcttagcattatggcaagagtaaagatgatatcccatttattatacttttaagcacaaaaggcaactcaaagaaaagctactttactatgaaaaaaaaaaaaaaaaaa

SEQ ID NO: 6805 - DNA, 675 bp, Macaca Fascicularis
  misc_feature (1)...(675): n = A,T,C or G
tgtcttcaaactccatccacccagttgtcaccatgacaatgagtattccacatgggtttcatgtctagttaaggggacagggttaggaactggacggtgatcgcccagagtttttcttcacatccgttaattttgatttaatcatgttcacccatatctgcacctctctctttgacctctaaaataagaattagaggtcttattttgaggttatcaggatattaacttctnnnnnnnnnnnnnnnnactccctgtactggctaatatgtgactatggannnnnnnnnnnnnnncctcaggctgttctgttnnnnnnnnnnnnnnnnnnnnnnnnnnnnnnnnnnnnnnnnnnnnnnnnnnnnnnnnnnnnnntctcattgggagtgaaaaggtaaccctactnnnnnnnnnnnnnnnttttatcacaggaactctgttcttcttgaagtttaatacgatgcaaagaaaagtggaaatggcttgagatttggatgcagaggtcagggaatgaagtcttggctgtgccactcatctgcttggatgctacatgactcctccaagctgcagtttcttcacctggaaaatgacaataacaatagcagcttttcaacttttttaaattgactaaattttctgaatgaataaataagacatagagaaaagtgccgtgtaaac

SEQ ID NO: 6806 - DNA, 3034 bp, Macaca Fascicularis
gaaattccatccctcttttcctgtgtgaccttggacaagttacttaactgctgtgtgcttttgcttcctcatctgtaaaagagaacaatcataacaatacttcacagtgttgagtgaacatcaaatgacttgttaaaagctattagaagagtacccaatacgaggtaaaatgtataaaagtgaaaactgttaagattgatgttatcaatgaagtaaatctgtgcctatgagaaatctacctatgggaatttgaagttagggagggatgacactgttcctaatagctggcatatgcacgtggacacaagcagccccaaggttgctgcctgtgacagagcttccaacttactattggtgagatgaaaacagcagaaagcaacaaagcttggttagttgtaagagggaagatgcacattctctttgcagttgagcacctgaaaaacttgatctgtcagagtaatcagtttttcttcattgtctgctaattctgcccagaaaggacatctgttgagggagcctcaaaactggaacaatgttatgggactgaagaatggggaatatttcctgaatctagagctcctggaccttgttctgagcaatgtggctcatgcagagagatctgagtgtgtgcctccacctcagccacaatgatcctgaaaaatagcatatgttttaggagcctgtagagtagtatttttggaatcgtgactttggtgcttcattcaaataggacattggaaagctagtgcaaaagacaggcagagaaagagagggagagcaagagagagagacagagagactgagagagagagaaagagagagagagagaatcactgtcaggttttaaggcttttacagaaaactccatcaggaccacagtctatccccaatcctatatattgtgctgatgaaaacttttgggtggtgtttatcatttatcccacatgtattttatcctctctccaggaaaataatgcaatgtttgccaattatgttactgaaataaagagatagcacagctgcacagctcaaagatcctttgatccctagtaactaactatgtgaaacagtcttgagaggctttggggctgtgattggttcttgaataattcttgcaagtgcccacaatccctttactttcttttgcaaatgttcaaatctacctgtgtaatgcaaggcctgaaaactttctaaagcaaattgttaaatgcagtagtctgaaatttccaaacttcacctttcccttctctattaaaattaggatagtattgatccttggcctgtctctggcactttttcaactctttatgatttctcagattctcgactgcattttaagatcacacctgcaatttctttttgttcctggggtggaattactgagtctgaaccaatacttgaatttaagtgattgcattgtctttttatcacctcacctgtattgggtgttaagttgttcataatatatcaacctctacggttcctaattttacagttttatttgagtaactccctcacacaaaacacttcaggttgttttgtaactgccctgacaaacccatttttccaacagaagaaaaaattttggggggtggaagcaatggtaccatttattgtttaattgtttacacatttattgtaaacttggaattttcaggtaaaatgttggtgttagtcaatgttattgctgttttattagaaggaacagaaatcaacttggttttaaatcagaaatcaacttgatattaaacccagaaggaatttgggggacattactgagttgggtgaagcatagcttctttagaaactagaaccaggaattggaaaattgtcaacattttcctggaaggccagtcactccagagggcatttatttttgttaactatactggttctgtagagtgagttaggtagtggtctctgatgaagactgatcatctgaacttgaggagagtctggttcggtaggtgtgtggtggctctcagaatccagaagttttaaaatactgccttgtcatgctaatgatgagtgtattggtctaacttacttattattttctaaattttaaccttaccactgcctgtgttactctctccttgggagaccccaggctcctctgtgtggtgcctccaccaaaaatacttaaacttgtcaaaaaaaaaaaaaaaagcccatagttgagttatatgaataagtattgggcgcgggtgcattacttcaatgtggcctaaaaatacaccacttaccctctcagtgctgccatccaaaaccactgtctgtgacctgagctgcattgactgagtttgaattcgtcagccaccacatccagtttttacccttcaactttacttgctagaagaaaatagaggacataatggtttgaaggctctaattatgtgctgtggaaaagtaggtgacttcaaagaggagatctgggaacataagggaacattttctttcttagcaaccacatggaaacctgcttcctctgtccgtcttcaccccaactgccctaaaatataaagagaaattgcccctttagcacatattgagaagttttatatggttctagtctttcaaagtaaaaatgggcaagcagatatctagcactgaaggcgaacttagttttataagcttcagatcctcatttagaaaagctgtacatgaatctcatcatcaccttcaaaagggcctggcaaaattcttcatgcctcgcaaaagttgagagatgaaactggacaccaagacaagtcgtctgtgtcccatgtttcatttccaatccgaaacgtggcttgcacttggtgaatacttcaagtttctgattcttttgacacaggtttgccttgacttttctgccttgactttatcacaaataattcctaagatgcttcatgctagagaggaaccatgttacagtggaattttgccttgaaagttgtctcacttttcccccgtaaatctggaagatgaaagacaaatttccgggaggtaaaatcacaaaacaaaatggaaaaaaaaaaaaaaaaaaaaaaaa

SEQ ID NO: 6807 - DNA, 319 bp, Macaca Fascicularis
tggtggtgctcatgaagaccatggacaacgtggccaccttctgcatgctgctcatgctcttcatcttcatcttcagcatcctgggcatgcatctcttcggctgcaagtttgcctccgagcgggatggggacaccctgccagaccggaagaattttgactccttgctctgggccatcgtcactgtctttcagatcctcacccaggaggactggaacaaagtcctgtacaatggtatggcctccacgtcatcctgggcagccctttacttcattgccctcatgaccttcggcaactacgtgctcttcaatttgctggtcgc

SEQ ID NO: 6808 - DNA, 209 bp, Macaca Fascicularis
aagccaggggcaggcatgttttctttcgacggcaaggaagtcctgaggcaccccacctggccccagaagagagtgtggcatggatgggtccccagcgggcgcaggctgactgagagatagtgcgagaggtagcggacagagtgtctctcggtcacaggtcagtcctccttcctgctggggggcaggctcgtagggcagaatgaagcaag

SEQ ID NO: 6809 - DNA, 3015 bp, Macaca Fascicularis
aagttgactccttcaacggggctgcaacaccatttcgctgggggatctcgggcttctttttcacagttcaattctctactcctaagggaagaaaggcctttgagtggtatagattgtttctcaacttcttcagccccacccacaccaccactactttgaagtgggcaatctgtcagcattaggataaatcggattgtgcagctggctaaagtggaggaagggtaagaaaaggaattttaattcttagtgagtattagaatgggttgaaaatttttcttcctagggttgaaaaatggagcccaaaatatttcaatttctttgataagaggcaggtaacatctccaagaataattcacacaaagattattatcctatgagaatgaaaacatactgattttctttttctatatctttctaggttctggcttacccacctctaactctattgccaaagcactacgccagcaaaggcttgattgtcaaaagagtatggcaattcatggtgaaaggggggaaaaaaccccacacactggaagataagaggatgccaatggagcagacagtggcagctccttcctaagcttattaatttcccacagggaggtctctggaaggggctttgagggttgagggaggcagagaatagatcttcaaggaggagaattgcattacctagcctcaccattcaaaataaggaactttttaggggataaaccttattgactacttgtacatgaaagagaaacagaaatgatgggctggtcaattaagaaaaacaccaggcctgtgcaaaaaatgttgttcagagggttgttaactcattttctaccactttgcctttatcaagagaatgatacatggtgggttttttaaaaagacccagaggagtttgttgtttgtttgtttgtttgttttacatcttggtgagaagaggcatgcttctgagttggataaacaatgatgtgaaggagtgggatgtggggaggggtacttgttttttataagtatacactgcaaactcagtttgggtctgttcctcacactaagtattgtagttggctcactgggtattacataagcaaatgttttccaggctgaccctgggaaagccagagacttagagttgggtaattttgtagcctgtgaggaaggacttcaggatcccaactgtagggatcattactcctgactcacacttttctctcttgggcttttcctcataaatagtccagctttaaatcctgctgctcctgtagctactactaccaccattatcattacaatgataatctacctttctcaagtttaaaactttttctctgagtgttcccaagttttacttacacttctgttggagttcagctgagaatgggatagtctttgaaagctatatgttactctcttcctctcctggatctgggttgtagtcaactggcttaatggcctctgactatgacttttagatgggctagcaaaccgaagtgacattgtgcaaaactaccaagagatatgaaataagtgcctcatactcatctgtgtgagtgtgacctctgaaccaaatccaatatccactattttgaccccctggattctcccaacttctatacatctcccaagatgagtgtataatgatctggcaagaaaagacctggatttttgtcaaatccataggttccaaagtccttcctagactcagacaccacaccctttgaatgcatctcagtgtgaggggggttggctggttgtagccacgtctccatcagtcactctgaacctccttaccctctgggtcagggtttttaggcagactggggatcaggggatgtctagcagtctcaaattggtgtccagcagtctcaaatgagaatttgagaagtctaactctaggccttgggaatgtgacaacattgagaggctctacatcaaatttcttcacacagccaggagaatggacatcatcccaagattcagtaactctgtgccacccttttcctctctgttttaggtggattgtaattcctgagttaaataaacaggcaatgatagacacacagcatatatatcctgggcagaatacacttcttggcatctaatcccagttagctttctgaggcacggactgtgagaatttgggctgctggggaaaaagcagcagaaagcatggctcttctgggaaaggggtctaggcaggggacacaaatgtccagtacttggaataaacccatggtacactttcctgaggcccaaagagagagatgtttcattttctcaaggaagagagaagcaagacaaagaaagtaaaaagaaaggaagaaagagacagacagagaggatttgagaagtatataccagttaggagccacaatagtgatgattcacattgtattaaaaagtcttggaaatatggttcaatttcttcaaaaattatcctcccgaactgctcccttgctcatattgccaactgaactctgagtgaaaactgtatgatttcagttcaattaatcccaggtgttctatgatttaatccagggatattaatttagcatcaatgggggatgtctcccaaaacattatatgaaaagctgttagttctcagaagattttcacaaacacttgaaagctaccaatgtcagtctttcctcactgctaatacttggaaacgtggtctcctaaaaaaaaatcaaagatcaacatgtcacaaatgcagcaacatcatgactactatagacacttctggacttacattatgaagtggaggcaagaataggcaaggattgcaacatatgtgttctctttaacttgcgagtgaaaagctgcctcccaggctgatgtgatagtatctgtaatgtaatatagtaaccatgatattattcataatctccttttaaggaagtttaaatgaaaactcatatttttaaaagaaataatacgcagaattgctaaataaaacactcataaattcctaagaataaacatgttgaataaaaaaaaaaaaaaaaaaaaaaaaaaaaaaaa

SEQ ID NO: 6810 - DNA, 1401 bp, Macaca Fascicularis
  misc_feature (1)...(1401): n = A,T,C or G
cgattagctgtgtattcatctgttgctctttttaggtggtggtatatatttgaagagcaaagactacagcttatcctctatctgagtgtatgtcaggcctttatatagggagtggagttaggatgggaggtggtgtttcagcagctgcttgttggatgcctgctaactttatggagtctgcagaccaaaaattcacacttaattgtccctataaaagtctggaaaatattattcttacaaatgattttgtaaatactgcaggaaattggctcctactaccatcccagcagctattgaagccagtttggcttcaggtcctagacaaatgatttgtcatctgtttcatttgtttgttttctttcctgacggagctggaattctggattgttccccactttaaaaatttccaaatccaaaccagaagtagacagggcaggatacaaggctccccattcgcacttagtttcatagagtaaaaaatcacaggcagtttgcccagaattacattttatgtctggctttatctgaaacaactaaaagacctgacaatattatatgtaataaaacaatagttttcagacactagtcatgaagcagtgaagggcaacaatcctgaaagaaggaacacaaatgagttgagttttatgattcccctagctgatatctggagagagattccagattgcagcctaaggaaagagaactaagagagaaaccagagattattctctgagttgagggaacagaggtgggagtccagaagaggccaaagtagatgaagttcataaggcagagtacaaaagaggagagagctgcacagaaaaaaaggcttgcagatcccaggagggtcccccttgagacatgagcccagtacttcggcatgcatgggaaaattaccaaggttggagaaagaaccacctgaaaggagcagagggagcaatcattggagttcacacaaggaagcgagtagtttgtgttcctgctagccagagtaggacaattcattttacaaagggcgctggatagagtagtcaggaaaatagagcctcataagggagcaaaattaaccctagactaaaggctggtctcatcttacctactgaagctttaagcctcagtttccagccgggagcagtggcttacttacacctgtaatcccagcactttgggaggccaaagtgggcggatcactggatcagnnnnnnnnnnnnnnnnnnnnnnnnnnnnnnnnnnnnnnnnnnnnnnnnnnnnnnnnnnnnnnnnnnnnnnnnnnnnnnnnnnnnnnnnnnnnnnnnnnnnnnnnnnnnnnnnnnnnnnnnnnnnnnnnnnnnnnnnnnnnnnnnnnnnnnnnnnnnnnnnnnnnnnnnnnnnnnnnnnnnnnnnnnnnnnnnnnnnnnnnnn

SEQ ID NO: 6811 - DNA, 1093 bp, Macaca Fascicularis
  misc_feature (1)...(1093): n = A,T,C or G
ccctaccattcngtcccnnnnngcctgantcagtccccgacccggatgaccctcaccaccacgannnnnnnnnnnnnnnnnnnnnnnnnnnnnnnnnagatagcatagcttcaaagttcttcacctggtctgggacggtgaacaggtcaagatggagagtgtcaagagacttttgctttgtctatgatgttcttatatacatttgttaattaaatgaacgcatatgtttcctgtgtaattttgtataggggannnnnnnnnnngggaactggaagtaannnnnnnnnnnnnnnnnngcagctctaggtggtgggaataagtgccgttgcagccacaggaccagcccaaacgaggcttactctgtttataacaaaatgttgagttaccttgcaggtgtaacagagccaaaaactcttaagtcacaaagcccaggcatgcaccctagaaaaaggtttgatctctaacaaacatccagaaccgactgttcctctccttggaacgaagaagactgggacatgactggaacccgaacatttgaactctcagaagggaagggtctcttggcccagaagataggggctaaaatccaactcaacataccttgccataaatggccaaagttgaaggccttcaaacagatcctgccaagccaacatttctaagtcctttcctttgccctctgcttccttaaaacttgtcccagaccccaaatcagggaggaagatttgaacctgcctcctgtctccttgctggctggtcttgcaataaaacctttcttttctcaaaagccagtaccctggtattggcttctgtgtacattgattgagcagtgagcctgaggtaggaaaatagggtcatgaggcagggaatataaggccaattcacacttcagctataacaggaaatatccactccatagggcgtatgctgtaaatgactttgtaactttacttcatcctctccatttacagagcgtaagcaaagtaaccaatggaatcatctagggggtatttaaacttccaaaacttctgtaacggggcctctgagcccctgtgttccagccgctcccatgctgtggaatgtacttcattca

SEQ ID NO: 6812 - DNA, 726 bp, Macaca Fascicularis
  misc_feature (1)...(726): n = A,T,C or G
aggcagagaggagtgaccgggcactggcacagcgatcaggaagactggacccccagccccagggcccccttccnnnnnnnnnnnnnnnnnnnnnnnnnnnnnnnaggcactcatctactgaatgacctctctacttccccttcttgccatttattaacccatttttgtttattttccttaaatttttagccatttctccatgggctgccgcccacatcatgtgagtgagcctgggcagcttctgttgacaaagcttttgcatttcctgtgtttctcctgggttctggggcgtcagccagctaccccttgtgggcaaaggcagggccatttttgaggtcttccctcagatttccattgtgtggcctggtgggtcgggggagtctttgcaccaaagatgtcccgactttgcccccttgcccatcagccatttgccatcaccccaaacaactcagcttcggggccggtgaagggaggggcctcccccagcacagttgaggagcagctggggtaggctctctgtgccatggccccccactcccccttcccttggagggagaggtggcaggaatacttcacctttcctctccctcaggggcaggtggtggaggggcacccggggttgtctttgtgcaccggggaaggtgctgggtgcctgcagcgcctcccttgtctcagatggtgtgtccagcactcgattgttgtaaactgttgtttgtatgagcgaaa

SEQ ID NO: 6813 - DNA, 711 bp, Macaca Fascicularis
  misc_feature (1)...(711): n = A,T,C or G
gttggacaaaattgacaaacaagatgagtttggtgctttggaaagtgtgaaagctgctagtgaactctattctcctttatcaggagaagtaactgaaattaatgaagctnnnnnnnnnnnnnnnnnncttnnnnnnnnnnnnnnttatgaagatggttggctgatcaagatgacactgannnnnnnnnnnnnnnnnnnnnnnnnnnnnnnnnnagaagcatatgagaaatacatnnnnnnnnnnnnnnnnnnnnnnnnggaacccctaaataaactagtatgaaataccacaacccagcagattgtcttaaattagtggtggatagaagacttagaatagcaacttatagcattaccaatggggaagaaaaaaactactgttaacgctgctaatgaaggaaaatgtcctttaactttgtaatgattatagattttagactnnnnnnnnnnnnnnnnnnnnnnnnnnnnnnnnnnnnnnnaaaactagttttaaaaattacataattcaaagataatgttgttattcttaagccttatataatattgtaacttgcctggatttgggannnnnnnnnnnatgacctttccattggaaataactgggagtgaagaggatttatgttgcttgtacagtgttagatgacacaccactatcttgattttgcaatacactgcatttgctggtgctatttttatacggtgaagcaacag

SEQ ID NO: 6814 - DNA, 661 bp, Macaca Fascicularis
  misc_feature (1)...(661): n = A,T,C or G
ccacacccgccccagctnnnctgcatggattggcnnnnnnnnnnnnnnnaccccgccccaagacgggcggtcgcaagtccaccagcagcatcccaccctccctgctggcctgcccgcccatctatgcacccccaccccgctcgccctcactnatgcccgggcacccacccgcacgtgcccgatccctgcgggtgcgccgaggccagtcagttgacaagctgggcacaggggagcggctggatggggaggcagggcggcgcagtcgtgggccagaagccgagctagtggtcatgcgacggctgcacctgtccgagcgccgagactcattcaagaagcaggaggccgtgcaggagacaaagcagctgagaccccagcgaggggcggaaacctgtccaatgatcacccagcaggagtcgtggcagaatggagcatcagccagaccctgttgtgggcgttgtcatcaagggagcttgaatggagggtctggtgtcagatacagccgactccagccccagctcnnnnnnnnnnnnnnnnnnnnnnnnnnnnnnnnnnnnnnnnnnnnnnnnnnnnnnnnnnnnnnnnnnnnnnnnnngtccctttctgagtcccctgcccagcactgcctagtgttggagggtagaccaagnncnnngcatgactc

SEQ ID NO: 6815 - DNA, 730 bp, Macaca Fascicularis
  misc_feature (1)...(730): n = A,T,C or G
tatatatatacatacannnnnnacannnnnnnnnagtgagaagtgaagaaaatgtatggtactaagattatgccttgttgataaatagataaaccaatttgaatcttcttagcatgtttaagtatgttgattgctttctaattaatgaacttctcacagaaatttcactnnnnnnnnnnnnnnnnnnnnnnnnnnnnnnnnnnnnnnnnnnnnnnnnnnnnnnnnnnnnnnnnnnnnnnnnnnnnnnnnnnnnnnnnnnnnnnnnnnnnnnnnnnnnnnnnnnnnnnnnnnnnnnnnnnnnnnnnntataatatcttgtaagagctatatttttaaagcatattttttcttgagcattaaattatcctaaatggtaatatattgtggataagtctgggcttattggacataacacatatttgggttggtattggttgaatccttcagttaactgctttgttgctttttgcaagatttttaatcttaaacatgtcaggcatcttaagtcacctttataatgttttgttcctctgagtttctttcagcatgttatacaaatgccagacatannnnnnnnnnnnnnnnnnnnnnnnnnnnnnnnnncacatatataatactgcattttattgtaaggttttcacattaatacagcaattaccctgactaaattgagttttgtgatatatggaaaactccattgtaagagaatcttgcatacaatgtcgacata

SEQ ID NO: 6816 - DNA, 669 bp, Macaca Fascicularis
  misc_feature (1)...(669): n = A,T,C or G
tnnnnnnnnnnnnnnncctggacctnnntggagctgtggtcactggaactgtggttgttgctgtgatgtggaggaggaagagctcaggtggggaagggagagaggtagactgagttttcttgtcccactgagggtttcaagccctnnnnnnnnnnnnnnnnnnnnnnnnnnnnnnnnnnnnnnatccacacacatgggccgaccaagcttcatgtaagtagtgggcgggagtgtggaggagctcacccaccccataattcctcctgcaccacatctcctgtgggctctaaccaggtcttgtttttgttctaccccaggtagtgacagtgcccagggatctgatgagtctctcacagcttatannnnnnnnnnnnnnnnnnnnnnnnnnnnnnnnnnnnnnnnnnnnnnnnnnnnnncccctttgtgtcttaagggactgtggcttctctttttgcaagggcctctgaatctgtctgtgtccctgttagcataatgtgaggaggctgacatacactccacctccatgtctaccatgacccccttcctcacactgacctgtgtgccttccctgttctccttttctattaaaaataagaacctgagcagagcatggtggctcacacctataatcccagcactttgggaggccaaggccggcagagcgagact

SEQ ID NO: 6817 - DNA, 1832 bp, Macaca Fascicularis
  misc_feature (1)...(1832): n = A,T,C or G
ttaatgtgttcttaaacatgacagctaaaaaacaaatcacataaagaacatcaaaactctttttaaccagcctctccctcctttatttttgaatagaatgatttgctttcgttttgtttaaaaaaaaaatcagtttatcaatgcctatcaggagtaattaatgaaaataatacacaacgaagcagccttacccagagctgatatatgaaatcttagtctttggagtgaagtggaataaggagctcttacacttatgatggctgcagactgtccaggttttagagctgggttccatagtcacacatgtgaaacatgggaaagggaggcggcaactgaaaacatttaaagcaacagggaggttgtcacaaggcacggggctcatagatacctagaaaactgtctttgaaagaagtagttgatccctagagagtggtgttattttaacgttttgaaaatgtgagcttattattaacgcacttcatgttctgactcagcgaaatgtcacgaggcagccagcatacatgaacaaggtccaagagagcagagaggagatgggagggaaggcctggcccttttggggaataggaacttgccatctcacctgttcccagggaagaggtttaaaagaagagcttcgcagctagattttcacaagcatccagctagagcgtaattgcaatgggctatcctgtgatgtaggtggggttaggtgtgtaaagccctttaccacacttctgagatgatggtccaaacgacgcctatctagtttcactttaagtgttaaagcttctgagcatcttgtgatgggggaatagacctgcatcattaagatagattgctgggcttggtacctcagaaaacagctttcatattttttttcccgcattgaaactcaccgtgattccagaagtccatttcaggagaaccagatgcccaagatactgacgcttcccagggaatggagggctgactccattaatcttctccagagttctggatatatctgggcagaaatttcccacccagtaaatctgttcttggtaccatttctccatttctacaccttcacagtgttgaaccaataggaggtgggggtggatgcaagactttgagacaggatttgggatttcagtaggctcttctttaaagtacacagaaaccaaaagtaaaaaatgaatgtgagatttgagtgtagggctctgcataaagtttcagggaaggattttctcaggtccttctgaagcagaaacacagcagatgagttactaaccttgaaaaggaggtgcacatagagaccaaaccacagagaatagcatgctttgtatctcaagattgaaaaacaaatgatgtttaaaatcccaatgcatgttagattttgtgccttctaagacactccattaatgtcagtgctagcatatgtcagttggttatttcattcaattgacagtaaattgattagtaagtttgaaattgaactgttaaagctacttctagatcttttaggttgctaaagaaagtgaccagctaggagcannnnnnnnnnnnnnnnnnnnnnnnnnnnnnnnnnnnnnnnnnnnnnnnnnnnnnnnnnnnnnnnnnnnnnnnnnnnnnnnnnnnnnnnnnnnnnnnnnnnnnnnnnnnnnnnnnnnnnnnnaaaaaaaagccatatgtagtggcataagccagtaatcccagctactagggaggctgaggtgggaggatcatttcagcctgagaggttgcagtgagctatgattgtacccctggactccagcctgggagacagagcgagaccctgtctcaaaaaaaaaaaaaaaaaaaaaaaaaaaaaa

SEQ ID NO: 6818 - DNA, 1176 bp, Macaca Fascicularis
  misc_feature (1)...(1176): n = A,T,C or G
cnnnnnnnnnnnnnnncatgcgccacagagcannccnngcctcactgnctgctagtcagttctgggttcactcagtggctttgtgaatgtaaataaggggcaggtcttggccctagaggattgaaatgtttttctatatcttagaactatttttggataaattatatattttccttcctagtannnnnnnnnnnnnnnntgactagctccaaacacccatgcagtttctgcattctaggtttttttaatttattttttttgagttttgctctnnnnnnnnnnnnnnnnnnnnnnnnnnnnnnnnnnnnnnnnnnnnnnnnnnnnnnnnnnnnnnnnnnnnnnnnnnnnnnnnnnnnnnnnnnnnnnnnnnnnnnnnnnnnnnnnnnnnnnnnnnnnnnnnnnnnnnnnnnnnnnnnnnnnnnnnnnnnnnnnnnnnccatgttgnnnnnnnnnnnnntggactcctgatctcagttgatccannngcctcagcctctgcattcagtttattcacacatttttggttactcccatggcagctcctaggatttcagtggtctgtgggccagaaagcaggcattgggtctgatctcaaggctgtatcagagggccaagcagagttcttttggatacctgcttttcatcccacagggcctcagagtcagaggtaaggtagcaacagagctagcatgggttaatgcactcttaccctccttctcaacttttatttaagctgtgctaaatgttttcttcgagggaaccagatttggttctttgcagaattttccagtgaaataaaacatgttgtaatagctgcgtttgagatgaaataagatgttgagggcagacgggaggcacctaaaggaaaagaggaaaggtgcctggactgcctatnnnnnnnnnnnnnnntggacttcactatggactcatggtgctaaagcttggcttgaacaggcagtctaggggacatgggaatacacagggtggttgctcagtcatttgcaaaggtcaaccaaatagaacacacatttgcaagatgtcatctgaggaaattaagtaccnnnnnnnnnnnnnnnnnnnnnnnnnnnnncaaatatacttccctcatgcccttctgtataaaacttaataccattagttccccattcttgacattttatttcgagttattatata

SEQ ID NO: 6819 - DNA, 736 bp, Macaca Fascicularis
gaggacatgggacaaccccccgtggaggaggctgagcagcctggggccctggcccgagagttccttgctgccatggaacccgagcccgccccagccccggccccggaagagtggctggacattctggggaacgggctgttgaggaagaagacgctggtcccagggccaccaggttcgagccgcccagtcaagggccaggtggtcaccgtacatctacggacgtcgctggagaacggcacacgggtgcaggaggagccggagctggtgttcactctgggtgactgtgacgtcatccaggccttggatctcagtgtcccactcgtggacgttggggagacggccatggtcactgctgactccgagtactgctacggcccccaaggcagcaggagcccatacatccccccgcatgcggccctgtgcctggaggtgaccctgaagacggccgtggacgggcctgacctggagatgctcacggggcaggagcgcgtggccctggccaaccgaaagcgggagtgcggcaacgcccactaccagcgggcggacttcgtcctggccgccaactcctacgacctcgccatcgaggccatcacctccagcgccaaagtggacatgacgttcgaggaggaggcacagctcctgcagttgaaggtgaagtgtctgaacaacctggcggcctcgcagctgaagctcgaccactaccgcgcggccctgcgctcctgcagccttgtgctgg

SEQ ID NO: 6820 - DNA, 765 bp, Macaca Fascicularis
  misc_feature (1)...(765): n = A,T,C or G
cagaagagtaaactggtgagagtatatattttatatatatatatataaaatatgtatatatatatatattgacttgttacatgaagatgttaaaatcggtttttaaaggtgatgtaaatagtgatttccttaatgaaaaatacatattttgtattgttctaatgcaacagaaaagccttttaatctctttggttcctgtatattccatgtataagtgtaaatataannnnnnnnnnnnnnnagttgtgcatgtatgtatacagttgcaagtctggacaaatgtatagaataaaccttttatttaagttgtnnnnnnnnnnnnnnngaaaagtgcatgggggaccctgtgcatnnnnnnnnnnnnnnnnnngtcttaacaaatcagatcagatgttcatcccnnnnnnnnnnnnnnnnnnnnnnnnnnnnnnnnnnnnnnnnnnnnnnnnnnnnnnnnnnnnnnnnttgaatccaagggtcttaaacagtttttttaatcgtcaaccacttttaaacataaagaattcacacaactactttcatgaattttttaatcccattgcaaacattattccaannnnnnnnnnnnnnnnnnnnnnnnnnnnnnnnnnnnnattaatccattcatagtaagaatnnnnnnnnnnnnnnnnncaagtttgatgcgatctgctcagtaatatagtttgtcatttttattagaaatttaatttcttcatatgatgtcatgaaatctgtacatactgcagtgtgaatttttttgtt

SEQ ID NO: 6821 - DNA, 652 bp, Macaca Fascicularis
  misc_feature (1)...(652): n = A,T,C or G
gcctcncaggttcaagtgattcttctgccttagcctcccaagtnnnnnnnnnnnnnnnnnnnnnnnnnnnnnnnnnnnnnnnnnnnnnnnnnnnnnnnnnnnnnnnnnnnnnnnnnnnnnnnnnnnnnnnnnnnnnnnnnnnnnnnnnnnnnnnnnnnnnnnnnnnnnnnnnnnnnnnnnnnnnnnnnnnnnnnnnnnnnntgcgcctgggcctcatgccatttatttttaatcacacttctgagaagcttcgttgtctacttttcaaacacagcagattgacacctgtgaactggaaccttagaggggattagtaagtcttgctgacaccctgtatggataatctaatgcatctttttcttagtgctaagtgaaatgtttcccagaatttcagcagccatggattcactctctggagctacataaaaatgtcgtcgatgttcagtgctcagaaattgtacccaatattccagttacaggcttatcactgcagtgggcacagtgggagggcagtgccttccttcgtcaggacagccctgtggatctgtgtgtcctgcctgtgtgcttctgaccattcctgtgcattgcacctgtgttcaactaaaaccctttgccattgttcaccttgactgatgagtcctaccctcttccc

SEQ ID NO: 6822 - DNA, 686 bp, Macaca Fascicularis
  misc_feature (1)...(686): n = A,T,C or G
gagaagctcatcgttggattcccagcctatggacataccttcnttctgagcaatccctccgatcatggaattggcgcccctaccactggtcctggccctgctgggccctataccagggagtctgggttctgggcctactatgagatctgtaccttcctgaagaatggagctactgaagtatgggnnnnnnnnnnnnnnnnnnnnnatgcctacaaaggaaatgagtggcttggatatgataacaccaagagtttccaaatcaaggctgactggctaaagaagaacaacttcggaggcgccatggtctgggccattgacttggatgatttcacaggcactttctgcaatgaaggaaaattccctctgatcaccaccctaaaggatgctctgggcctgcagagtacaagttgcaaagctccagcccaacccattactcccnnnnnnnnnnnnnnnnnnnnnggcannnnnnnnnnnnnnnnnagctctgggggcagccccagtgatagtgaattctgnnnnnnnnnggccaannnnnnnnnnnntgaccccactgacaagaatgccttctacaattgtgcaaatggaaagactttcattnnnnnnnnnnnnnnnggccttgtcttcgaagcctcctgctcctgctgcagctggtgatagcatgtgtcagataccacnnnnnnnnnccg

SEQ ID NO: 6823 - DNA, 639 bp, Macaca Fascicularis
  misc_feature (1)...(639): n = A,T,C or G
gttcccccannnnntaccccatnntctcctggccaccccgtctcccaccccatattctcctggacaaccccatctcccaccccatcttttgctacagctagggttagctcagcaggtgaaaaccccgagggtgggtgaaacccctctggggcccagacatgcaaaccttggtcatctctctggccctgccagccagtaggaagtttcccctgagttcttagttttgtcnnnnnnnnnnnnnnnnnnnnnnnnnnnnnnnnnnnnnnnnnnnnnnnnnnnnnnnnnnnnnnnnnnnnnnnnnnnnnnnnnnnnnnnnnnnnnnnntcacagatgaggaaactgagacccagagccgccacatcgatccctcatctgatctttataagagtacctggaggaggagggtggggtgtttgtgtttgctttaatttttttgaatgaaaagaatgaagnnnnnnnnnnnnnnnnnnnnnnnnnnnnnnnnnnncggaatccatgatgtagtcagggcagacatgacccgtgtccagtaaccccaggcctcgagtgtgtggtatatttttctatataattgtaatcattctatacataccaattcatgtcttgaccatcatattaatatttggtaagttttctctc

SEQ ID NO: 6824 - DNA, 503 bp, Macaca Fascicularis
cacggccattgcattcaatctgctctcagctggacggtaccgccccagtgtaccccaactcttcaggccaggccgagaacagctgctgctacttcccgtcccctcccctcaacgagtccctcccagagtttattttatcctgctctcccctctgaagcagggctgctgccctattttccagaaatgtaaagtgatttgtctaaagtaacacagatgtgagtcatgcaggactttgggattgcagccccaaactccctgctgcgccgggtgccaggtctctcctctagctctgcccagcctcgactgttctatgccacactcccactccccttgccctagctgtctgggggcacttagggtcctgctcccaggaggccagattcctgtctccagccctgaggctacctaggagttacagacccctggaccaggctgggctgacccgggtcactctggtttcagaatcccactctggggtggcgtcctcatcaccatcgtggaca

SEQ ID NO: 6825 - DNA, 751 bp, Macaca Fascicularis
  misc_feature (1)...(751): n = A,T,C or G
gtannnnnacattttcctataggatgctatntttcttgagaccaaatagacattctataaatgttatgaattatgcttgcagttagtttttagcctatctaggcttaaggtttattgatatttgaagttgaaacatcattttatgaggtttagttttaggaaggtaaataaataaatnnnnnnnnnnnnnnnnnnatgttgtatcagtgtcccctctaacattnnnnnnnnnnnnnnnnnnnnncatctgtgaacgactaagtgatctctcagaatccttccagccctatagcctgtgactataacactcatccagaattgctgtctgtgctggctgtggtctgcctccnnnnnnnnnnnnnnnnnnnnnnnnnnngttcgtcnnnnnnnnnnnnnnnnnnnnnnnnnnnnngtccatgtccttggacactaaatggacagagaggagcctgtctctcggggcacatgagtggtcatggcaggaggagannnnnnnnnnnnnnnnnnnnnnnnnnnnnnnnnnnnnnnnnnnnnnnnnnnnnnnnnnnnnnnnnnnnnnnnnnnnnnnnnnnnnnnnnnnnnnnnnnnnnaaagaacttacctgagaggaagaatattttttaaatatatattagattggggatggggagggagtggttgttttcttttgtgtttacatttttaataactaaaatagaagatttaagaatatttatggtattgaactttaagtgtaatatgttctagaaaa

SEQ ID NO: 6826 - DNA, 678 bp, Macaca Fascicularis
gggaggacaccctactgctttccgagtccatgagcaacagaaagactggtcttagtgcaattaggcaggagggatttggactcagaaacaaccacaggagtatttctcagcactcccagttcctgccgacttagctggaaatgatgccacagcaagaccagaaagaggagtctccgtaaggtatccctacaaagtcacttttcttataaaaaggtgggggaaaaaagttagatatctaaaatgagcctagaatctcacacgcagctgtgacttctaagtgaaactctttctccctcatgtccttaaatagtcacagaatcacacacagcctgacttttataagacaggcttggctacaagaaatgaaccaagcccagactcttctagcctgtctcctgactgggctccttcagaaagtgctctcctgttccatctgcagggctgcttactactggaacctaaaacaaaacctgttgtttgtcccgtcactttttctggtgtttcctatgcttttgtgataccaagtctgttcaaaagttctgaagataaattatgtgaaatcatattttggcatatgggggtggaggatgaattctttaaaaagtttttaagatgatctcatttgtaccacagaaaacattttggaagttgttatatatgagtatataaatttttctt

SEQ ID NO: 6827 - DNA, 751 bp, Macaca Fascicularis
  misc_feature (1)...(751): n = A,T,C or G
gaaattctccctgtatttgtgagactcgtaggagtcccccnctggagcacaggcaatgccagtgccatgctgcagcctcagaaaccaggcctctccccccagcagcaggtggaaccgtgtctgtggtcgggtgctgtccacagctctgtctgccttgttcttgggcttgagccaggtggaggtggggtctcttcaccttccctgaattcagaacagaccctgtgcctggccccagtgtgcccaagcaactccccaggcccttgttgggagcccttggtggtctgagcagcggggcccaggcagcacatgagcagtgcccggggctccctgcgtgaggacggcaaggtgcgatgtatgtatnnnnnnnnnnnnnnnggcatgcccctgcgccccctgctcctggccctggttattgctgagctctgtgctcagtgctgcggcctggccatggctcgtctgttccttctagggggccgggcaggttgtgggaatcagtcttcacaaacagacaggagccaggcagaggactcgttccttgcagaggtcaggcctcacctgcaggtgtcggggttggcaaggaggggcagacacacaccatgtttgacctaaacccaattctggggagcgtctcccgctccagccccacgacctccacagggttacattgtaatatatatgccccagctaacctgtctgatggtggcatcttcctgnnagacatttcaaacatgtaacttttatagaaaaaaaa

SEQ ID NO: 6828 - DNA, 3938 bp, Macaca Fascicularis
gctaaattttccttaaagtttaatttgattgaactttttattggaggatgactttgctatttctatttttaaaacagagaaacctcttctttttagagtaacatccctaattgtgcatagcagccaggatcctcctgtagataatgtatgttttcttggtttcttgtttccttcatgattcagcaacttggaatatgatggagtactattgcccttgcattccagctgtccaagaacaacaacaaacctttatccttcagatttctgaatttgccccaaaatgggagggtatttttttccacccatgtaggaaaccttggcccttatgttttgattacagaatcttgagcacctctgaatatcatctctgggcagaatctgaccaatattcttcgtataggctcagagtagagattcctcgtgtttctccagggacacactttctcctaggcgatcattttggggcatcacactaagtaaagtgcctaccccttgtcaacagggggtaaagtttgactaaaaaacatcaggaaggaacatattgataactcaggggcacaactccaaaatgccattctgaaaaggctcttctagagtcaactcagagcccaagtgtacaagtgggctcctatgtgcaatcactatacaagccataaaaatctttgatattgccatttatgattacaacaaaattttagatgtccaaggaagtcaacagaacaatccagatcaaagtgcatctttgcagcttgagcctcaaaagcataaaaacaggaattcatttctgctctcagtgatacaagaaatgaggcaaaggaaaaaagatgggaccttagaagcaatgccctagagtaaaaagcatacattggcactcagtaaccacagagatagaaacaactgactcatcgtctccagaaataacagtagatgtagaatttattcttcaatatatgtttcgttgaattgaaatgcagtcatcaaatgcgaggaggggtgctagacctgataaatctaggaagaccagtcagcttggtagccacttgttaagctaaaggaccacaaaggtgtgtttagtagttctgatacgggattactatcagtttatacatatgtatagattttcttttaattataaacagccagatagccagcaattaaggtgttttttcatctttgtgaaattcatggacaaattctgactctaaagtgcacagtctacatgaaatctttgatcacaatctgtatatatatatatattgtacatgactgctagtaggtatgaaatgcatttcagaattgaaaactcatgcaacataaccatgtgtttgcataaggaatgttaaaattctttctactgcaatttattaacaggggaaaagattcaagcagtgccatctagaccttttctcttctcatttcttcaaaagcagtgctaagtaaaataataataataaaaatggtttatgaaccaaaagactttacattctagcattaggaacacacacaaaaaaatctgtcagcttacaaaagcacaacacataaagaaagagcagtggaatgcgtaatggggaaatgaatcgtgtttatttaaagcaagacctgcattaaattggcaactaagataatttccatcttctataggtaactgtgttccaatttaatgattaccttcatactcaacaagaaaaatggcaaagcaacatcaacaaaacaggtcttacaacatatctacgtgtatatatgagtatttttaatttggcaaacaaaaatcgacatactgaaataagtaacacagggtactaagcatttctctatcagcaaatcaatgcctacagtttttatgaaccattgcacagtttaactccacgatagtactgtaccccagaacatcagaagttaagtagttgtcacattgcttatccaattgctctctttttcaaggaaacaaataacattgtccattggtgattcaaaaacaaacatgtcttaagaaagtgaaaaatgataaaaattcctccaaagaggaagaaaaaaaaactaaaccccaccatgttggttagggcaaaatactaagtattcacaactgtagcaatcatgccatttggctaaatgtacagagtacatgtaatgtgagcaaccataactttcactgagcgtgtgtaaatattaaaacagatttcttaaatatttttaacttctaatttgtattttatggtaaggcaatgtgctaattctgtttatggcttaagttgatgtgttataatatgtaaataattaaacatgctgtaaatgaatagtcaatagatacaaacaattgtttagtttttttcttaatttttatttattttttactaagtacggttactgcagtgcccccagcagagtaatttaaacacccttttgcataatggtttgggaatcccagacagaagggtttcaatttgctatcacacacacagtcacacacagtcacacacacacactcaaacacacataatcttttgcttatgcactctgtctctctccccgtctatgggaaacactctactgtttatgtagtcaatataacaaacaagatagcctttgaaatggcaattgggaaaagcaaaaatgatcattgattacttaatagagtattttatatgtcagagttcaagaaaccaaagtttgcaacttaaatctcagttttcaaagagtagaagtttgtatagatggcactacagaaaataaaaaagtttattcacaccagctccagaaatgtgttacagacaatacatactagaagacttttgttttaataatagtattttgtccttaggtagtgttgttcgtttcaaccaaagactccagaattattgaaaaacaaaaaaaaaagaaagaaaaaatatgagataatggggggaaaaaggacactgcttcacaccaaaggtttaaaaaatgtattttccaaatgcactaggaacattgtaaaaaacagaaaggagtgaacagaatgctaatgaagatcctgccctaaagaaatccattcaaaaaagaaagaaagaaaaagcaggactcttaaaaagctattaagtttttcgaagttgaagtagaatatttctgtagatatattcaaaattctgacatcaaattttaatttgtttaaataagttttatttgtggtgaagatcaattgattcaaatgatgaaaaacaaaactgtatgtcctttgagttcccaaaccaaatgtcactgccctgtcacatcctctaatctgatgcccgtgtgtgtcgttgagccatttgaagcaagttgacagttccatcagtttgtttttttcttttttttttttggttgtataatttaagttcaaccatggtcattttaaacataattaaacaaagttgcctatagtttaatttaaatctcacaacatttttaatttattttgcatgggtgtttaaatagttctgttatgagtattgtccctgcacagttctaaattgtccttttataaaaaaaaaaaaaggtggtattctagtttcttcacaatgtagtgattatcagccttactaattaccttgtagcctttcttaatatgcacataatgcacattttccaatggctagaaaaatgcaaaacacagtggatatcattgcatctattttcatgtctttctaaaaacaagactactaaaatctctgggatacatgagatagttaaaaaatgaggattataaatgaatagcacataagaattattttcttgaatttaaacttattgcagccagtttcagcatgtaaatatataataatgttggctagtgtgtaattcttgaactaagaaatataaataaaaataaaaagagtgaaaaaaaaaaaaaaaaaaaaaaaaaaaaaaaaaaaaaaaaaaaaaaaaaaaaaaaaaaaaaaaaaaggaaaaaaaaaaaaaaaaaggcc

SEQ ID NO: 6829 - DNA, 682 bp, Macaca Fascicularis
  misc_feature (1)...(682): n = A,T,C or G
cgccccggacnnnncagnnnnnnnnnnnnnnnnnnnnnncccggccgggaaaaaccacaannnnnnnnnnnnnnntcctggggtcccgcaaggtggcagggaatgaggacggccgcacaagggcggcctaggcgaggtctcatgaggaggcagggtctccacgcactggaatagtgtcacccacatacaagggcacagatcccagggacacaggnnnnnnnnnnnnnnnnnnnnnnnnnnnnnnnnnnnnnnnnnnnnnnnagtatgtaatcacattccacacggcaccannnnnnnnnnnnnnnnnnnnnnnnnnnnnnnnnnnnnnnnnnnnnnnnnnnnnnnnncannnnnnnnacacagagcctcacccagtccgtgtcccgtggacccagctttactttgggcggtgacaccaagaatactcaccccttagccagaccacaggcagccacctggacacgaacatctctccagactcaccctccatgcagactcnnnnnnnnnnnncccagggaagcactgggccatggctttggaacaccaggcagccctttgtggtgcccagcannnnnnnnnnnnnnnnnnnnnnnnnnnnnnnnnnnnnnnnnnnnnnnnnnatcttttggccttgggaaatgtagctggagtcatcatttagccgagcannnnnnnnnnnngt

SEQ ID NO: 6830 - DNA, 3490 bp, Macaca Fascicularis
agtgtttggggaacaggcgagatagaggagctgagccccttctccaacagccgtcctctctttctgttgaccaaccagagaggcttgttgcctgaggtcagcaagctggcctccctggttggcagggggagggcttggcttccacctggcatggtttccggatgggagaaagcccctgagggtctggtggagctgttggctaaaggaagtggaggggccgtgggatgcggagagccgagggctaactctcggacagcggaacagagagagctgccgacaaacagacgcaggtggaggagccgtcacctcccagaatgaccagtgccgcccccgcccctgctaagaaaccctaccgtaaggcaccaccagagcatcgggagctgcgattggaaattcctggatcccggcttgagcaggaggaacccctgactgacgcagaaaggatgaagctcttgcagcaggagaatgaagagcttcgccggcgcctggcctccgccaccagacgcactgaggccctggaacgtgagctggaaatcgggcaggactgcctggagctggagctgggccagagccgcgaggagctggacaaatttaaggataagttccgcaggctgcagaacagctacacagcttcccagcggaccaaccaggagttggaggacaagctgcacacactggcctctcttagccacagctggatttttgcagttgcgtctgagtttgtgtgtcttctcccttgccctggccttctcagctgagatctggaattgcgggccctggctattacccagtaccccttgagtatacccgctcctttctcttccctgtgtgaggcccatttaacagtcaatgcctccctcccaggagagagctggggagcctagcctgctctgcccttggctctggtagaggtactgattgatgtctccactgaacacccaaagcttcttggctgcagtggcagcaagcccaggctgtgggcggggaggggaggctgcagatccagtccctgaactgaagatcagaaggctacttttgagcctgcagcttgctccctgctcagcgaggcaccctggctgccaccaagccctgcttcctcttccctctcctagcctgatgctggaaacagctgcacacataggaggcttcagccccctggtttgcagtttctgcctttgaggtaccagctgccttgcctggtgcccagagcccctggaatctcaggtgatggacagctcttatactgtctgtgtcctgggcccaggtggcaggaggtcatgctaagaaagcccccaccccacagccagtccagggagtgggagagatgcccagtctccttctgtctgtccgtcatttgtctctgctttgtccgccttggctgccctagcacctgtggcctcttgtgtctccaggatgggaggaggtggagggagaggaagggctggctagggtgtgggctgggttaacctcaagtctgtgcctcagatcaagaaggctgagatggataggaagacgctggactgggagattgtggagctgaccaacaagctgctggatgccaagaacaccattaacaagctggaagagctcaacgagcggtaccgactggactgcaacctggctgtgcagctcctcaagtgcaacaagtcccacttccgaaaccacaagtttgctgatctgccctgtgagctacaggacatggttcggaaacatctgcacagtggtcaagaggctgccagcccaggtcctgctcccagcctagccccaggggctgtggtgcctacctcggtcattgcccgagtgttagagaagccggagtctctactgctcaattcagcccagtcaggcagcgccgggcgccccttggctgggatgtctttgtgcatgtggacatgagcgagggtgtcccaggtgatccagccagtcccccggcccctggcagccccaccctgcaacccaatggggagtgccactctctgggtactgccaggggctccccggaggaagaactgcccctgccagcctttgagaagctgagcccctacccaaccccatctccaccacacccactgtatcctggccgcagggtaatagagttctctgaggataaggttcggatcccccgcaacagccccctgcccaactgcacttacgctacccgccaggccatttcactgagcctggtggaggaggggagtgagcgggcccgccctagcccagtgcccagtacccctgcctcagcccaggcctcaccccaccaccagcccagcccagcgcccccaacactcagtgccccagctagctctgccagctctgaagaggacctgctggccagctggcagcgggcatttgtggaccgtactccgccacctgccgctgtggcccagcgcacagcctttggacgcgacgccctccctgagctgcagcgccattttgcccatagccccgctgacagagatgaggtggtccaggcaccttctccccgaccggaagagagtgaacttttgctacccatagaacctgactctggctttcccagggaggaggaagaagagctgaacctgcccatcagccctgaggaagagcgccagagcctgctgcccattaacagtggcacagaggaggggtcaggcacttcccacactgagggcagggcctggccactccccagctccagccgcccccagcgcagccccaagaggatgggggttcaccacctgcaccgcaaggacagcctcacccaggcccaggagcagggcaacctgctcaaccagggcctctggtggccttcctgccattgctgcactgggactgcaaggaggccccataccttggcagctcagggtccccagtccgaggccttgacctctccccaatccatacctgcacagctgttccctgtgtgggtggggtcaggtggtgggccatgccaggcctgttagctgcgttgactgaccgcggcagcttgcctcatggttttccccttttcttagaatattttattctccacagataacatgcagttgggtctcaagaccttttctccaatcagcccaacccagcccagactgggctgttctggggagctgaggagtttatcagtattcatcttccatcctcctttcatagtcacaagtttttgttattttgtttttttgggggggtggtggtgtaatcgttaacttcatttctgtttcctacctgtttgctttcccccccaatcctccgcatgagctgttgccctctgggggcctggcacagctggccttggggaccagagagaggactgactcagggcccctcagctgtctcttccctctctctggaaaggaggtggggctcaggggcctcaagctgcgctctgggtgaggcctggcctctattcccaaccttggctctagactgttactccaagctttgggaaattttcacattgatgactattttaaaatcaaataaaactattttactggaaaaaaaaaaaaaaaaa

SEQ ID NO: 6831 - DNA, 1992 bp, Macaca Fascicularis
cttcacactttttaacgaggggttgggcaggagttccttccagagctctcagaagaagaaagaggctaactaaaaagagtgtcttcttctaaacatttgatttgtcaaaaatgtacgacatcaacatgcattgagctgacaaggctgcctgagagataagccccagagggcagcctggtggccagagaaggggtctgcagctaggggccaggagcccggattctgggcctggtactgtcactggccacctgtgtggcttggagccaacgtttctgtgcctatcagatgaacgcccttctagaacaaaagttccatcctgctttcagatttttaacaataaaagacacatgttcaaacttttaagattattccaaaaataatgggaactgatgaaaatatggactgtttccatatttttgcccctaggctatagtaggaaattgatagtatgctttcattaatcttgatattgagaaaaatatggtttattcagtagatattccatctcagctctccagtcagccagtctcctgtgaagaacaccactgcactgagcaacatcaaatacatggattgataatatacagagatttgtatagcatagaatttttttttaaatggaggccactaaaaggcactaaacagcaaggcagtgcttcatcaaacacagttcatatgagaaatctgatcaaacgaatctgtccctgggttaagtaaaccaattggactgctatgtgttcgttgctgaagtcagttttctacaaagttttacttttaaaagagaaatttggttgtaaaggagtatactttattagaatggattcaccattttttcctgagagaaatgttcgactttagagcaggcacttactagaattagaggtatatttggagcagaaggtcatagtaaataggaagcagatgttcagagaaagttctgagcaagtcttcagacagttattgcttacttggctctgtgaagaatgtgcttagtatgtttttacacagaaggatgcgtggttcataccctcaggatgtatagaaagaaataacagctacttcatctgtgaacatgcttggactgttgggtgacacttccttgaagaaacaattcccagttgcctagggagggttttgcccaatgattaaccaggatcttctacacatatctttctatgaccagtgggagatttcttaaatcatgactttttatgatgaggcagatgtttctatttctaacacaatcaggagtgagagaaggaaccaataaaccactctaccatcacccacaggtttgacagcactacagatactttgccctgaatgctaagttctacatcatctcagttttctggatatcatttttgtttatatattgggaaaccaaagacttcccttttacattttttttgtctttaaatgccagttatatcagctgaccagaagaactagtccttcactgaattgagatttaaaacgtttctgtaattggaagaatgtatatttatcaagatgtttctggttacttgatgaggtcaaatagaggccctctgaataaattaggttcagggttccgatcattttttttttttttaatttccttttgtgagttttttgttttttatatcttttgttttgggttctgatcattttaaataaaattatttggaggctactgccccacagctgattatatattatgggcaagtccacttaaagagcaaaaagtgtttttatagcttgatttgtccgtaacaactgtctggcactcacattggtccattagagttgagccgaagtggtagtgctcttcatgtatgtcatcaccatgcatcacacgcccactgaacatccaagttggttctgccccttagctggcatgcattgtggtagaggggaatgctaaggagtctggcatcagcaaggatctgtcagcctaatttttagagatctagttctcacttgcattctctccaaaaaaaaaaaaaaaaa

SEQ ID NO: 6832 - DNA, 2451 bp, Macaca Fascicularis
ttttttctgaaggactgttttctgccaaacttttcctcacagccactttacatgagccaattatgcaactccttgttgaagatgaagatcacctggaaacagatccaaacaagctaattgagaggttctccccatctcagcaggaaaaactctttggagagaagggctcagacagattcagacaaaaagttcaagaaatggtggagtccaatgaagccaaactagtggctttggtgaacaaatttattggttatctcaaacagaacacatattgttttccacatagtttaaggtggatcgtgtctcagatgtacaaaaccctctcctgtgtagataggctggaagtgggggaggtcagggcaatgtgtactgatctcctgttggcctgcttcatttgtcctgcagttgtcaatccagaacagtatggaataatttctgatgctcctattaatgaggtagcacgatttaatctgatgcaggtaggccgccttttgcagcagttagcaatgactggctctgaagaaggagatccccgaacaaagagcagccttggaaaatttgacaaaagctgtgttgccgcgttccttgatgttgtgattgggggccgtgcagtggagacccctccattgtcttccgttaatcttctggaaggattgagcagaactgtggtttatataacctatagtcagcttattactctggtgaattttatgaagagtgtgatgtctggagatcaactgagagaagatagaatggctcttgacaatttattggcaaacctacccccagccaagccaggaaaaagcagcagtttagaaatgactccctacaatacgcctcagctgtctccggcaaccactccagcaaataaaaagaatcgattacctatagcaactcggagcagaagccgcaccaatatgctaatggacctacatatggaccatgaaggatcatctcaagaaaccatccaggaggtgcaaccagaagaggtgttggtcatttccttagggacaggtccccagcttactccagggatgatgtcagaaaatgaggttctaaacatgcatctttcggatggaggacaaggcgatgtccctgttgatgaaaacaaactccatggtaaacctgataaaaccttgcgcttttccctctgcagtgataatctggaaggaatatctgaaggtccttcaaatcgctccaattcagtgtcctccctagacctggaaggagagtctgtgtcagaacttggagcaggaccttctggcagtaatggagttgaagctctacagctgttagaacatgagcaagctacaacacaggataaccttgatgataagctaaggaagtttgaaattcgtgacatgatgggattaacagatgatagggacatatcagaaacagtgagtgagacctggagtacagacgtcttggggagtgactttgaccctaatattgatgaagatcgcttgcaagaaattgcaggtgctgcagcagagaacatgttaggcagtttgctgtgcctcccaggttcagggtcagtgcttcttgacccctgcactggttctaccatatcagagacaacaagtgaagcttggagtgtagaggtattgccaagtgactcagaggccccagacctaaagcaggaggagcgtctacaagaactggagagctgttctggactgggtagcacatctgatgatacggatgtcagggaggtcagttcccgccccagcacaccaggcctcagtgttgtgtccggcataagtgcaacctctgaggatattcccaataagattgaagacttgagatctgagtgcagctctgattttgggggtaaagattctgtcactagtccagacatggatgaaataactcatggtgcccaccagctgacctctcctccttctcagtcagagtctctgctggccatgtttgatccactgtcttcacatgaaggggcttctgctgtggtaaggccaaaggttcactatgctaggccatcgcatccaccaccagatcccccaatcctggaaggagctgtgggaggaaatgaggccaggttgccaaactttggttcccatgtgttaactccagctgaattggaggcattcaagcaaaggcattcttaccctgagagactagttcgaagcaggagctctgatatagtatcttctgtgcggagacccatgagtgaccccagctggaaccggcgtccaggaaatgaagagcgagaactccctccagctgcagtcattggtgctacttctttggtggctgcacctcattcatcatcttcatccccgagtaaggactcctcaagaggagagactgaagaacgcaaagatagcgatgatgagaaatcagacagaaacagaccttggtggagaaaacgttttgtttcagccatgcctaaagctcctataccatttagaaaaaaaaaaaaaaaaaaaa

SEQ ID NO: 6833 - DNA, 712 bp, Macaca Fascicularis
  misc_feature (1)...(712): n = A,T,C or G
gagccatggaaagcctgaaatgctaatacaaggtaaatttggaccttacaacaagcagagatgggccattggtgggttttgagtgagacagtaacttgattcacccccaaactatggagtcctcatctatgtgatcagtgtcatccatgtactgtgctgtagggtacatggcttgccagagcaaggttggtggcagctggcagtggtcggtgaatatccaggaagtcctaactcaagccgccccaaggctgtgattcagaacattttcgtggtccatcttgtttctacctcatgggacaaagctggaaggctgtttggtttggccagcgaccgaaagcagagggagccaagagtcacagagtgaaaggcaatgtgtgccttcaactgggccctccctctccaccccactccgccttgctgcacccctggccctgggaggggcatcttttagagttaacttttctcattgccgtccaaaaatagcttgcttaaacaactagtttgttgtttaaaaaataaacataaaagcaataatacagtcataattttaaaattcaagtactaacaggaaaattaagtaacagactaatggtcccacttctgacttcttagtccactccccagagataaccaatatgaagttttttgtgcatccttccaaaatgtttctgtgtatgcgtcacgtnnnatttatatatgtatgcaacctttt

SEQ ID NO: 6834 - DNA, 721 bp, Macaca Fascicularis
  misc_feature (1)...(721): n = A,T,C or G
gcagtgtgatgactctgtataaagagagaagcttcgctcgctnnngatgcagctgctgtctgcagaccccctggactgcctggggaagtgagttggagctcctgcagcagaggggtggaacagctacannnnnnnnnnnnnntggccaaaaataacagcgcttcccagatgagggagccagttgtccagcacagtgtaatgggacggtgggccctggnnnnnnnnnnnnnnncatctccaccagatacagctttgannnnnnnnnnnnnnnncttgctccaatccaagggctttgaggtggggtttgctgttcaactgctaacctttctttnnnnnnnnnnnnnnnnnnnnnnnnnnnnnnnnnnnnnnnnnnnnnnnnnnnnnnnnnnnnnnnnnnnnnnnnnnnnnnnnnnnnnnnnnnnnnnnnnnnnnnnnnnnnnnnnnnnnnnnacccctgnnnnnnnnnnnnnnntggtggcttctggatggtgactgggnnnnnnnnnggnnnnnnnnnnnnnnnnnnnnnnnnnnnnngagtgaaaaagaagatgaccgaaaatagagacgtaggannnnnnnnnnnntaagacctgaaggaagagccagaaaggaggccagaagacaccctggagcctgtgaaaacctggaggctgcccaccggatagcatgatgatcaagactacaggttctggtgtccaacccacctggctttgaatcc

SEQ ID NO: 6835 - DNA, 688 bp, Macaca Fascicularis
  misc_feature (1)...(688): n = A,T,C or G
atcctgaatattcatgtttctcatctacagataatttgtcttcctccaaaccaaaagaaaaaactaccctttactctcttttctactcagtttatcttttgtgctatgttagaaacttgaaatctattggtgatgtggggttttatccctgactgccactgcacaggacaagagagcacagtgtttccgctggaattcaggactcctggttttgaggtagaggatgatcactgcagtacttggtttggtattgccacaggggtaactaaaccaaaggagggttatatctgcaagggaggtgtaagaaggcaaaataaggaaaaggaggaatgggttttctctttgnnnnnnnnnnnnnnnnnnnnnnnnnnnnnnnnnnnnnnnnnnnnnnnnnnnnnnntaagaaatttttagttgggctgagctggttctcttgnnnnnnnnnnnnnnnnnnnnnnnnnnnnnnnnnnnnnnnnnnnnnnnnnnnnnnnnnnnnnnnnnnnnagtccgagttgtacagacgatgtatttggattttgtcatggttcatctacagactcaaaacataatcattttaaagtaccttgggagtgtgtagagtaacttctatannnnnnnnnnnnnnnnnnngatgttttttaaacataataaagttggatcttccatgttacaatcacaaaattaaaac

SEQ ID NO: 6836 - DNA, 2125 bp, Macaca Fascicularis
gttgcttggcttggcggtggtcgcttggcttggcggtgatcgtttggcttggcggtggtcgcttggcgtggcagtgatcgcttggcttggcatttctggcttggcggtgctcctttcacagattggaaaccgcgagctttcctgctgggaggttgtggccaaggcagtagctcgctactgatggcctccaggggtggagaaaagcggggagggtctgaggggtctccgaaaccgacagtctccgccatgaggaagacccctagcgtcgggagcgtccggagccaggaggaccagttgtccttaagctaccagggggaccggtggtcctcagactccagctggttaagcgacagcgcgggcagcgacagcgcgggcagtgacagcgcaggcagcgacagcgcgggcagcgacagcgagcatgttgagggcgccttagaccagcctcagcacgacgtctgcctggaagatccctgcgagctccacagagctgcccggtcgggcgacgtccctggggtggagcgcgtcctggctcctggagaccctggcgtgaacaagagggataggaaggagagcctttggcacctaattcctgaatgtaagatggaacagtcacctgaaagtcttcctcagaataacaatccagattggcatcctactaatttgaccgttagtgataagacttgtcagaaatccaagattctgagtgttgatgatcagtgtccatctgtatcaccatcaatgcctgaaaatcagtcagcagccaaagaattgggacagatgaacttaacagaacaagaaaagatgaacgtctcggggaatggtagtctccatgacctgtgccaatcacagctaccagaaaacaaagagagcaaagaagcagaacaagacttggagctgacatcagaggaagagcaagaaagacttaaaggacatgaaaataagcagccacagaaaatgtctcaagaaccggaaatggctaaggattgtgatagagaggatatacctgtatattcaatacttcctcatgcgcaaaagtctgaggaaatgtggatcgaacaagattctgacagaacatcagaagtatatctacatgaagaattacagcaagacatgcaaaagcctaagactgaggttgacagggtggaagaaatgttcctggctttgaagaaagaaaacgttcagcttcagaaagagaaatcccagagacatagcgagtcagagccttccttacaatcagaggatgcagaggatgcagatgagcttttaagggtcctgagcacagatcttgaatttcttgatttggatcaaatcagtcctgaggaacaacagattagttcccctgcaaggcagcccttgggagaacttcaggagataacccaccagatgccccaagatgaactgggacgagaaaaaagagacttggagccagaaagcagagaggagggacaagaaaggagagtatgtgacatccagtccaaagcagggatctcccggccatcactgatgtccagcaccacagacgacaccctgtttcaaaaggatgaaagtgcctgggtgtatcccttggttgaagaagaagtggaaaagcagagaagtaatagcacagaattatcaggaaacccagctcatggtgctgctgctggcaataatgacgatggactaaatcagcagtttcctaggaagaagaagaaagggcatgacaggcctgcagataaaacatctaatgaaaagaacaaggtcaaaaaccaagtacatcctgaggctgactttgctgactcagtggggtcatctgaaacggcctcagaggattgtgagttatctcactctacttatgagaattttttgttgctgattgaacaacttggaatggagtgtaaagattctgttagcctatcaagaatccaagacacattttgtttctatgaacacttactgaaacttaagaataatggctatgaacaacttacagtaaaaattaaacaaacagaaaatatggtcagtgtactacaaaaggagctatctgaaacaaaaaagacagaattacagttaaagcttcaaaaaattgaattggagaaacagctgtacagtttgagacttgccttaaaaaaaaaaaaaaaaaaaaaaa

SEQ ID NO: 6837 - DNA, 2230 bp, Macaca Fascicularis
atgcaggacaactggaatgccccatctctctcgctgacacggacccagtcgatcctgcggctggacgggatttggaggcccggtcatttgcagagtgaatggtgaagcgggcagaaaaggtttgcttggaggaaagaccagttgcagaggcaaggcagagagagaacgggtggaggcagcaggtctgtctttgtggtaggtctctggcttccagcagggaggagggaggaggctatgcccttcctggctcttggctacaccactgaggacgctctgagggacagcatgcttacccagcctttgcacagtgccggccccaggcttccacggccctccagctaggactttgtgctgggctcatgcagaggcagggaacaggtgcacggaagagccccccacaccctccccaacacacccttgtttgaaaatcactgttctctttactcacttaaaaaagtgtacagggaacacctgttcctggcataatgctccaacctcgcagaaggggccaggtgcccctcatctggctctggctgcttccgacctgggcccacgtcatccttcacttcctcagtgaccaccactggtcacggtgctccctggcccagcctccgactcacccagcaccctggcctctcccacgccagtctgctgcacccagcgagcttccagtcacaagccaggctgaacggccgtcctgccccgttggcttggtgtctccttttttttaaagaacggaaatattccccaagaggcctcatggcctaaagactcacaattatccacgtgtaatttatgataaatgtctgggagcatttaccatttgcatcatgagtatttatagccctgagtggggagggtggaggaggccctgcagccaggagccacacacctgtccccactagtgtcccctgcttgacagggccccctcagcctccccaaggctgtcactgcagctctgacagctgggaagtgccacctttgaaagccagcgaacagtcgcccgctagggggaaggcaccgaagcagaggccctggccctggcacagaggaggcatcgcgaggcgggatgtgggccggaggggctgagcagccttcagggcagggactgggccctgcgtcactggagacgttgatattagtccatccgtctgctgccaaattgtctgctcaccaccacgtcagccccaggggtttatgtcccaggaaggcgagggtgcccatctgagcagaattgggaggggacggcaccagctggtctccctcagggcctttgcctcccagtgctgccctgatggctgctcctgcatcacagcccctgatggctgctgctagtcctaaattcctgggtttactcccagcccacatctcccacccgggcctgagggtgcggccagtgccctagtcctaaccactacaggagtcattctgagacctgctggaggccatggggtcttcccaggcccctcaatcagctgcttctgggatcagcagggcagggtgctgccagtaaagactgcggggagcacagcccagccgcccaggctgggggaaactggggcagagcttccaggtcgtggggcgtgacctctccctaaggcacttcaggccttggggcgccctccacagtgaccttcagagaggctgcaccggctcggaagaacagcgagaaacctccccgtcacactctccctggtccttgtgtccctgagcccaccccttcccaacccccagtgcctggagaatccacagactggccaggcagcctctggaggggctccaggaggccaggggtcctcagggctaggcctggagctcggcccaaagctgcttttgtgaagcctgtctcaaatccggattcagcagaggacaaaaacctcccagcctttggggtttccgggcctgtaaagatgtgtgtgcctcccaggccacgctgacgcaagggcagggaccaggccaggcctgggttggggatggctctgcaaccccagaagcttcacccaaaactccaaagacgcccaaaaggctgtgctgctgtgtggaatgtgtattatttgtgagcacgatgcggcttcttcctcattttgcagagcaacctaagtgggcagatgtacaaaccatgtgtgttcgaaacccccgagtcggtgtgtgtgagaatgcaggctttcccttagaaataaagtggtgatttgtgctgtgaaaaaaaaaaaaaaaaaaaaaaaaaaaaaaa

SEQ ID NO: 6838 - DNA, 776 bp, Macaca Fascicularis
  misc_feature (1)...(776): n = A,T,C or G
tatacatgcatgcnnnnnnntgtacgtgtgnnntgcgtgtgtgtgcatgcatgtacatatgcacatgtgtatatgtgcacgcacnnnngtgtgatgtgtatatgtgagcacgtgtacacgggtgtgtgtttgtgtatacatgtgtgttgtgtataagtgtatgacgcatgctcatgtgtgtgcatatgcacgcatgtgtgtatctgtgcacgcccgtatgtatgtacacacacagacacgtgtggatatgtgtgcgtacacatcgatnggacacatgcccgccactcagggcnnnnnnnnnnnnnntgtctgtccttgccacagacacaggatgcatgtgcagaggcctggggagcagaccactggggatgtgctgcaccctgcacatgcccaggggaagcggaagatgcagccggggtgggggacacctnnnnnnnnnnnnnnnnnnnnnnnnnnnngacgaannnnnnnnnnnnnnnnnnggctcctgggagcgacttttgctgcccacccccacccatccccttccccttggtgttgacctttgacccgggggttcccagggccccgtagccctcgatcgggagcagcctctcagaagccagagcgggcagttgctggcgattttgagaaaacttgnctgcatcgtccggagccatgcctccagtcggcctctgacaagtctctgcgtcctggcnnnnnnnnnnnnnnnnnnntgccagccatcttaatcactgctcccaccaccacacaatagatnagnnncgtaaaaaaaa

SEQ ID NO: 6839 - DNA, 2336 bp, Macaca Fascicularis
  misc_feature (1)...(2336): n = A,T,C or G
attatgtagaaattatcctaaatactatttaatcaagcaaaaataatatactcatggagtacaagatttcactttctgaaatgtatacgtgtcagttaactaaggcgatccagtagcaggaacagctgttttgctttggacaccttactagggtgtcagacctgtgtagactggggaaggccccttagagaggtagctgcctagggcctggggctataggggctccaagtggagcagatggagaagtgagctggctagctagtgaaatgagggcgccatctttggtgtgtgtcccgggcagtcatgtggcacagattgtggctggcagagatctgggagtgtgcgttctggtggctgcaggaaagcctttggtgaaggaccggactgaggcccaggaagttgagtattcccagtagtttcactccttgcttctgtgggcacctctgacactgcctcgccacttacaccggaaaccatgaaacaggcctttccttgtggtatttgtttggaaatactgatcaaagtaatcttactggatttagaaaaaaatgattagatgatcattttagttaaataggaatttctagatatctggtcataacccttcattctggctaaaattaaatggtgtttccgctgtgactttgtttcttaaggcagctgttcacaggggatcccagattatcttacacctggaagttctgatactactcacagttttcaggtgttcctttcaaaaggtcaaaacaggctggatgtgannnnnnnnnnnnnnnnnnnnnnnnnnnnnnnnnnnnnnnnnnnnnnnnnnnnnnnnnnnnnnnnnnnnnnnnnnnnnnnnnnnnnnnnnnnnnnnnnnnnnnnnnnnnnnnnnnnnnnnnnnnnnnnnnnnnnnnnnnnnnnnnnnnnnnnnnntagttactcaggaggctggggcctgaggatcacttgagctcaggagttaaaagttgcagtgagccacagtctcaccactgtactccagcctgggcgacacagcaagaccctgcctggaataaaaacaataaaaaacaccaactctcaaaacacttaggaagatgttcttccctccaaggatttagctagcgaatacctgtgttcttcaaggcaataacatgttacgattttgtttctgggcaactcttttgctctcagagattataaaattactattgacattgatgggcagtggttcttaaatttgggtgcacaccagaattactgcagaaggttttaaaaattcaaattcctaggttctgccccttgtactttgagtgactcagccagtccagagccttgctactcagacttcacacatgggatcatgttaaacgtacagaagcacaggccccttctcagacatagaatctgttttgatgaggccccaggtggtacgtatgtataaacgagcagagcgtcttcatgtcggacatgctcccaaggctgctggttggtggatcagactgtgagaagcatggtctgtgaatctgcatttttcattctgatacagtcgagaaaaccacctattatttagcagcttcttaaaaagttaaatatagatgtaccatatgacccagcagtgtccagccctggatatctccccaggggaaatgaaaacatgtttccacacaaaggcctgtacacaaatgctcatagcagccttctgcataatcgtcccaaactgcagacagcctgagtgtccatcatctggtgaatggataaacagatgtggtttatccataccgtggaagatgacgcagccgcaagaaggcatgtggtactggcccacactccagcacgatgaccttgatggcattatgctaatgaaagaagccagatctgaaaatccacatattttatgactctgttgtatgatatgtccagaataggcaaatctggagacagaaaatagattaatagttgcctggggatggaggcagaagtgaggattaactgtaaaaagatgtgaggaattctgtagggaggatgaaaatgttctaaaactggattatgggccgggcgcggtggctcaagcctgtaatcccagcactttgggaggccgagacgggcggatcacgaggtcaggagatcaaannnnnnnnnnnnnnnnnnnnnnnnnnnnnnnnnnnnnnnnnnnnnnnnnnnnnnnnnnnnnnnnnnnnnnnnnnnnnnnnnnnnnnnnnnnnnnnnnnnnnnnnnnnnnnnnnnnnnnnnnnnnnnnnnnnnnnnnnnnnnnnnnnnnnnnnnnnnnnnnnnnnnnnnnnnnnnnnnnnnnnnnnnnnnnnnnnnnnnnncaaaaaaaaaaaaaaaaaaaaaaa

SEQ ID NO: 6840 - DNA, 566 bp, Macaca Fascicularis
  misc_feature (1)...(566): n = A,T,C or G
tccatgaaggatctgtgacagcaggtagtcaggcagacatgagcaaggcaggagagggccctcctccaaccaggaatnnnnnnnnnnnnnnnnnngatggtcaggcagttgataaattgcttctctaaaataattggnnncagccagtgccaggaagaggcaatctcccaacagatagaaacacctgaagatggtgatcggcctcatgatatgtcaggagctgggtgagtgggctcaagcatgcacactaaggcaaaagggcagcgataannnggtagatgaccttcctgtaggaacaccggtaagggaaaaacacctcaaatgagcgtgcgcataacttcagtaaacacaactgtgcattcggcccctcccaggtgctgacaggccaccgcgcacgcagacagcccgccccaagggaggaatcaggggagaagagagatgcaacccccccgaagcatgccaatctacaaaaccccgagtcaaaggtcaagccacgcacttgactctctcaagtcacctgcttggccctcttctaagtatactttacttcctttcatttctgctct

SEQ ID NO: 6841 - DNA, 1573 bp, Macaca Fascicularis
  misc_feature (1)...(1573): n = A,T,C or G
gacannnnnnnnnnnnnnngnngggnnnnnnnnnnnnnnnnnnnnnnnnnnnnnnnnntgtagatttctttaaccannnnnnnnnnnnnnatnnnnnnnnnnnnnnattctgcactgaagcaagctgtccagtcatgtctgcaggtccgagatatgaatatcattgggcnnnnnnnnnnnnnnnnnnnnnnnnnnnnnnnnnnnnnnnnnnnnnnnnnnnnnnnnnnnnnnngactgnntttcaggatcagctnnntgatgaaactctttttccttctaagattggtgtcccatttcccaaaaactttatgtctgtggcaaagactattctaaagcgtctgttcagggtttatgcccatatttatcaccagcactttgattctgtgatgcagctgcaagaggaggcccacctcaacacctcctttaagcactttattttcnnnnnnnnnnnnnnnnnnnnnnnnnnnnnnnnnnnnnnnnnacctcttcaagaattaatagagaaacttggatcaaaagacagataaatgtttcttctagaacacagttaccctcttgcttcatctattgctagaactatctcattgctatctgttatagactagtgatatagacgttaagaaaacaggataaaaagatacccattgtctgtgtctactgataagattatcccaaaggtaggttggcgtgatagtttccgagtaagaccttaaggacacagccaaatcttaagtactgtgtgaccactcctgttattatcacagtcatacttggttgtaatatgtnnnnnnnnnnnnnnngcttataaatttacttcttattcttttactcgtttactcagtcatttctttacaagaaaatgattgaatctgtttcaggtgacagcataatggacatgaagaatttccatcaataatttatgaatgagtttccagaacaaatttcttaataacataatcagattggttttattcttttattttacaaataaaaaatgtatttttnnnnnnnnnnnnnnnnnnnnnnnnnnnnnnnnnnnnnnnnnnnattttagttacaagtttgtatggtagtgtttttataggtaagatacgtatattttttcaaaattcatgattgcagtttaaatcatatgacatgtgtgggtgggagcaaccaaagttatttttacagggactttattttttgatctttatttgagattgttttcatatctatctaaattattaggagtgtgtgtatcagaagtaattttttaatgtcttctaaggatagaccaggcttttagtctaaaaagctttattcagatagtagcttttggctgagaaaaggaatccaaaatattacaagaaatttaggtctcaaaaccactatttttattatttcattatttttcagaggccttgaaattctggataagagaatggagaaaaatactcagagtacttgattattttatttcattttattaaaaaattacttctatgtttttactgtcttgagccttagttaagagtagtgtagaaatgcatgaacttcatcctaataaggataaaacttaaggaaaaccaca

SEQ ID NO: 6842 - DNA, 417 bp, Macaca Fascicularis
  misc_feature (1)...(417): n = A,T,C or G
gattcaaatgcttagaaatgtcattttgtcttagtagcaactttaaagcaaacgtgagttaatttatgaaggtattgaaaaaaatcatgtatgcttcatcttnnnnnnnnnnnnnnnncaagggtactaattctagattagtctattcaataannnnnnnatgtttttagaagtttagcttttttttagaaatagatgcataggttgagaacattcaacttttagacttttttttaccatattcaaaaatatttaccaagtttgtccaattttcttagatagcagaaattgttaaaatcagccaaaatttatttctcaaacaaacacagatagctttgaatttagaaaagaagagcttagccctaactctagctctgtgagccaagtttcaacccatgaccaattatgtggttgcag

SEQ ID NO: 6843 - DNA, 920 bp, Macaca Fascicularis
  misc_feature (1)...(920): n = A,T,C or G
ggttccatgccccannnnngaagagcagctgtgaatatgtgagtnnnnaccaccagcctgccgccaagatgggaggacagtaattnagatnnnnnnnnnnnnnnncctgcctgacaactccccagctgtcccccgaccccaggctcagactgtggtgccaaggagtctcatctgtctgctgatatccaatacctgcttcgtgtgttcttagagccctcatcacttcccatgccccatcttgactcccatccccgtctatctgtgccctgagcatggctctgccctcaggtcctcttgcacaccttggcagcctcctgtagttgacaggtaagctgtaggcatgcagagcaattgtcccaatgccacttgcttcttttccaatctaacaggctgtgggatttgcagagcatttcttccatgtctttgaccacagggttgttgctgcccagactctagaccacatggcatcaggctggggcagagnnnnnnnnnnnnncttgggcatccttcccatgcttgggtcttacacaagtagaaggctgttgctctgaattatgtggacatgcctcagccccatggactaggcaggggtctagtataaaaacactcccggaaacgcctttgnnnnnnnnnnnnnnntagcacttctagtgaacctctacttatctcaagttctatgctaaaggcaatttatcttgatgtgatgaggtattctaaatttcagaaccaagcttgttagcgagatatgcatatatatccataaactctctttactttgtctccatcacttgnnnnnnnnnnnnnccctgacctcagcatctctcctcaaaaaaaaaagtatttgtcatctctttatcttnnnnnnnnnnnnnnnnnnnnatgtttgtgcacttaccttaacttttatctattttagtcat

SEQ ID NO: 6844 - DNA, 779 bp, Macaca Fascicularis
  misc_feature (1)...(779): n = A,T,C or G
atccattganngcnntgnccccaattgctnngtgacnncagtnntggatcaaatgcaaacaganntttccttatgacaaatnctgcactatagcccacagtattatattgctttactctgttttttttgtttctttccctgaggtggagtctctctctgtcgcccagggtagagtgcagtggcgcaatcttgnnnnnnnnnnnnnnnnnncnnnnnnnnnnnnnnnnnnctcctgccttagcttcctgagtagctgnnnnnnnnnnnnnnnnnnnnnnnnnnnnnnnnnnnnnnnnnnnnnnnnnnnnnnnnnnnnnnnnnnnnnnnnnnnnnnnnnnnnnnnnnnnnnnnnnnnnnnnnnnnnnnnnnnnnnnnnnnnnnnnnnnnnnnnnnnnnnnnnnnnnnnnnnnnnnnnnggctatattgctttactcttaacatagattaaannnnnnnnnnnnnnnaaattttgtatggcacacattcagaacatgcattttcttgcatctcttgctctttttctactctccttaagcattcataggcatgcattttctactatnnnnnnnnnnnnnnaaaatctgtaatactcttacttgtggtcattgctggctatgtaattcgctgagaccagtgcaaaatgaaaatatgggacctcctctgtaaaaaacaggaaaaaatacagttaaagatactaatgtaatagggataatagtgatannnnnnnnnnnnnnnnngcttaaacattgcaaaactaatagttgtgatgtcataatttt

SEQ ID NO: 6845 - DNA, 716 bp, Macaca Fascicularis
  misc_feature (1)...(716): n = A,T,C or G
gtcaggggtttaagaccagccannnnnnnnnnnnnnnnncccnannnnnattgaacacacaaaataaaaattagccgggcatggtggcacacgcctgtaannncagctactcaggaggctgaggcaggagaatcacttgaacccgggaggcagaggttgcagtgagtggagattgcaccattgcactccaacctgggcgacagagtgagacttcatctcaaaaaaaaaaaaaagaggttacattaattatttttatatttgactatattaggtctctttcacgggaagctgttgttttctttctatctcattactgtataagagtttccttaccctttatgtattgaaatatatataaatgccaaacttaaattatttggataattaagtttttgcaaatcttggaagtaaagataatgtttgagcatattaatgaataaagttaactgtttcatttcacttatataagttaactggccaaattggaattgtatgtgnnnnnnnnnnnnnnnnctgtcctgggcaagttgcttatgtcatccatagacaggataattcttcaatcacaagtaggttaatgttcttatttgagaaattgataattgtcagctagtaattcacattggtagtaaagatgtgcttttgttttcttaccaaaatacttttatgtgtttgcagagtttgttcttttcaatagaaatattttcaataaagtg

SEQ ID NO: 6846 - DNA, 5270 bp, Macaca Fascicularis
  misc_feature (1)...(5270): n = A,T,C or G
ctgcagctcatggggggaaagggggaggagggaagccaagagcaggatgcgcgcagtcagcctgcaccctccccccaccctggaggaggagcccccactggcacaaatctcgcccgtttgggcccacggagacgggccagctttcacaaggaggatctggttccaggcctcgaccctaaaaagtcttccctgggctttcaagagaaccacatgagaaaggaggattcaggctctgggcagcttcaccacccaccccccagtctgcaaaacctggacccttgagtccacctgccccaaaggcgggcacaagacagtagaagggaacagaggacacataaacacagagagggccacagaggctcccacagtcacctccactgcctggcggggtgggtggggcgtctgagtttggttcccagcaaatccctctgagccgcccttgcgggctcgcctcaggagcaggggagcaagaggtgggaaggaggaggtctaaagtcccaggcccaattaagagatcaggtagtgtagggtttgggagcttttaaggtgaagaggcccgggctgatcccacaggccagtataaagcgccgtgaccctcaggtgatgcgccagggctggctgccgtcggggacagggctttccatagccatggcccagcagtggagcctccaaaggctcgcaggccgccatccgcaggacagctatgaggacagcacccagtccagcatcttcacctacaccaacagcaactccaccagaggtgagccagcaggcccgtggaggctgggtggctgcactgggggccaccgaccacccacctgccccgcccaagggaatctctcttctgcacatccccaccagcagaggctttctcccatagcttttcagacgacatgaatccaggggtcctctccgaatctagagggccccactcgctctgcacacatgaactgaatgacctgccaaaggccccacctcctaataccatcaccttgggggttgggatttcaacacaggaatttatgggggacacgcacattcagatcatcatgaacagtaactcctatatgtgacagaaggtgacagaggtgggtagtggtcttcccctcaagggggtgagttaccactagttggggaatctggaaaggcttctggaaggcaaatgcatctgagcttggctttacacgaggaaagcgtctgtctatggaagggcagaggactctgggaggtaggaggtagagctgaggcgaagggaagaggggagcagggaagcggggtgactgcacactgggagcagggaatcagtttggggagatgatgaggagttccgttaagttcaaggtgccagtgccggtgaccagcaggcgatggtctctggcttgagcgacaggatggaggggaggctgtcggtctgaggatgggcaaagctggagggaaagagccaattgcaaaggcaggagggcgggaggcggaggggaggccttgatggggcagggagaggtgagatcggcattggtatagacaggcgagctgccgcccagctcctctctctcctctgcctcctgcccccaggcccctttgaaggccccaactaccacatcgctcccagatgggtgtaccacctcaccagtgtctggatgatctttgtggtcaccgcatccgtcttcacaaatgggcttgtgctggctgccaccatgaagttcaagaagttgcgccacccgctgaactggatcctggtgaacctggcagttgctgatctagcagagacagtcatcgccagcactatcagtgttgtgaaccaggtctctggctacttcgtgctgggccaccctatgtgtgtcctggaaggcttcaccgtctccctgtgtggtaagccagtcggggccccctgctccagagggagagcaacagaggtttaagaggaaagaaagaaagggggaggagaggaggagaacagaggagcagagagtaaggcgctggggtcagtggggaagcaaggcgggaggagaggctgaatgacatggggaaggaagtggaaagcaggagttagagaaacaagctgacccaggggcctgctcaccctggacctgaaaacactctttggagacttaggttttacagctgggtgggaggacacctcctgattttgaaagctttcggctggtcggggaagggagcagtgacattgaaggctgttccacctttgcttcggcacaaagccctcatctgtctgctctccctgtagggatcacaggtctctggtccctggccatcatttcctgggagaggtggctggtggtctgcaagccctttggcaacgtgagatttgatgccaagctcgccatcgtgggcattgccttctcctggatctggtctgccgtgtggacggccccgcccatctttggttggagcaggtaagggtgcaagggcgcaagatggagtgggcagggtcagactctgtgaccttaaggcaaatcacttcctttctctgggcacctctgagcatgcaacgtctatcaatgtatgaatgtggctgcaacatagaaatggatctgtggtctccgaacctctggaaacatatttgtcccaagcacgatcgggtcacaggagcacacagagctcctgcagagcacatgtcctggccaggccaagcaagtggctcaaatgtttgattgggagggactggatggacagcatttcactgttttatcaacaagcccgtgaataagttctcgtggtgtttggagagggaatgttctttttttgggaacgttccatcattctgggaaacaaaccttgtgaaagcctgtctctgtctcccaccctcctcatgccgccatgccccacacagttgcctgttatcaaacatgtgtggcgagctgaccctgatggaggctctcccgcgggttgtctcatttaatccttcaggccacccagtgagcagggccttttatttcagtcatggcctagctgacctcagataaaagactcagctcttcacgggtgttctcagaaggtcagggcaagatggaacctcacactccgtttgtaaaaagggggagtgattgggtagatgaaaatgttctggaagcagatagtggagatgtttgcacagcatcgtgaatgtacccaaaggtcaataaatggtactttttaatttaatttttttttttttagacaggtctcactctgtcaccccaggctggcacagtgccagttggtgttaattatggctcactgccacccttcgacttcctgggctcaagtggatcctcccactcagcctcctgatgagctgggactaccagggtgcaccactttacccggcttaattttttttaattttttggtagagacaagatcctcatgcgtgttccaggctagtcnnnnnnnnnnnnnnnnnnnnnnnnnnnnnnnnnnnnnnnnnnnnnnnnnnnnnnnnnnnnnnnnnnnnncattgtgctggccctatatggtacattttatgttatgtacattttaccagaattttaaaaacaggaaggcatgacatctaaaaatggacaggatttaccaaaatcctacccaacggttttgttttgggttgatgcaaatgttctggaagcagaggtggtgactgtcacagaattgatcacttcaaatcaggaaatttcatgcaaagtgaatttcacctcaatttaaaaaaacaaactccatccgagtcagcaccatgcctgagctgggggtcctgggtcactgccccctgcatcaggactggctgctggcccttctctccaggtactggccccatggcctaaagacttcatgcggcccagatgtgttcagtggcagctcgtaccccggggtgcagtcttacatgattgtcctcatggtcacctgctgcatcattccactggctatcatcgtgctctgctacctccaagtgtggctggccatccgagcggtaagccccccgattcctcctgcccctaagtatctctgcccccaaatcagtccactgagactcctaaactatttttttcaaaaatcattagagaagaggattctacccctataagaaaatattaagatccagcgatgagaatcaggcgattcctttggggctgtaccactgcctgcagtctagaactcccccagggccagcctgaggccgccatgtctgcctgggacccgctatgcacgactcagggctggaagctggctgctgggctcctctcctccttcccacatctccctatgcctggggcacctgcctcttgctgccccccaacccccgactcactgtccctgtctccctcaggtggcaaagcagcagaaagagtctgaatccactcagaaggcagagaaggaagtgacgcgcatggtggtggtgatgttcctggcgttctgcttctgctggggaccctacgccttcttcgcatgctttgctgctgccaaccctggctacgccttccaccctctgatggctgccctgccagcctactttgccaaaagtgccactatctacaaccccattatctatgtctttatgaaccggcaggtaagcaacgccatcagcagatcccactcaaaatactgtgtggcctagaaggacagagtgatggccccacctggaatcatgtctctgatgagaagcccgcagagcatctgggggatcccgggcaaccacccggctccagtgtgacctcgtcttaacctgaacacatcttttggggaacacacttcaacccagtgtagtcaccatcaactgctaagtcggatgacatcccggcgtgtgagggagaaataacccaagcctccctccatcccccatggcgtttggaatgggtgaatggaaggctcgggcacgtacgttcagcacagggctccaccctttcctgctctgctcaataacactttctgtccttccagtttcgaaactgcatcttgcagctttttgggaagaaggttgacgacggctctgaactctccagcgcctccaaaacggaggtctcatctgtgtcctcggtgtcgcctgcatgagatctgcctcctacccatcccgcccaccagggctttggccacctctcccttccccctcctccatccctgtgaaataaatgtaatttatctttgccaaaaccaacaaagtcacagaggctttcactgcagtttgggaccacctgagcctctgcgtgtgcaggcactgggtctcgagagggtgcaagggggataaagaagagagagtgcttcatagactttaatctttcccgagcctcatgtctatcgat

SEQ ID NO: 6847 - DNA, 720 bp, Macaca Fascicularis
  misc_feature (1)...(720): n = A,T,C or G
ctatgtgttccactcactctaccccaaatatatcctccctcctgtggtcaagtgccacgcagatccatgtcccaatatannnnnnnnnnnnnnnnnnnnnnnnnnnnngaagaacattttcaccctcttcatggtggccacagctgccatctgcatcctgctcaacctcgtggagctcatctacctggtgagcaagaggtgccacgagtgcctggcagcaaggaaagcccaagccatgtacacaggtcatcacccacatggcaccacnnnnnnnnnnnnacaagacgacctcnnnnnnnnnnnnnnnnnnnnnnnnnnnnnnnncagtcatcctcctctcttaccagaccgcccccaagaccatgtgaagaaaaccatcttgtgaggggctgcctggactgggctggcaggttgggcctggatggggaggctctaagcctctctcgtaggtgcaacctgagagtgggggagcttagccgtgaggtaggggcaggcaagagagagtattcagacactctgggagccaattcccagtcctccgctccagccacctgccccagctggacggcattgggccagttccccctctgctctgcacctcggtttcctttnnnnnnnnnnnnnnnntgagggccactgcccagggttggagggaggcgggcannnnnnnnagaacacacnnnnnnnnnnnnnnannnnnnnnnnnncactgtcagagct

SEQ ID NO: 6848 - DNA, 768 bp, Macaca Fascicularis
  misc_feature (1)...(768): n = A,T,C or G
acagacagggagnnncacggctcctgatcatgcccaggctctagcctggggcctccctccttggcagcttcctcacnnnacgcccctgacaccctcagttgctgtggggatgcccctccagggcaccagctcagggctaagggaaggaagacaggagcagctcagagctgccaggccctgccttcctcacagacctggtggggcagggcctgttcacagcagcaggagtgaaggcctggccatcggtggagaggacagctgttagaggggtggaggccagggcgcggggttgaagagtttcacatatcatcacagcatacactgggaatctggtggaggtagaggaacccagggccactccctcagtacaaagggaaaccaagctgaatgtgaccactgctgccatgtcccatgtccacgcttctccccgggaataactggccctgagacccctagacccaaggaggcctgtccatgccaagcatccaggaagcatggccggccctgtccacccatgggtcacgttggttcccaggggcagcatgggagagctttgggggcaagagggagagtccgggtggggagacaggacttgcccaagcagaaggcaggaccctgggaaatgtataatttaaggacatcaataatagtattatttttttttttcaaagggaaaatcaatatgtacaatcagaaatcatttctctctgtaaatggttggatttcatttcacccttaaacggacacttaaaggagaaaatanncaga

SEQ ID NO: 6849 - DNA, 677 bp, Macaca Fascicularis
  misc_feature (1)...(677): n = A,T,C or G
cttaattggtctccataatcctttgaatggaaggtgacctgtgagagattgaaccgtggagaaatatgaaaaccctggattctgagtgtttgttgggcagggcgtttagtactgtctcccctttaccagcaaacctgacttcaccgtgtttcttccctttgcctacagccagttaatatctgagtaacttatctccctcagtaaaataatttatttaaataatttttttctcctttctcttagagtctcctggcattagggcaaatgatgccattaggctttttctttctgacaacatgacactgaagagttctggggaaataccatcagtgttaactatttgaaaatgttccaactttattgtttttaaagagtgattttctaaatgattaaaaaagatttttttttttgagacatnnnnnnnnnnnnnnnnnnnnnnnnnnnnnnnnnnnnnnnnnnnnnnnnnnnnnnnnnnnnnnnnnnnnnnnnnnnnnnnnnnnnnnnnnnnnnnnnnnnnnnnnnnnnnnnnnnnnnnnnnnnnnnnnnnnnnnnnnnnnnnnnnnnnnnnnnnnnnnnnnnnnnnnnnnnnnnnnnnnngaccaggctgatctcaaattcctgagctcagatgatccacccacttcagcctcccagagtgttgggattacaggcgtgag

SEQ ID NO: 6850 - DNA, 726 bp, Macaca Fascicularis
  misc_feature (1)...(726): n = A,T,C or G
gnnnaggnnnnnnnnnnnnnnntcannncccacacacgcacagacttagagagaaaccaattctttggtctattttcttggtagctttattgattgccagggaaaacaaaaaccagaaaattaatctctaaaattaaactttacactgaatgttcttgtttctctaattagaacctctgctagcagctgtggctatacacacacacaccctcacacctacacgtttgcactctggaactgtcagagggtgtcaggcacagacagactctaggttgcctagacaggcatannnnnnnnnnnnnncccaagccccctttggtgctctgcttagcgtctgcttagtggaaggagtcnnnnnnnnnnnnnnnnnnctggattggggttgtagcccatgacctgccctttggggacacagttctggaggctctgggccaatcaatcagcctgaggaggatggggaatggcgctcagcctgaatcagtcagctaggtctcttgtggccctgggggctgatgtgattcctgtaggtgtggccccagggtggacagctacagagtgatggggactcatggagggcacctagaaggctccatgtggcctggggacaagggcttgtggggtgggctgggcctggctggggagaagacaggtctctgtcaattgggtgcatcacactgtggcctttttgtcgtggatttaagcgcaaagattgtacaaatcaaactg

SEQ ID NO: 6851 - DNA, 739 bp, Macaca Fascicularis
  misc_feature (1)...(739): n = A,T,C or G
agcaggcacaacctgcaaacacacattcggttcagcttagnnnnnnnnnnnnnnnnnnnnttacatagccgcacctgctaaacgcagttacacagcaataccgacttccgtgtgatgctagaacgtggtacagtgtgttaggctgctgtggtcagagttgtagcattgttagcactaagtaattcctcattaggtggactttggtgagagctttaccctaacccaccctgaccttgggtacttgagctaatttccacatggccctggcttcgtgtttttttgtttttttgtttttttgtttttgctttttcttttgttatggacacccatcgtgtatggctcctcatctgagccatcactgctccagaaacacatggggcannnnnnnnnnnnnctcctccccgattcttccaccccccacaccatcagaattcagatttctctccacgtggtgtctgcctctgtccctttccaggctggnnnnnnnnnnnnnnnttcggatggtgcagcctgtgcacctgcctcagacagacccaccaggtaccacctgtctttttgtggcatttgggggatgcatgggcggcctgccccccacccccgcccctgcccgtcacatgctgcgacaaggttctggctggatgttagaacggatgggggtggggacagccctggcagtgattggttgaatgaatggggtcacaacatcccttttcctgcccctacagtttgtgttgcatat

SEQ ID NO: 6852 - DNA, 707 bp, Macaca Fascicularis
  misc_feature (1)...(707): n = A,T,C or G
aggccaaggttgggnnnnntnnnnntccccgtcgctgtccccagagcctagacctcggggacnnnnnnnnnnnnnnnnnnnnnnnnnnnnnnnnnnnngacagagcagggcctccagccccccagaggaccagtgggggtgctcttaggccttcctgctctcccaaggttgcggggacagtagagtgctgactgagccccagactcaatcacccaaaggatggcaacaatctatccactccagacctttgggaaatctgggtccctctcctaatttgatccatttggccccaactccagagcctggaatgggagatgaaactagtnnnnnnnnnnnnnnnnnnnnnnnnnnnnccccaggtctctagcaagccctgctgnnnnnnnnnnnnnnnnnnnnnnnnnnnnnnnnnnnnnnnnnnnnnnnnnnnnnnnnnnnnnnnnnnnnctgcgtcttcgggcccctgcgccaccggtccccacggcccgccaggagtctctgtacccactaggcttccctgatgaccatctatctgtccgtccctgtgtctgctgtacgtccctcctgctgcaccctctccccacacacccgtcgcccataagagagaaacctctctagggaaaggcagggtggctccacccannnnnnnnnnnnnnnnnnnnnnnnnnnnnnacaaaatagcccagaggtattttatctgtcaattc

SEQ ID NO: 6853 - DNA, 1746 bp, Macaca Fascicularis
aattatttctccttcaaaatggagacagattgccgtcacatgtattatccctcaaaatcctttatgatttgtgataagatgtctgcattttcagggactcatctgaggctaagctgaccatcgttcggggagaccctcagggaaaacaaaacaagaaacagagaacttggaaacggacactgattactttgaacgtttgctcagccggggaagcaggaactgttcggccccgggcgggctgcctggctccggacagaggacagatccgaggtggatggataaggcaaaaggtagccctgaggagaatgttgactcctgctcgtcacctgtcaggatccatcctcctgtcactggcttatatggacaagtcagcccacatcacgtgactgcaggttgctaaaaacagctccggcacccactccaaaccagggcctgaaacaatgtcctccaccgagggaaacgtaaaggacacttgatcacacaatccctggaataatatccaggaaacacttgctggagccacttgcagcacccttccctgcagcacacttggggacagcgaggagatgagcgcatctctgaattacaagtctttttccaaagagcagcagaccatggataacttagagaagcaactcatctgtcccatctgcttagagatgttcacgaaacccgtggtcattctcccctgtcagcacaacctgtgtaggaaatgtgccagtgatattttccaggcctctaacccgtatttgcccacaagaggaggcaccaccatggcatcagggggccgattccgctgcccatcctgtagacatgaagtggttttggatagacatggggtatatggacttcagaggaacctgctggtggaaaatatcattgacatctacaagcaggagtccatcaggccagaaaagaagtccgaccagcccatgtgtgaggagcatgaagaggagcgcatcaacatctactgtctgaactgcgaagtgcccacctgctctctgtgcaaggtgtttggtgcacacaaggactgccaggtggctcccctcactcatgtgttccagagacagaagtctgagctcagcgatggcatcgccattctcgtgggcagcaacgatcgagtccagggagtgatcagccagctggaagacacctgcaaaaccattgaggaatgttgcagaaaacagaaacaggagctttgtgagaagtttgattacctgtacggcagtgcaggtggtcagtgaaaatcagtgtcaactcagaagtgactgatttatcaatacatggacaaaaagtaaatcattgaccaaagctatgaaatgtttcacaaagttttcctcttttgcgtaacagatatcactggatgtacattcagaaatgttctttgaatctggtgacactttcatggtccagaaagctgaaggcctgggcatctcttatgacatttttctaatattagttttagattttcatatattaggcactttaattgaaaaagatcttccagcaagagctgtctactttctcttgtattcactgtggcaccaatctggtaaattgtagaacaattgcatgtatttaaatatatatacaaacatatcacacactaaacatatatatatatatatttaaatcatgctttgttaatatttgtcccaccataatgcctccttcagaacgtaagtgtaactttactctatatgaactcttaaataaatgatgtttttaaaaaaaaaaaaaaaaaaa

SEQ ID NO: 6854 - DNA, 671 bp, Macaca Fascicularis
gtcttgtgacacagactgctttgggcccctgggtcactcttccaaggccctcgctgctgtagagcacagagacatggggctggccagtgtcgactgacctgaggagacccctttgtttgttgcctttgtaactgtcactaaaccgacccctctgccctttcagtggcaactctggtctaagggaacattcagcactctagcggcatctgattggaagttccctcccccagggaatctcaattccttcctctctccatcccagaaagaaacaggatggattttcctctcttctccccgctaccttcactaccagatttttatgctacagtttcattcttgattgtgatttctccatgggattttttttttctggtgacatttctatcatggaagtaggaagatttcggagtgctttgtaaagatttcaattgtctgtctctttctctctttgacttgtatgaaggagattgtacattgcctgatacctctttgtaaatgagaaatattgctaacatccaagcattctgaagtcttgcttatccttctgagtttagttctcatttcattttacattttgtttggggacttggggcaagctatttattagagttttgcaacaagagttcattgtttgaagcctctaaagactactgtaaaatcaaagaataaaa

SEQ ID NO: 6855 - DNA, 597 bp, Macaca Fascicularis
  misc_feature (1)...(597): n = A,T,C or G
agtgcagtgacgcaatctcagcttactgcaagctctgcctcccgggttcatgccattctcctgcctcagcctcccaagtagctggcgccnnnnnnnnnnnnnnnnnnnnnnnnnnnnnnnnnnnnnnnnnnnnnnnnnnnnnnnnnnnnnnnnnnnnnnnnnnnnnnnnnnnnnnnnnnnnnnnnnnnnnnnnnnnnnnnnnnnnnnnnnnnnnnnnnnnnnnnnnnnnnnnnnnnncgctattttcagttcttatgctgggaccactttgctttgtagttttttctgtctttccaaaatcctcactctgttcactgtttgtctcagggtaaatcttcccccaccgagcttgtgaaaaactttaataattgggtagagaataatttagaatggatatttattggaggtggtaattagggaagatgcggtgggggaagttgaaccgggatgacaacggggtacagagtgaggattttggaaagacagaaaaaactacaaagcaaagtggtcccagcataagaactgaaaatagcgnnnnnnnnnnnnnnnnnnnnnnnnnnnnnnnnnnnnnnnnnnnnnnnnngggcagatcacgag

SEQ ID NO: 6856 - DNA, 2379 bp, Macaca Fascicularis
  misc_feature (1)...(2379): n = A,T,C or G
ttctcctccttctctgaccacttctcgggctcccctcccctctcccacatctctgcccctgatgcttttttctcttcccgagatggtccactcccatgggtccaattactgcctttgatattgcctttttattcccatacccaggtctgcagcagggtctcccctcaagtccccagagtcccagcacatcatgtccacatccttcaggacatcatctcctgccggtcagccaggacctcagactccgaaagctgacaatgctatgtgtcacctcagagctgacacagctcctcctctgaagaactcagtctcctcaacctgataaaggacatctagaaaaggccacggctaatgggttttcactcaaagctgaaacacaaaatgctttccccagaagatcaggaacaagacaaggatgtctgttcacacagcttctgtttgttcaacattgtactaaagaggccagccaggacaatgaggcaaggaaatgaagtaaaagtcatccatattggaaaggaagaagtacaattgtcatcatttgcagataacatgatcttgtacgttgaaaatcctaaggaattcactaaaaaggattaaattaataaatgagtttagcaagtttacaaggatatgtggtcagtgtacaaaactcagttgtatttctatacaatagctatgagcaagtcaaaaatgaagttaagaaaacaattccagtcnnnnnnnnnnnnnnnnnnnnnnnnnnnnnnnnnnnnnnnnnnnnnnnnnnnnnnnnnnnnnnnnnnnnnnnnnnnnnnnnnnnnnnnnnnnnnnnnnnnnnnnnnnnnnnnnnnnnnnnnnnnnnnnnnnnnnnnnnnnnnnnnnnnnntggcacctgtaatcccagctacttgggaggctgaggcaggagaatcacttgaaccagagagtcagaggttgcagtgagctgagatcacaccgctgcactccagccttggtgacagagcaaaactttgtcttaaaaaaaaaaattccatttatattagcatcagaaagatacttatgaatatacttaacaaaagatgtacaaaacttatgctctgaaaactacaaaatactgttgaaaactaaagaagatctaaatgagtgggaagatattccatgtttatagattgaaaaacttaacattattaagatagcaatgctcccagattccaaattcaatacaatccctatcaaaattctgactacagtaatggacaagttgcttttaaaatgcatatgaaaattcaagaaaacacaaatagccaaagcagtcttgaaaaagttggataattcatgcttcccaattttaaaacctgctacaaaatgaaagtaatcaaaacagtgtggtatgggcataaggacagatctatacatcaacagaatggaactgagagcccagaaattaacccatatatctacggccagttgatttttagcaaggagtgccaacctctttcaatggaaaaagaatagtcccctcagcaaatgatgtggggacaattgaatttccacatgcaaaagaatgaagttggatccatgtttcacactgtataaaaaaactaattcaaaatggatcaatgacctataaataagagctaaaactataactcacagaaaaaaacatagtgataaatccttatgaccccggatttggcactgcattcttagattgacaccaaaagcaagatcaactaaagaaaaaacggataaactgaccatcagaattaaaaactttggggcttcaaaagacactatcaaaacagtgaaaagataacccaaagaatgggaaaaaattgtttgcaaattataaacataataagttgcttgtatctagaatatataaagaacaattacaactctagaataaaaagacaaatagcccaattcaaaaatgagcaacggatctgaatagatatttctttaaaaaagatatgcaaatagccaataagcacataaagaggtcctgaatattattagccatgggagaaatgcaaatcaaaaccataatgagatatcacttcatgtccactaagatagctttaattaaaaagtcagatgaggccaggcgtgnnnnnnnnnnnnnnnnnnnnnnnnnnnnnnnnnnnnnnnnnnnnnnnnnncacaaggtcaagagatcaagaccatcttgatgnnnnnnnnnnnnnnnnnnnnnnnnnnnnnnnnnnnnnnnnnnnnnnnnnnnnnnnnnnnnnnnnnnnnnnnnnnnnnnnnnnnnnnnnnnnnnnnnnnnnnnnnnnnnnnnnnnnnnnnnnnnnnnnnnnnnnnnnnnnnnnnnnnnnnnnnnnnnnnnnnnnnnnnnnnnnnnnnnnnnnnnnncaaaaaaaaaaaaaaaaaaaa

SEQ ID NO: 6857 - DNA, 735 bp, Macaca Fascicularis
  misc_feature (1)...(735): n = A,T,C or G
ccatgttggccaggatggtctcgatctnnngnnnnnnnnnnnnnnnnnnnnnnnnnnnnnnnnnnnnnnnnnnnnnnnnnnnnnnnnnnnnnnnnnngnnnnnnnnnnnaactttttacaaaatattaattcccttcctttttcccctggaggataagtatacttgcctattccatnnnnnnnnnnnnnnnnnnnnnnttttactttggacaacaaaacaggagcagacataagagcagaagctttcaatgtggtgtgtgacatggcttctctcctaagcttctttgatctgtcatgggaagaacatgtcatggataaccatcaatcatggacaatgtggagatcagaaccnnnnnnnnnnnnnnnngaaagcccaggnnnnnnnnnnnnnnnnnnnnnnnnnnnnnnnnnnnnnnnnnnnnnnntgagcaaaaaactataaaggcttgttgcaagcctctgaatttggcagtggtgctacagtttgaatattttttgtcctctctaagatttacatgtaagaaacccaacctnnnnnnnnnnnnnnnnnnnnnnnnnncccttggggagctgtttaagtcatgagagctctgccctcatgaatggattaatgccatcatgaaaagagcttgtgggaatgggctgtctctctcttctgctcttcagtcctgtgaggacacagaaaggcatcatcttgaaaccnnnagacnnnaaccnnncagacttgatcttgat

SEQ ID NO: 6858 - DNA, 763 bp, Macaca Fascicularis
  misc_feature (1)...(763): n = A,T,C or G
cgggaggaacggaccagggtctcggccactcggcgcccaccctggatttccctggctgcccagaaactgtgctgtgtgtgtcaagattccaggggcaccgtccagcaggaggggccggtggtcaccatggaagcccaagattcccacccctggcagctgatatgaatagccgggtcctcccaggtccctgaggtcaaggcaggtcaacgacctgtgtcctcctcctgtgtccctgaggtagtgattcctgtctgaaacacacgaatcattactgccacccaagaagggcccgttgtaactgagcaagaggacctggaaggggtcaccgggaggagggtcctgccgccaatcaccactccctgtggacggaccctgcagagactgagcttgagattctgtggggagtttggatttgctgagtgggttgctctagcattgagaaatgcaagcagagaacagagggtggaaaccagatggtccagaagcctgggcacggtagccaggacagagatcccggcattcgggtcccagtgtgcagtgcattcactgcattgttcacttggaatcacaggtggctttgctggagggacagaccagttgatcatagtggagctggtgagaggaagctgcacccaaaagccatggccaggaacctggatctgactccagggacacaggaacatggtgggcgctgggcgatgatagaatttctaacaaatgcttggtttctgctanagctaattttcacttccatctctggcat

SEQ ID NO: 6859 - DNA, 3230 bp, Macaca Fascicularis
gcctggctccagcgcagcatgcccgccagcgccccgccgcgccgcccgcggccgccgccgccgtcgctgtcgctgtcgctgctgctggtgctgctgggcctggccggccgccgcctgcgcgcggagccgggcgacggcgcgcagacctgggcccgtttcgcgcgccctcccgcccccgaggccgcgggcctcttccagggcaccttccccgacggcttcctctgggccgtgggcagcgccgcctaccagaccgagggcggctggcagcagcacggcaagggtgcgtccatctgggacacgttcacccaccaccccttggcacccccgggagactcccggatcgccaatgtgccgtcgggcgcgccgtcgccgctgcagcccgccaccggggacgtggccagcgacagctacaacaacgtcttccgcgacacggaggcgctgcgcgagctcggggtcacccactaccgcttctccatctcgtgggcacgggtgctccccaatggcagcgcgggcgtccccaaccgcgaggggctccgctactaccggcgcctgctggagcggctgcgggagctgggcgtgcagccggtggtcaccctgtaccactgggacctgccccagcgcctgcaggacgcctatggcggctgggccaaccgcgccctggccgaccacttcagggattacgcggagctctgcttccgccacttcggcggtcaggtcaagtactggatcaccatcgacaacccctacgtcgtggcctggcacggctacgccaccgggcgcctggcccccggcatccggggcagcccgcggcttgggtacctggtggcgcacaacctcctcctggctcatgccaaagtctggcatctctacaatacttctttccgtcccactcagggaggccaggtgtccatcgccctaagctctcactggatcaatcctcgaagaatgaccgaccatagcatcaaagaatgtcaaaaatctctggactttgtactaggctggtttgccaaacccatatttattgatggtgactatcccgagagcatgaagaataacctttcgtctcttctgcctgattttactgaatctgagaaaaagttcatcaaaggaactgctgacttttttgctctttcctttggaccaaccttgagttttcagcttttggaccctcacatgaaattccgccaattagaatctcccagcctgagacaactgctttcctggattgaccttgaatataaccatcctcaaatatttattgtggaaaatggctggtttgtctcagggaccactaagagagatgatgccaaatatatgtattacctcaaaaagttcatcatggaaaccttaaaagccatcaagctggatggggtagatgtcatcgggtacaccgcgtggtccctcatggacggtttcgagtggcacagaggttacagcatcaggcgtggactcttctatgtcgactttctaagccaggaaaagacgttgttgccaaagtcttcagccttgttctaccaaaagctgatagagaaaaatggcttccctcctttacctgaaaatcagcccctagaagggacatttccctgtgactttgcttggggaattgttgacaactacattcaagtaagtcagctggcaaaacctatcagcagtctcaccaagccctatcactagtagataccactctgtctcagttcaccgacctgaatgtttacctgtgggatgtccaccacagtaaaaggcttattaaagtggatggggttgtgaccaagaagagaaaatcctactgtgttgattttgccgccatccagccccagatcactttactccaggaaatgcacgttacgcattttcgcttctccctggactgggccctgattctccctctgggtaaccagtcccaggtaaaccacaccatcctgcagtactatcgctgcatggtcagcgagcttgtccgtgtcaacatcaccccagtggtggccctgtggcagcctgtggccccgaaccaaggactgccgcgcctcctggccaggcagggtgcctgggagaacccctacactgccctggcctttgcagaatatgcccgactgtgctttcaagagctcggccatcacgtcaagctttggataacgatgaatgagccgtatacaaggaacatgacatacagtgccggtcacaacctcctgaaggcccatgccctggcttggcatgtgtataatgaaaagtttaggcatgctcagaatgggaaaatatccatagccttgcaggccgattggatagaacctgcctgccctttctcccaaaaggacaaagaagtggccgagagagttttggaatttgacattggctggctggctgaacccattttcggctctggagattatccatgggtgatgagggactggctgaaccaaagaaacaattttcttcttccttatttcactgaagatgaaaagaagctaatccagggtacctttgactttttggctttaagccattataccaccatccttgtagactcagaaaaagaagatccaataaaatacaatgattacctagaagtgcaagaaatgactgacatcacgtggctcaactcccccagtcaggtggcagtggtgccctgggggttgcgcaaagtactgaactggctgaagttcaagtacggagacctccccatgtacataatatccaacggaatcgacgatgggctgcatgctgaggatgaccagctgagggtgtattatatgcagaattacataaacgaagctctcaaagcccacatactggatggtatcaatctttgcggatactttgcttattcgtttaatgatcgcacagctcccaggtttggcctctatcgctttgctgcagatcagtttgagcccaagccatccatgaaacattacaggaaaattattgacagcaatggtttcccgggcccagaaactctggaaaaattttgtccagaagaattcaccgtgtgtactgagtgcagttttttccacacccgaaagcctttagtggctttcatagcttttctattttttgcttttattgtttctctctcccttatattttactactcgaagaaaggcagaagacgttaccaatagttctgaacattttcctattcattcattttgaaataattatgcagacacatcagctgttaaccatttgcacctctaagtgttgtgaaactgtaaatttcatacatttgacttctagaa

SEQ ID NO: 6860 - DNA, 2035 bp, Macaca Fascicularis
gtaaaggacaagaagaggagtgcagagcccttcaggggtttacatctctttaaaggaaagggaagagggagccaaagtggggtattgtattttagggggcggaggaagaagtttacaccaccccgtaccccacccccaccccagtaaagctgggggaaagtaggagcaacagggcacttgattggacaccaagattattaatttcctgtaggggagaggaagcaggcagcaggaggtctgggggctggagtctggtggtggcaagggccaggtttgctttgggacagtcaacaagggcttctgagggaaatctccgggataggcaggacaatgactcatttgcaagctggtctctcccctgagaccctggagaaagctcgcctggagctcaatgaaaacccagacacgctgcaccaggacatccaggaggtgagggatatggtcatcaccaggccggacattggctttctgcgtacggatgatgccttcatcttacgcttcttgcgggctaggaagtttcatcactttgaggccttccgcctcctggcgcagtactttgagtaccggcagcagaacctggacatgttcaaaagctttaaggccaccgaccctggcatcaagcaggcactgaaggatggctttcccgggggcctggccaatctggaccactatggcaggaagattctagtcctttttgctgccaattgggatcagagcaggtacacactggtggatattttgcgcgccatcttactttctttagaagccatgattgaagatcctgagcttcaagtgaatgggtttgttttgatcatagactggagtaacttcactttcaagcaagcctctaaactcacaccaagtatgctgcgattagctattgaaggcctgcaggatagtttcccagcgcgatttggaggaactcattttgtgaatcaaccatggtatatacatgccctgtacaccgtgatccggcctttcctgaaggagaaaactcggaaaaggatatttttgcatggtaacaacctgaacagtctacaccaactaattcgtcccgagatcctgccctccgagtttggaggaatgctgcctccttatgacatggggacatgggcaagaacactgctagaccatgaatatgacgatgacagcgagtacaatgtagactcctacagcatgcctgtgaaggaagtagagaaggaactctcccccaagtccatgaagagatctcaatcagtagtggatcctacagtactaaaacgcatggataaaaatgaggaagaaaacatgcaaccattgctttctctggactaataacttctctacatccccttcatggattagaaatgggaagtattggttttcagcaacagggacagcactgtggaggaattaccagctggaaaccgacttattcatgttaatgtagcataatatataataaggcatcaggctttccttggcctgaaccatgggggccctaggctggattttttaaatgtcaataatttattctgtaagtgccaagttatttgtaaatataatgtaatcttcatgtcaagtttgtaaatttcagtagtaactcagtttggaaaaatgttggctcaaaagtccatgccagtgatatgaactataacaaaaagtagaaaagacacaatcaaagctagttaaatgtagccctctttcctatgaagccatatttcagctgtcatagtggttctttcattgtttttctctgaaattctgtcagtattcaaacatactcttaaagggcacacacaactaaatgattccaggaaattttatgattaatgtatttcctgtctagtgattttcatttcagagaaatgtgtcttagtaactatcattggccttgcattttggagacaaggaatggcagatgagctggtatactaaacacttgaactcttctatgttgtttaattcttggaatctcatgaaaagatgtgtttcctcaattaagatgtcgaattgtaaaagagagtggcttctttttaaaaaaaaaaaaaaaaaa

SEQ ID NO: 6861 - DNA, 656 bp, Macaca Fascicularis
  misc_feature (1)...(656): n = A,T,C or G
acaggactacagaagtgtgccaccgagcctggctaattttctnnnnnnnnnnnnnnnnnnnnnnnccatgttgccagggctgatcttgaaaatgctgacttaaagcgatctctccgcttcagcctctcaaaattttgggatcacaggcaccnnncatcnnnnnnnnnnnnnnnnnacaaaaactgaatttttgctacatgttttgaggcttagagaatgccagagggtaccccgtcagcaactgattaacatttgttaggaattactttttgtgttaccttcctagggcccatatttcgttctcctgtatatctctaattgtgttgctttagagattaaggaagagcacacacaggaaactagtttagttactggtagaacagttgcttattagttcacagacttcttaagctgagaaaatgttaagttacttataatctgtaagtgtctgaattgataatagaattcatggtttttggtttctagtctgacatttagccttctgatcacatttctttcctttgagtttgctaataggcatattctagaccattttaatagcgaactaaccacattaaatccacaactatatgctatgtaaattatagattcagagttttaaaaaaattattttgctttcttgtctttttatttaa

SEQ ID NO: 6862 - DNA, 1541 bp, Macaca Fascicularis
aatcaaagctgcagaagtcttaattaatcagcttgatagagaacataagagatggaatgcacaggttgtagagataacagaggaattagctactcttcctaaaagagctcaacttgctgctgcatttattacatatctttctgctgctcctgagtctctgagaaaaacctgtttggaagaatggaccaagtcagctggtcttgagaaatttgatctgaggagatttctttgtactgaaagtgagcagttaatttggaaaagtgaaggcctaccatcagatgacctttccatagaaaatgctcttgtaatattacagagtcgagtgtgcccatttcttatagatccttcttcccaagctacagagtggttataaacacatttgaaagactcacgtttagaagttatcaatcagcaggatagtaactttatcacagctcttgaattagcagtacgttttgggaaaacccttattatacaagagatggatggtgtagaacctgttctttatccattattgagacgagatctggttgctcaaggaccacgttatgtggtacaaataggtgacaaaattattgactacaatgaagaattccgcctctttttgtcaacaagaaacccaaatccttttattccaccggatgcagcttccattgttactgaggttaactttactacaacaagaagtggattacgagggcaggtatacacagataataaaaatttaccgtggactctttaggagcttttatatacttattagacattttgggtgaaaagctattttgttagactaattagtatttaaatttatgattttgaaaatatacttgtatgttggagtgaagcattctggcttatttcatttgtcatatgtattggacctgtacatttaatgttaatgtcaaattgctgcttcttttaatataactctaatttcgaagtttatttctgttatatatggtagaatttgagagattgatggatcatagagattaagatcatctgcattatatttttggtttgaaaactgaaatttaattgtgaaaagtgtagctaattgacttgtttagctagttaacagtctttgattcctgagccagcatttttttttaaccattagaacacatggcatctttgaagtcaatttatcttcatatggctcattacaatttagaattattacataaatttcaaaatgatttttcatgtccatacttacatgttttctaactcatttttcctctttaaatatataatgccagttgacttttggagtatcatcctattttttactcatctaacaatagtagattttttcatctttttgatttatatgatggcatacatatttgatgcaatttttacttgattgtaattttttaaattgttctttcaaaatatttctttgtatacatatgactcatcaagtatatttttatgaacaatatcttttgattgacttgatgcttcttttaaataaaacaatgtgacaatcactcaaaaaaaaaaaaaaaaaaaaaaaaaaaaaaaaaaaaaaa

SEQ ID NO: 6863 - DNA, 735 bp, Macaca Fascicularis
  misc_feature (1)...(735): n = A,T,C or G
atcaagatcaagtctgnnnggttnnngtctnnnggtttcaagatgatgcctttctgtgtcctcacaggactgaagagcagaagagagagacagcccattcccacaagctcttttcatgatggcattaatccattcatgagggcagagctctcatgacttaaacagctccccaagggnnnnnnnnnnnnnnnnnnnnnnnnnnaggttgggtttcttacatgtaaatcttagagaggacaaaaaatattcaaactgtagcaccactgccaaattcagaggcttgcaacaagcctttatagttttttgctcannnnnnnnnnnnnnnnnnnnnnnnnnnnnnnnnnnnnnnnnnnnnnncctgggctttcnnnnnnnnnnnnnnnnggttctgatctccacattgtccatgattgatggttatccatgacatgttcttcccatgacagatcaaagaagcttaggagagaagccatgtcacacaccacattgaaagcttctgctcttatgtctgctcctgttttgttgtccaaagtaaaannnnnnnnnnnnnnnnnnnnnnatggaataggcaagtatacttatcctccaggggaaaaaggaagggaattaatattttgtaaaaagttnnnnnnnnnnncnnnnnnnnnnnnnnnnnnnnnnnnnnnnnnnnnnnnnnnnnnnnnnnnnnnnnnnnnnnnnnnnnncnnnagatcgagaccatcctggccaacatgg

SEQ ID NO: 6864 - DNA, 695 bp, Macaca Fascicularis
  misc_feature (1)...(695): n = A,T,C or G
aagaggctgggcacagtggctgatgcctctaatctcagcactttgggaggccgaggtgggtggatcatctgaggtcaggagttcgagaccatcctggccaacatgatgaaaccccatctgtatttaaaaaaaaaaaaaaaaggcgtggtggtgtgcacctgtaagtcccagctacttgtgaggctgaggcaggagaattgcttgaacccgagaggcgggaggttgcagtgcgcagagattgcgccactgtacaccagcctgggtgacagagcaagactctatctaaaaaataataacagcctccccaagaaacaaacacacattttgcccaatgcctgctgtttggggctttgaaaagtgagccctgacnnnnnnnnnnnnnnnnnnnnnnnnnnnnnnnnnnnnnnnnnnnnnnnnnnnnnnnnnnnnnnnnnnnnnnnnnnnnggaggctacagtcagccatgatctggcccctgcactcttgcctgggtgacaaagcaagaccttatctcattttttaaaaaaatactttccagggaaacacaccttttgccctatttggaacttggacaagggagtcctcctcctccctcagtttttacatcctggactggtgggttccccgaagatgcccgtgggctgtgctgctcagcctgccacacccgcttgctttgctgtttgagattgcccccag

SEQ ID NO: 6865 - DNA, 1827 bp, Macaca Fascicularis
tgatggaacaacctcatttttcgtgtcagattacacagaggtggataataatgtcacgaggcatttggataaagtattaaaaagaggagattgggacatgttaatcctccactacctggggctggaccacattggccacatttcagggcccaacagccccctgattgggcacaagctgagcgagatggacagcgtgctgatgaagatccacacctcgctgcagtcgaaggagagagagacgcctttacccaatttgctggttctctgtggtgaccatggcatgtctgaaacaggaagtcacggggcctcctccatggaggaagtgaatacacctctgattttaatcagttctgcgtttgaaaggaaacctggtgatatccgacatccaaagcatgtccaacagacggatgtggccgcgaccctggcgatagcacttggtttgccgattccgaaagacagcgtagggagccttctattcccggtggtggaaggaagaccaatgagagagcagttgagatttttacatttgaatacagtgcagcttagtaaactgttgcaagagaatgtaccgtcatatgaaaaagatcctgggtttgagcagtttaaaatgtcagaaagattgcatgggaactggatcagactgtacttggaggaaaagcattcagaagtcctgttcaacctgggctccaaggttctcaggcagtacctggctgctctgaagacgctgagcttgtccctgagcacacaagtggcccagtacgacatgtattcgatgatggtggggactgtcgtggttttggaggttctcaccctgctcctgctcagcgtcccacaggcactgcacagaaaggctgagctggaagtcccactgtcatctcctgagttttctctgctcttttatttggtaatcttggttctttcggccattcacgagaagtggatggcgctggccagtccacagcagcgtggcaggacgggcctgcctgtgatgcgctggagcgagacaaaggccacagaagcccctctgcctcccaagggctcagaggccacgagaagtggctggcctcggcgctgctgtgtgtggtcgtttctgttctgaccaacatgctcgtgggtggaaacgcctccaggaagaaccctgtgcatcccagctcaaggtggtcagagctagaccttcttattctgctagggacggcgggccacgtcttgagcctgggtgccagcagcttcgtggaggaggaacaccagacctggtacttccttgtgaacaccttgtgtctagctctgagccaagaaacctacagaaactgctttctgggagacgacagtgagcctccatgtggcctccgtgtggaacaagggcttgacggggccacagcagcgtggcaggacgggcctgcctgtgatactggcctgctgccggctgctgcgctctctaaaccagacaggtgtgcagtgggctcaccggcctgacctcggccactggctcaccaggtgagcgcatgggcctgtggtcacaggccagactttctacagccagttggtcacctgccaagctcttctttttctaaattgagatcatttttcatattaagaatgggatagtattttgagatctgaagaactgggaaaatatactaaaaccagtgtttttactagatactagaattagtgttgagaggtgaatttatttgggggctggcctaataggtttggtttattagtgctgaaccactgtaactcttcgtgattcaatgatcatgatatagtaaagatgtcatttcggggtaaaaaaaaaaaaaaaaaaaaaaaaaaaaaaaaaaaaaa

SEQ ID NO: 6866 - DNA, 791 bp, Macaca Fascicularis
ggtactcaggcatgactgcgtatttattaaagtgtgtttttcacaatgtatcaaacaaggcataagcagcttctcctgctgactggccaatcactgcccatctgagagatgatttcctctggcccatattgaatttattggagtaactcaaaatgcctgaggaaaaatggaaaaattatccaccaatcgattcaaactgaacttcactctttataggaagggaaggtgaagttgtaggagtacgaaacattttcaataaatctgcaaagggaagtcttactacaattctaaaaatcatcatggttggaaatttgggagtagattatttgtgaacttgttacccttttggtaatggtggactaattgttgtatagttatttttgttttattattactgttatgttaagttaatttaacatgcatttatagaggaatacattcaaagcactgatgtaggagatacacggtacttagagcagtcagccaaaaatcacagatactgctttcacttaaatggaaacaatgctccaataatactttgctttttttcttatgtcactgttgcatactatctatttttctcctctctgggaccaagtttctttttctaaagcaataatatctctgttttcattttagtacattgtgctctctgttagcatatgtatattaactacaaaatatattcaactttgacttcttttgacaatgtactttaggaaaaagaggaacaaagacattatttgagaattaaattatatatttttaatatgactgatgaccttgactga

SEQ ID NO: 6867 - DNA, 895 bp, Macaca Fascicularis
  misc_feature (1)...(895): n = A,T,C or G
tnctctgctnntccctacccnnnactctatccaattnnnctgctaggggttatcattagcaattgacatgctaaaggttttggagcctatctaggggtaggtgcagcttgactggcttttctgtggattctctcagtggacccacaacatctctatatctctccactctcctgtcatcagccatagcaaagaatccttccaaaatcaaactcnnnnnnnnnnnnnnnnnnnngttgttgttcagtctctcgcgtgtcaatgtgggcatggttcannnnnnnnnnnnnnnnnnnnnnnnnnnngctnnnnnnnnnnnnnnnnnnnnnnncctcagcccctgccctcgcacaagatttttctcagccttcagactaccactgcagaatccgaagtgacccaccattaaggtgtctgcatcttggaagagttggaaataaccctttaacatcaacatgcttcaaagactttttgcctttggcctggtaagacgcctctccagctactgagcccaccagtaacatgagcggataaagagagacttgtttgtgctagaaatgagggtctatgctatgaggggatccaagactctggcgaaatatgctttttcatcaatggagaaatgaaaggaaaacaaaagcaagaaaaaagttaacttgtattatgtatttttactacacttttcttaaaaatagagcnnnnnnnnnnnnnnnnnnnnnnnnnncatttttctcannnnggaatccatacnnnnnnnnnnnnnnnnnnnnnnnnnnnnnnnnnnnnnnnnnnnnnnnnnnnnnnnnnatctnnntttgttttaactctcttggcagatgtgtgaaaggattcttgcttgatcaaacactaaatatttttttggttcctgtttttcttt

SEQ ID NO: 6868 - DNA, 2152 bp, Macaca Fascicularis
agtcgccattcgggaggccgctgcgctgcagggcctggcggagccgcccgctaccgcgagccgggccctccgcgcggttcttcgcccactggacgccgcccgcggccggaccggttcaactttctcgtcttgttgttcttcttgtactataggctgtttgctgtggtttagtcaaaaagccatgtagaatgcctgccttttgaagaccaattttaaggtgtctagtaatacagcagcggtattgaaagtttttaaagaattttgtgatgaaatggatgctggtgggctaggcaaaatgatattttaccagaaaagtgcaaagctatttcactgccataaatgcttcttcaccagcaagatgtactctaacgtatactatcacatcacatccaaacatgcatccccagacaaatggaatgataaacctaaaactcagttgaacaaagaaacagatcctgtgaaaagccctcctcttcctgaacaccagaaaataccctgcaattctgcagaaccaaaacccatacctgccctttcaatggaaacacagaaacttggttcagttttgtctccagaatcaccaaaacctactcctcttactcccctggagcctcagaaacctggctctgttgtttctcctgagctacagacaccttctcttccttctcctgagccttcaaaacctgcctctgtttcttctcctgaacctccaaaaccagtccctgtttgtgaatctcagaaacctgcccctgttccttctccagaaccacagaaacttgcccctgtatctcctgagcccgtaaaggctactcttcctaatcccaaaccccagaagcactctcatttcccagaaacactgggcccaccttcagcctcatctccagagtcaccagttctagctgcttccccagaaccttggggaccatccccagctgcatctccagaatctcggaaatcagcccggactacctcccctgagccaaggaagccatccccttcagggtctcctgaaccttggaaaccaattccttctatatctcctggaccttggaaaccaactccatctgtgtcttctgcatcctggaaatcttcatcagtctcacccagctcctggaagtccccccctgcatctcctgagtcatggaagtctggcccaccagaactccgaaagacagctcccacgttgtctcctgaacattggaaggcagttcccccagtgtctccagagcttcgcaaacccggcccaccactatccccagagatccgtagtccagcaggatctccagagctcagaaaaccctcagggtcaccagacctttggaagctttctcctgatcagcggaaaacttctcctgcttcacttgatttccctgagtcccagaaaagttcccgtggcggttctcctgatctctggaagtcttccttttttattgagcctcagaaacctgtcttccctgagacccgaaaaccaggttcttctgggccatctgagtcccccaaagcagcctcagatatctggaagccagttctctctattgatactgagcctagaaaacctgccctgtttcccgagcctgccaaaacagcccctccagcttctccagaaccacgcaaacgtgccctttttccagagccccggaagcatgcccttttccctgaactccccaaatctgctctattctcagaatcacagaaggctgttgagcttggtgatgaactacaaatagatgccatagatgatcaaaaatgtgatcttttggttcaggaagaacttctagcttcacctaagaaacttttggaagatactttatttccttcctcaaagaagctcaagaaagacaaccaagagagctcagatgctgagcttagtagtagtgagtacataaaaacagatttggatgtggtggatgttaagggccaggaatcaagcagtgatcaagagcaggttgatgtggaatccattgattttagcaaagagaacaaaatggacatgactagtccagagcagtctagaaatgtgctacagtttactgaagaaaaagaagcttttatctctgaagaggagattgcataatatatgaagcgtggaaaaggaaagtattattgcaaaaaaaaaaaaaaaaaaaaaaaaaaaaaaaaaaaaaaaaaaaaaaaa

SEQ ID NO: 6869 - DNA, 894 bp, Macaca Fascicularis
  misc_feature (1)...(894): n = A,T,C or G
caaatgaagcaaaaagacnnnnnnnnnnnnnnnnnnnnnnngaaaaaactaaaagctgagcaggaagcccgaagttttgtagaaaaacagttaatggaagagaaaaaaaggaagaagttagaagaagccactgcnnnnnnnnnnnnnnnnnnnnnnnnnnnnnnnnnnngagaatgcaccgaaaccttacggaatcggatcagagaactagaagcagagggcaagaagctcacaatggacatgaaggtgaaagaagaccaaatcagagaactagaactgaaagtccaggagcttcggaaatataaggaaaatgagaaggatactgaggtgttaatgtcagccctctcagccatgcaagacaaaacacagcacctggagaacagcttaagcgcagagacgagaatcaagctggacctgttctccnnnnnnnnnnnnnnnnnnnnnnnnnnnnnnnnnnnccaaggacaaatccttcagaaagatcaggaaatcaaggacctaaaacagaagatagccgaagtcatggccgtcatgcccagcataacatacagtgccgccaccagccccctgagccctgtttccccccactactcttccaaatttgtggagaccagcccctctgnnnnnnnnnnnnnnnnnnnnnnnnnnnnnnnnnnnnagaaatgaaggccagctgtgtgctgtgcccaaacattcggttaccggaaggcattgcaaaggagcgtctctggcagtcaagataaaaaaaaaaaaaaaccagtttctcttgtattttgtgggactgtatctgttgtcatttttaaaaagggggggaagataacatccaaatctgattagaactgcccatcagtttttattgtaaatttttagcaagacctcacagaactttacagt

SEQ ID NO: 6870 - DNA, 712 bp, Macaca Fascicularis
acagcagccaggcttcttcgatgtcacccccagctcagccaggccgtgggtcaacagctccctcaagcctccaagtgggggcttggctccaacctcaggctccgcttcgaggcccagaacgtccatgggacccagagctctcgtttcctgctggacagtcagggtgtagggtagggaggcctgggctctccaggtcccacagccaagggtgtaggaagggcctggagaacccagattgaagttgcaataagaaaggaaggactcaggactgtcgtttagcaggtgaacgggcctcatcccacttttccaggcaaatcagggcccgtgacggggctggttctggtggctgtcggggagatggctacgaagatcctgcttctctgcctctgcctcatcctcctcagagtgaggtcctgcaggaggaaggcagcaagggcagcactgggcatgcaagctgcagacactgtcacagactaatctccagactccagactgcttccagatgcctcctcatccagttcctccactgtctgagcggccgtgtttcctctgcaggccttgcatggagatgacagctccatgtgtgttactgaacctgaagaccttccagtgggacaagatgtggacgtggaagacggtgatactgatgatcctgaccctgtgcaggtctaggctaatgtgtgaattttgcctcttagttattaaaacaaaa

SEQ ID NO: 6871 - DNA, 664 bp, Macaca Fascicularis
  misc_feature (1)...(664): n = A,T,C or G
agannnnnnntcctaacatgagcacatccctgccatgagaaaaannnnnnnnnnnnnnnnatatgatcgtggttgcccannnnnnnnnnnnnnntaatgactcaaaattctgaattatggcagaaaggaaaaataaaatagacttcacattagaacatagaatcatttacatcctaatactgaccacagttcactaaagctcagtagcattannngatgtagttnngaattgcactttcctaacttcagggtgacgacaagatatnnnnnncagtganagaaatctccaaagctgctaaatatgatatagctttgttaaatatgaaggtcatttaaatacaatcgatgtttagtactatatatgtacttttcacattctttggatttctggaaggtaatgacaccttactgtttacagctaatgcatagttacttgcatgccacggttgtacagtagcagactacgaccctatcgtgatattaaatgtttatttcataatgccatctatacatagcttaatttgatgaggattgaatgtaatatataacaggaatgattatacaatatnnnnnnnnnnnnnnnnnnnnnnnnnnnngttgcatcttaccatgactatgtcattattttgataattaggcatttatgaattatagtatatattcc

SEQ ID NO: 6872 - DNA, 2177 bp, Macaca Fascicularis
tttagagagtagtgaagaggtttttcttaccaactaaatcaaatgatagagattcaggtatgcatactgagctggaaaggagaaaaccgatgaaaccatcaggagtaaggcataacatattaataagatcagtacaatttccatgggaatagtgaacttttttgtttttgcttttaggaaactctgctcgggtagatttgttctgtatacgtatatgcaaacttggagtaggtagatagtcatttgtcaatgatttgttcttaatacagtcattttgaaatttattgtgtttgttgttaggacagtctttttaacacttattttagtacagatagtgaaaagcaggtttgctttccaaaatattttattgatttctaattgacatcctaatcaatacttttattactagatgacataattacaataggacaatgtcaaccaaataacatgtgtgagaaagtaaataaaagctaacctcaattattagagggtttttagtagaattttgtatttattttctgaaatccaaaagtcaagtgctattaacaatgttttaagatgcattacaagaaatgtgtgtatatgtatgtgttcatgtgtttttgtttacctagtaaatatattggcacttacattcagcacatcaatttatatacttatttatccttagcagccattttacgatttatacaggcttgttgggctggtctaaggaataaaatcaactttcttttacaggagaatgtattcttagcttgttgtttcttgcatatcttcactgtatattcatgtgattgttttatgtataccattagaatacattttaaagaaggatatggcatgaggaattattggatgttaatgtacatagaaaattcaagcttaattaccatttacctcacaagaaaacctcatagtaactataagctttttgttaggaggattgtttatactttggtgctagcttgatacttctttggagaaaccatttatagtatgtttacaattcaatagggtggttattcttcattgaatatcattggttagtaatcaatgtgctttttatatatattaatttgttgaaaatagaaactcactttgaaacagtgatatgttttatcagtatagttctcatttgactataaaatgtgtttagaatttaataattgataagtattgcaggtaatattgatatttgttagtattctgtcatttaagaaaatcttcagaataaattacttaactgaattttgaacatcagttttacataattggatatgtatgtatatattgtgatttttgtacataaaacagtggcctaaatttcagtttcagttttcggttgcatttttgttagggtgggtagaagcacagtaatttaatcatagtcattttaactgcatagaatgcttacatgtctcactcatgtttaagaccacgtgcatagctgattgtgtctttagaaatacaaaaatacaaaataaatagctatcattagaaatgactaatgtagaaagctaactagcaaaagtgaatcctttcatttttcatgatgtgattgtgccttctgtgtgcatgttatcgtgacagtaagatgatccactcaaaatgatgtaggcattctgcaaggcagataaagattttaagtacctgtgctgactggtcttcctaatattggttaagaggttgaactttccctttattctgcttcctatgtgtgtttcaggctacatttcctatatttttaaaccaatgtgttttaatcagtatattcagcaagttagcattaaattcaatattctaattattgtcatgttataagattgagcatttcttctttttattaaatgttgaaatatacaagtcattatgttgtatattggtagctaaaaatattgttgaagtgtaaaggagaaaaatctaattttatattggcatagaaagaaagcttaacttgttttcttgctcttttttttatagagaacacctgttcccagcgctgaagcattccgatggttcttttaaagcagtagtatatcttattttcaaggcatttggaaatgaagggcaaactaatgtcttgttttaagaaactgcttagtccaccactgaagaaaatatccagaaattattttcactttacatataggggtttctttaaaaaaaaaaaaaaaaaa

SEQ ID NO: 6873 - DNA, 609 bp, Macaca Fascicularis
  misc_feature (1)...(609): n = A,T,C or G
nnnnnnnnnnnnnnnnnnnnnnnnnnnnnnnnnnnnnnnnnnnnnnnnnnnnnnnnnnnnnnnnnnnnnnnnnnnnnnnnnnnnnnnnnnnnnnnnnnnnnnnnnnnnnnnnnnnnnnnnnnnnnnnnnnnnnnnnnnnnnnnnnnnnnnnnnnnnnnnnnnnnnnnnnnnnnnnnnnnnnnnnnnnnnnnnnnnnnnnnnnnnnnnnnnnnnnnnnnnnnnnnnnnnnnnnnnnnnnnnnnnnnnnttgggccaacaaacttttttttcaaaggaaacattttgccctgaattgctggtgaagttgttttttgacagagctgttttattgccgaagatttcttattgatgccagtcatagcagatgaatcaaaatgcaaaaacaactttttttactgctcagcatgccccaggatcagaagtaagtcaagagcgtggaagagacaaaattcagatatgctgggatagaagtcactgttgctatttttaggccacatccgaatattacacactcaacctttgaaaaacgctaagctttcaatatatgaatagcttccattatttaagaaatactgttaagcaagcttagctccctgaagaacaccactg

SEQ ID NO: 6874 - DNA, 836 bp, Macaca Fascicularis
  misc_feature (1)...(836): n = A,T,C or G
caaatgggttacctccaaatatgaaaatctataacaannnatggttgaaggaatgctcagtttcatttgccaataaattggtttctcataacttgcatcaagtttaattttaagtaaagctttttatatgtagatattttgttgaatttgtaaatacacttaaagtgtagatgctatatgcttataggtgttacatacaaataaacatgcaatgtttatgttgtactgtataagaagtaagctaattaatgcagtgaatgggattggaaagcatctacttaaatatgtactgggttccccctccccctgccttttttgctgtgaaactgaaatagtgaacttttctacatattgacagcagatttctcgatgaaatcttcagagctttgcctatggggcacagtaggcctagtaacctggcgtctttgatatatgtaggtaaagcataatttaaagtaatcccaggtaaagatggccctaaatactttcatgtctctatattcacttttcacagatccacctgtctattgaaaatacaaaaagacaaaacaggtttgccttggcatcagagagcacagagattaaaagttactttaaatttgccaatattttgggagaacaataaaaacacagtttttcctcttccatactggtagatgcgaaatttatctgtgcatgaaagggtcacttctgtatcacacctgtaatagtgcaacaggttttgtattaaaaattaaatgtggttttaaaagttcctctctcttttgtaatgtatgttcctaattgagtgtgaatgtccaagtaatggtgtatgtaatggtacaggcaaatgtgac

SEQ ID NO: 6875 - DNA, 536 bp, Macaca Fascicularis
  misc_feature (1)...(536): n = A,T,C or G
tgactaaaagaaaataatnttgnnnnnnnnnnnnnnnnnnnnnnnnnntnntttcacaatatccacaatacatttgctacaggtggttctgatggctttnnnnnnnnnnnnnnnnnnnntaacaaaaagcgactgtgccaattccatcggtaccccacgagcatcgcatcacttgctttcagtaatgatgggactacacttnnnnnnnnnnnnnnnnnnnnnnnnnnnnnnnnnnnnnnggaacatnnnnnnnnnnnnnnnnnnnnnnnnnnnnnnnnnnnnnnnnnnncaaaacccaagtccacctaatcatcctnnnnnnnnnnnnnnnntatggaaagctttgtttgcttccnnnnnnnnnnnnnttattccttaagggatgtgttagagttactgtggatttctctgttttctgttttacaagaaacttgtctatgtaccttaatactttgtttaggatgaggagtctttgtgtccctgtacagtagtctgaagaattcccccttctgtctcctagcaagcccagttgctgt

SEQ ID NO: 6876 - DNA, 728 bp, Macaca Fascicularis
  misc_feature (1)...(728): n = A,T,C or G
tgctgggagggacaagaggccctcccccaggcagaagagcatgccctttgccgttgcatgnnnnnnnnnnnnnnnnnnnnnnnnnnnnnnccagcagcctgttggggcaggggtgccaagagaggcattccagaaggactgaggggcgttgaggaattgcggcgttgannnnnnnnnnnnnnngagggggtcgagggggccgactcacagaaggggactgacagtgggcaacactcgcatcccactggctgctgttctgcaaccatccgattggctttctgaggtttggctgggtggggaccgctcatttggccactctgcaaattggacttgccnnnnnnnnnnnnnnnctctcgagctgttctgtaaatacctggtgctaacatcccatgccgctccctcctcacaaagcacccaccgccctgagggcccgtcctaggaatggatgtggggatggtcgctttgtaatgtgctggttctctctttttttttctttcccctctatggcccttaaaactttcattttgttcagaaccatgctgggctagctaaagggtggggagagggaagatgggccccaccacgctctcaagagaacgcacctgcaataaannnnnnnnnnnnnnnnnnnnnnnnnnnnnnnnnnnnnnnnnagcctctgcgtcctggtccgccagcacctcccgcttctccgtggtgannnggtgccgntnnntcacatctgtgct

SEQ ID NO: 6877 - DNA, 745 bp, Macaca Fascicularis
ctactcaccactgtgtcttgaagataatcttcctcttggaaatgaatggaaagcaaaaggccttattacttttaaccactggcttcatataaacacttgccattttttcttcatagctgggggtggtttgtatctttaattctttgatgatagtttgtaggtgccacactttattgattagtacttgacatggtgtatagcctattttgggtttgatttgttttgggtggcgtagacatgtttttaaggaacttattgcttatctttagaaaatgttctagtttggaaacagattcttgagatttagaaggcattttggagtacacttatctcttgtttgtattgaactgaaggctaagtctcagtggatatgaaaaagacttttgggtgatttattttttaacctgcatttctttcttatgtgtagtatatgaagaaagactaaaatgtagctttaaaaaagtgttgtttactctcttagaactgactgacagacttattgccagaaatcactgatgttcattgtttttgcaactgtttgagctgctgtaagagtctaaagttgacaagttagttcatgttagatgcatctttataaagcaaagatgttgtatatcctaggcctcccttttatatttgatatcagttatttgctaatagcttctattcttatgttgaaagtagttgtaaaagctgatgaacctgaaattacgtagcctgtacaggctgctgaggttctaaataa

SEQ ID NO: 6878 - DNA, 2828 bp, Macaca Fascicularis
gactggagaggaggcagggacagacccagaagcgcccatctgagcgagaagagcagacactgtgctcctggaatcacccagcatgttgcaagctctcctgacagtcagtctcctcctctctcctgttccagtaagtgctataaaagaactccctggggtgaagaagtatgaagtggtttatcctataagacttcatccactacataaaagagaggtcaaagagccagagcaacaggaacaatttgaaactgaattaaagtataaaatgacagttaatggaaaaattgcggtgctttatttgaaaaaaaacaagaacctccttgcaccaggctacacagaaacatattataattccactggaaaggagatcaccacaagcccacaaattatggatgattgttactatcaaggacatatcattaatgaaaaggattctgatgctagcatcagcacatgtaggggtctaaggggctacttcagtcaggggaatcaaagatactttattgaacctttaagccccatacatcgggatggacaggagcatgcactcttcaagtatgaccccgaagaaaagaattatgacagcacctgtgggacggatggtgtgttgtgggtccatgatttgcagaacattgcccgacctgccaccagactagtaaaattgaatgatgggaaggttcagaaacatgagaaatacatagaatattatttggtcctggataatggtgagtttaaaaagtacaatgagaatcaagatgagatcagaaagagggtgtttgagatggctaattatgtcaacatgctttataaaaaactcaatactcatgtggccttagttggtatggaaatctggactgacgaggataagataaacataaccccaaatgcaagcttcaccttggaaaatttttctaaatggagggggagtgttctcccaagaagaaagcgtcatgatattgctcagttaatcacagcaacagaatttgctggaatgactgtgggtcttgcatttatgtctacaatgtgttctccttatcattcagttggtgttgttcaggaccatagtgacaatcttcttagagttgcagggacaatggcacatgaaatgggccacaactttggaatgtttcatgacaactattcttgcaagtgtccttctacaatatgtgtgatggacaaagcactgagcttctatatacccacagacttcagttcctgcagccgtgtcagctatgacaagttttttgaagataaattatcgaattgcctctttaatgctccattgcctacagatatcatatccactccaatttgtgggaaccagatggtggaaatgggagaggactgtgactgtgggacatctgaggagtgtaccaatatttgctgtgatgctaagacatgtaaaatcaaagcaggttttcaatgtacatcaggagaatgttgtgaaaaatgccaatttaaaaaggctgggatggtgtgcagaccagcaaaagatgagtgtgacctgcctgaaatgtgtgatggtaaatctggtaattgtcctgatgatagattccgtgccaatggcttcccttgccatcacgggaagggctactgcttgatgggggcatgccccacactgcaggagcagtgcactgagctgtggggaccaggaactaaggttgcagatcagtcatgttacaacaggaatgaaggtgggtcaaagtacgggtactgtcgcagagtggacgacacactcattccctgcaaaacaaatgacaccatgtgtggaaagttgttctgtcaaggtgggtcagataatttgccctggaaaggacggatagtgactttcctgacatgtaaaacatttgatcctgaagacacaagtgaagaaataggcatggtggccaatggaactaaatgtggccataacaaggtttgcattaatgcagaatgtgtggatattgagaaagcctacaaatcaaccaattgctcatctaaatgcaaaggacatgctgtgtgtgaccatgagctccagtgtcaatgtgaggaaggatggagccctcctgactgcgatgactcctcagtggtcttctacttctccattgtggttgcggtgctgttcccagtggctgtcatttctctggtggttgctatagtaatccgccaacagagctccagagaaaagcagaagaaagatcagaggccactatctaccactggtaccaggccacacaagcagaagaggaaaccccagatggtaaaggctgttcaaccacaagagatgagtcagatgaagctccatgtgtatgatctgccagtagaaggcaatgagcccccagcctcttttctaatttcaaagccagatttttcaccacctccaattcctgcacctagatcatcttctttccttgactcaaatccaaaagcatgaggcaacagctaagcaagaactgatggctcaattatcaacttggaaaactggaaaatctggatggcagagaaatacacttatttttcactagtatttgctcttgactcaagaaggttaatattttctgattcgtgttagactttgaagagactaaagagaattttcaagaggggcatatgcctgagaacctttgcatgagtttaaaaatttcaattatccattcttgtaagaaggaaaatgattgtaaagaaatatctgggaagttaaaatctttaataggaattgattctctaatgaaaacaaaacataaaaacattacactaatcttggaggaataagaaaaattgtacatccattaaatgagtagcaacatcttgattgctttaaccattaacttgtcaaattagaatctcag

SEQ ID NO: 6879 - DNA, 720 bp, Macaca Fascicularis
  misc_feature (1)...(720): n = A,T,C or G
atnnngattcacacaaatgtaagcaaaaataataggttttaaacatacatnncaggaaattttttaattagagatagctaaagttattcaagatctatacaaagataattatcctggtagtgcaagttaatacataagcagtctccagtatggtaaagtagggtatgtaacacatcagaatgtgcatttttattaagttttaaaatatgtaagtataaaaactaaatttgaatcaaacccttttaactcacctccaagaagctacactttggccaggaatgggctaaaaaccactggttcaccatgtgacagttacgatgttggagattggaaatctttcttccacattagagttctttaccttaattccttattttgaaaaattgtaagattttatgaaggtttgaataccaaagcacagttctgctttcaaacattaaaattcaaacttgaaaaagctgtttaacccatggaagatatcatttagtaagatgtaaaagattttttaaatctacacttcagtttatacatctttatcattatcaatactatataagttactgtgagcattttagagaattccataaaggtactatgagtgtgtctgtatgtgtgtgtatatatagcattgtatttaatcatagactaaatttaatttgatatagaaatattactttacttgtacattaaggtcataatttctgctnnnnnnttttatat

SEQ ID NO: 6880 - DNA, 2957 bp, Macaca Fascicularis
gagtttgtgagagtcctcggtggaggaggttggaaagcgttctccctcccacaaaacccggtgcagagggagggagcgccaggtccgtagcgtgggtccaagaaactctatggatcttggaagtgagcacacttttgtgtcttaaaaagtttggtgtctcgttttgaggtgaaaaatgaatgagataagtgctttttaaaaagaagccttccattattcaacagttatgaacaaggactatcaaatattttggccatcaccttcagatcctgtacgttttgaagtggatacttctcatgaaaaagtagaaagcatatcagaatcggataccatgaatgtcagcaatctttctcaaggcataatgctttcagattctcccatctgtatggaaactaccagtaccacttgtgacttgcctcagaatgaaataaagaattttgaaagggaaaatgagtatgaatccacactttgtgaagatgcttatggcacactagacaatttgttaaatgacaacaacattgaaaattactcaaagaatgtactaactcagccagttgacaccatcagcatatcttccttgagacaatttgacaccgtttgcaaatttcactgtgtagaagcatttgatgatgaaatgacagagaaaccagaatttcaaagtcaagtgtataattatgcaaaagacaacaatataaagcaagactcatttagggaagaaaatccaatggaaactagtgtttctgcaagtacagaccaacttggtaacgagtattttagacagcctcctcctagaagcccacctctaatccactgcagtggagagaccctgaaatttccagaaaaatcactggctaaaagtactgccaaggaatctgccctcaaccctagccaacctccaagcttcgtgtgtaagactgcagttccttcgaaagaaatacagaattatggggagattcctgagatgtcagtcagttatgcaaaggaagtcacagcagagggtgtggagaggccagaaattgtctcaacttggtcttcggcaggcatctcctggaggagtaaagcatctcaggagaactgtgagatgcctgacatggagcaaagtgctgaaagcttacaacctgttcaagaggacatggctttaaatgaaatcttgaagaaattaaaacatactaacagaaagcaggaggcgcgaatccaagaactccagtgtagtaacctgtatttagagaagagagttaaagaactacagatgaagactaccaaacagcaagtgttcattgatgtcatcgataagctaaaggagaatgttgaagaattaattgaagaaaaatacaaaataatcctagagaaaaatgatactaaaaagacattgcagaatttgcaagagattttagctaacacccaaaaacatcttcaggaatccaggaatgacaaggaaatgttacagcttcaatttaagaagatcaaggctaattatgtgcgtttacaggaaaggtacatgactgaaatgcaacaaaaaaataaatctgtaagtcagtatttagagatggacaaaaccttaagcaagaaagaggaagaggtaaagagactacaacaactcagaaaagagcaggaaaaggtcacagcttctgctctggacttgttgaaacgggaaaaagagacccaagagcaagagttcttgtctttacaggaggaattccagaaacgtgacaaggcaaacctggaagaaagacagaaactgaaatctcgacttgagaaattgctcactcaggttaaaaatttgcaatttatgtctgaaaatgaaagagctaagaatataaaacttcagcagcaaatcaacgaagtaaaaaatgagaataaaaaacttaaacagcacgttgcaaggagtgaagagcaaaattatgtccctaaatctgagacagctcagttaaaggagcaattagaggaagtcatgaagtcagatattaccaaggatacaaaaatgacacattctaatctgctcctggattgctcaccttgtgaagaagagagcctgaatcctgcagatatagaaagatcttctcaactggcctccaaaatgcacagtcttctggctctgatggtgggacttctcaagtgccaggacatcaccaattctgatgccgaacatttcaaagagagtgagaaggttagtgatataatgctgcaaagattgaagagcctccatcttaaaaagaaaaatttagataaagagctactgaaacataaagatagaatcacaacctttagagatttaattgctaaggaaaaagcatttcaagatcatgctattaaggtcacagactgtgattcagatgaagccaagagtatcagagatgtacctacctttctgggagccaaactggataagtaccacagtctaaatgaggagcttgatttcctgatcacaaaattgggatgtctcctagagtcaaaagaaagccactgcaacagactcattgaagaaaatgacaagtatcaaagacatttaggcagcttaataaagaaggttacatcatatgaagaaatcattgaatgtgctgaccaaaggcttgcaatatcccactcccagattgcacatttggaaaagagaaataaacatttagaggatttaattagaaagcccagagaaaaagccagaaaaccaagatcgaaaagtttagaaaatcatccaaagtccatgactatgatgccagctgtttttaaagaaaatagaaatgatttagattaaacaagcctgaggattaaacagtaatcatttttgtcaaccactccaggaagagtcactactacatatgctagccaaatcaatccatgcagatgatatattaaaatctgtataaatggtaaagtcttacattccaaaaatgcgattacttctaatgtcttcctgtgaataatcaaatatattctatttaacaaaaaaaaaaaaaaaaaaa

SEQ ID NO: 6881 - DNA, 1583 bp, Macaca Fascicularis
ttttaatagctatccatatgggaaaaaataaccttggtccctaccttatgccatatagaaataatttgagatggatcttaggccaaaatgtcaaagctaaaaccttaatgcatttagaagagaataagagagaatgttttcaggactttggggtaggcgtaggtttcttgtaacccagaaaacactagccataaaaggaaacgttgataaatggactttatcaaaacttaaaacttctcagaaaagacaccattgacacatatctgacaaagtgtgtattactcctgtaaactataagaaaaaatcccaaaaaactgactaaaaatgggcaaaagacttgaacagatacttcacacacaaaataattcaaatggccaaaagaatatgaaaaggaattcaacagcattacttattcaggaaaggcaagtttaagccacagtaaatgccagtacatacctaccagaaaggttaatattataaggactaaaaacaccttttaggaaaaaaaggaaaacagtttgggagtttctaataaagataagtatatctctaccttaagacccagccactctatctatagccatatactcaagagaaaagtgcttatatgtttgctttaaaagacttgtaaaagaatgttcataaaaactttatccttaatagcaaaaaactggaaacaaccccaattttcatcagtaagagaatttataaataatggtagattcatacaatgaaattactacacagcactgaaacagtttgaactgatataacaataaagatgattattaacaacatcatgcaaaaaaaaaaaagcaggcacaaatgaatacatattatctggatccatttatatgaatttcaagaatagtaaaaactaatatatggtgctagaagtcagaatagtagtaacctatgtggttctgtggggttttgtctgggatggagcatgttggaacttttttgggtgttgaaaatgttctgtgtcttgttctggggggtggttattttgatgtgtacataggcaaggcaaaaaacattgagttgtaacatttaatatttgtgcattttactgtatgtaaattatatatccattttcaataatatttttaaaggccttgatgtacagaaatccaatagaatactatgcagaaactgaaagtttgactttttttagtttttcatttttttttgagactccatctcaaaaaaaaaaaaaaaaaaaagcatatatatgatgtaataaaagtgtatatctttgtatgtatggaaagtttttgcaaagaagttcaagtgcacaacataatggttaagtgccacctatttgtcccctctaagttgatgtctaatatagtgatgttgagatcacatagcatccaaaggctatttcccaagactggcagagcaatcctaattccagaagagactttaataagaaaatcaattgttcaaaaattcaaaggcttttaatagagtggcttattgtcctgtgagtggtataatttgttaattagccaggtatgtacttatccagtgggaaatgattaaaagtaatttggaacagttaaaaaaaaaaaaaaaaa

SEQ ID NO: 6882 - DNA, 2298 bp, Macaca Fascicularis
aagataaaataagtagatgccgcatactttttgtcacatttataaaatgtctcatcaaattatgtgtcatgattttgactcagatacatttatcataattataaagtatattattaacttacctgcataagatccttaggtacagaggcaaaattgataatagaaagttctaaataatatgtatttatgaaactaagtgataactccatagtggaataatgctgtggtgcattgggtctaggagactggtgagtatcttaaggcaattaaattcaggaaatgtttatttagcagctcctatggactgtgcataatggaacactatagacaaccaatggtaattatgccatcaactaaggagaatattagtgagaaacaatggaatctatggccaggaactttgaatgggcaactccacccaaaaataagagagccaggaaatggggtgttacagaaacgacttaggatcaaaagaaatctgaagtcataaacagtgcatcaacaatatcaaatgaggcactgaaatcaatcagtatgaggaaagaaaaaaaggccatttaatttggtcattagcatgcatagtgaccttaaaaagtgcagtagtgctaagagagagcataaaccagactggcaggaatgaatcagaggtagagtgaaggctccactagagactacttttcctagaaagagatggaaggagggagcaaagtcatatttaggatggaaaagacctgagcttatgtgaaggctgaggagagaaccaaatagaaactggaaaatggcttctactatggctaacacgtgcttggtcacattcacatacccacagggataaagcaaacaagtaaagagaagggatattttaaaggatagagtattagctgcttactaggtaatgttagatttgagcaacagaaactatataattcctgtttaactcattctatatctggagtgcatagaaatccagaagtcaagaccatgtttaataaccttttttgattcctagtatcttcctcgtgctaactttcctaaatctctttacaaggaaaaaccaaaaagagtgattctctttccagcaggaaaaattgaataaatgtatcctctgtgccaaactgtgatgatacgctatggtacttatgttttaattaaaacatgaaaggggattcaagtaccaaaatttaattgacgtgtttacagcagcatcccatgtgccaaattaattcataaaattgttgttctttgcatttttgaagattgaatccattcataaaattaatcagttatgttcagttacccagccttttccctaactgtgcacaaagctacgtaaagcaagactaaggaaacatacagcatgtgaagcccctggagtcttcatgtgaaatagaaatcagcttttgaaatctgcttttctttattatgagagaggttgtcctgatacctggatgtgctcaccatttgctactttttaaagttcgtttttgcaatattggtatgagcctagaataaactaagacttgcaaatttcatttcagtaacttgccacagtggtcatgtaaaattccatctaggaagaggatcatgagatgctttgttccatagtgcctgaggatccgaggacccaacttctaagaagcaacactagccacagctggccattgaacactaatatccaaagaatgctttgtctcctcttagtccatttctttacaaccactgcctcctcttgagctgcattaagtgagacctgagagtgtccctgacagttctgcaaaaagtgctgaggaaaaagaagattttttttaaaaagagcacagaaaaaataaacaagggaacagaagagtaaaaggggcacagttgaacaacatgcaaagcaactcaggtccaaataggtatctaccagacaccctcatctaacaacttccctggtgcatagtttcttgaaacaagagaaaggaatagtgattgttaactctgttgcagtgaggtaaagagttggcccttggatttcttcacttgaagttcttgcattaataaggaaagagataaaacatgatacagtaattgcagtaattgaaacatgtcatccagccagaagagcagctaggggaaactcagaaacattacaatctgcctggagagctaacaaagtgggaaggaaaaagaatgatgtctcccagctttgtacatataattttagttattttgtaaagccagactccaagaaaacaaagaaaccaaagaaaaattagctttctaaaatgttattttccctaaaaaaaaaaaaaaaaaaaa

SEQ ID NO: 6883 - DNA, 743 bp, Macaca Fascicularis
  misc_feature (1)...(743): n = A,T,C or G
taattaattggtataatgtcacaaagcagaatggtattccttggagagttaaagacattctctttaagtctaaaccaaagtctattcctgcttctgattccttctagcccagtgaattatttatcttttcactggtaatgtggtgaatgggaattgtttattacattgaagtgacttgaagtgactttttgtgctttaggtgcaggttgacgctgaaaaaaaacaaaacactgaatttgtcacacctatgtctgcattaaaggctgttttactacgggaagttacatagacttcctgcagtcagctgctgtgcccccagtgccttactggtcctttgtagactcgccttaatgatttgtacaaatgactgggaggaggggatgctgcctgtgtcctggtgaaccttaatgaaggagccgtcttaggtgcagtgcgaaacaagcatttgttctgtactgttagagccaaaattgtgatgagcaatactgataattgtccagtttatgtcatctttcccagattttaaaatctgttctagatattcttagcttgaaccacttttgattgtgaaatgtattagttgttgtcccattattactgtaaaatgaaattttgaatcttcttgttaataaactgtggatttcccccctcaatttcttaaacaacaacaacaaaaaaatgcttgaagattgtctttgagtgtaagatctgccttttcagaanngagagtgttagtttgtaat

SEQ ID NO: 6884 - DNA, 727 bp, Macaca Fascicularis
aaaacttaaaagttagatttagcaatcaccagagccactacttttatgcttaggtatttgtttgacttagaaataagtggtcacgtgtaccactttacagtgccctgcaggtgttaagatatgaagacactttgacttacacctcataaaatctttacaaagtattttctaagtgaataatgatgaaataaagtctttattctaggtgcatctgccccacataatttgttttctttggactagaagttttgatgtgttgagaatggtaatgaattaactccattttaaatgtagaatgcgtatcattccagtatgaatgccctaatcctaagatttgtaggttttgtgtactagtatgaaaattactgaagatggataaatcacatgttggagacataagatacaaaccttttttgttttctgaaaatacagcttctgatttctgattccttattgtaatatggtataattatacttgattgtaattttattgttagattatactttattttttaagttcagtgtttgaggacagactttcatttggttagtagtattatggcagctagcagctaaatatggtgaagtgtacaatcaaaaggatatttttaatgaagatattagtggtctaacatgtcatttcagatgcatagctgaaatgtagtaaaatcagttttgctacaaataaacttgcataaggtatataaatttatgagtttataaatca

SEQ ID NO: 6885 - DNA, 735 bp, Macaca Fascicularis
  misc_feature (1)...(735): n = A,T,C or G
tggaactagtataannnnnnnnnnnnnnnnttttcagtggagnnnnnnnnnnnnnnaggttgaagtggacacatcattatcttgggatggtacttctttatttaaatagtcctttaaagttctttgagtggcagagaatatattttgttnnnnnnnnngaaggctaccagatgatttaagttcattttcatagttaggagaaaaagatttttgagtagtctaatgtcgtcagaaaggaataaaacgttgtatgtaccaagnnnnnnnnnnnnnnnnnnnnnnnnnnnnnnnnnnnnnnnnnnnnnnnnnnnnnnnnnnnnnnnnnnnnnnnnnnnnnnnnnnnnnnnnnnnnnnntctttttaaacagggaatggccaaatccagtgctattgaaacagcctgaagaatgcaatcttaatttgcctgtatgggacccaagggttagtgtattattttttcccctaccaattcacactgtgcaataacaagtaaaaatcatctgcataaactccagggagacttccagccttttacttatgagtggtcatgtccgtattacactttcttttagataacctcaactataattgtcctcaactataattgatgtgagaagcataattatgtaccctgtaaaccacatttaattgtacatagtttttaatacagattttactaacattttaatttattctatatagaactaccttgtaagtcaaagttgtgtgggcatt

SEQ ID NO: 6886 - DNA, 250 bp, Macaca Fascicularis
aacaacagcaccaatcatggtgaccacggtgacaacaataaaaaaggagaagaagaaagatgccccgcaagaaggagcttcaataaacgcaccagtatgatgctgctgccggccgaccacggcccgtggtgatcaggcatcatcaataatgaaaaaaactaggtgatgaaataatttttttttttaataaaataaaataataaaaaaaaaaatgcagcagtaaaaaaggcagcagaagaaaccagtagga

SEQ ID NO: 6887 - DNA, 1320 bp, Macaca Fascicularis
  misc_feature (1)...(1320): n = A,T,C or G
aaaagatacattgcnnnnnnattcattaagaaattttgaaattcactttgtnnnnnnnnnnnnnnnaattgggctgtgttggtacatttgaaacactgtttatgttgcttgaaacacttatttatttaatcgccgatgtgatgatgcctatggccgagatcaaatatagctagattggctagactacttatttgtttacttaaactatgggaagaagcatattattgtgtcattctgttgtgtgtgtatgtgtatatacaatataaatatatatatataaagttattttttctttgggttaatttattataagttgtaacacttggctagttttgtttgtatatgtcttaaaatgttttcttatgatatttaagtgacagttaaagaggtatcaaggtaacttgtgtagaactattgtttgatatattgtcatgtttgttgtgaatattttttcttactgcacagtagaaaaataaaaacaactgagtctttattttaatgtaactcagattggggaaaacaaacagagctaagggaacaaaatgactgagggagcactctcccacgtccagtgcactgatcattttagtatgtttgtgctttgtacggttatatatttaaaacaaaaacaaaacaaaaaaatacaagggttcatgctcttccctgggtaatagaaacagttactcgctatgcataatctagttgatagttaaatttgctattgcttttcttgtcttgttatataaaatcttttcaatacaagtttagtcttaatggtaataaaacgttatggttatttataacttgtgcttattttgtgcatttnnnnnnnnnnnnnnnnnnnnnnnnnnnnnnnnncaggactgttgttttcacactgaagaggcaaactttgtagtagtcgtcgtagtggtagacagattacgaataccaaggctgcatcatagactcctcctttaaattttttttctgtttttttttcctctttttggttttggatataacaccagatttcnnnnnnnnnnnnnnnnnnnnnnnnnnnngnnnnnnnnnnnnnnnnnnnnnnnnnnnnnnnnnnnnnnnnnnnnngcaaagttttgatgcatttgctaagcattagtggnnnnnnnnnnnnnnnnnnnnnnnnnnnnnnnnnnnnnnnnnnnnngaaaaaaaaaggaaaaaaaatcttaggaccaggcagttgtatactttagttattaatgaatgacttcatgttaatcttgctagtttagattatttccaagggaaagtattgtaaatgtttttttttcataatcttgttgtgtttgaattatt

SEQ ID NO: 6888 - DNA, 2881 bp, Macaca Fascicularis
  misc_feature (1)...(2881): n = A,T,C or G
acaacacaacaaaatggccgtcgcgccgctgcgcgcctgaggaaagagccccaacgtcttacgctccgcctcagcctgcgggactgctcggctcggctcctaggcagtgagcgtcagacctggtcgagcccgttctccggcgtccaacccgagcggtgggagccggaggcaaaggcgggaaggccggaaccgggcgtggggtgggccggcttgggatggattcggggcgggggcgcatgtctgggaattgggattggacgggaaagaggggagggcccggaacgggcgtggggcggtggatgaaggagggaggtttggatgggaagaggtgaggacggcgggggcgattggggatgaagaaccagagcgtggggaggtgtggaagttagggtgcggcgcccagaaggttgtgcgtcctgctacctgagctgaggggagagctgggatgtgccagctgcctgtggggagtgagcgggagaaaggacagtttgggcgtcctgacgggttgtcacggtatcggacggactacagtgcgtggagaaagatgacaggatgtggggacgaaatgctaaaaggaggggaagagcaaacacttccgttatattcgttaagggactagtgaattttgaagccaggcaaacttgggctcaaacctcaattctgccaccttgtgtaacttaaccgcgtctgtgatccttggcatgtgtctgagccttcctgatcatgtttcctcattgtccaaataattgcgaatcacgtttgggcgttcactatttgtcagatccagttttaagcactttgcacgtattaacctcatttagaatttaaaataacttgtatgaggttatcattctcacttaaaaagtgatagcactgaggaccagagaggttaagtaatttgcctaaagtcacacagtaagtggaaagtcagaatgtgaactcaggctgtttcgttccagaatccaggcctttaattgttcagatacattgccacttgtaaatgaggttagtaattctgatcctatatagctaaatctttgaggatttaaatttggtattgtctagagtgtttagtacagtccttcagtcaacaaatatctattgtctatagaacaacagacgagacctctgctctcttgtagcttatagtctagaaggagaaacaggcaacaattaagtagtttcacaaataactcttttaaaatgctatgaaggagactgcttggtgcagagatcatgggtaattgggagacaaaatcttatacatcttgagcttagatcctagcatggttcttcctacataaaagttgctcaataaaattgaataattaatggaaagagatgggaagcttgagttttagggtatctgagcagaagagagatgggagaaggggattcaggctttttatctgagcagaagagagatgggagagggggattcaggcttttaataggtggaaaaggacacgggggccagagtattaggacggaagggcaaataggcaggcagttgggttgcgatgaagaggaatgggtggaggtttgagtattttgtttagggaggggagtaattggaggtcagcatattggaacgcattaggatgtcagggtattttctgggatgaagagagaggagcagcttgggaagtctggatggatagagaaaggctgagtctgggcacaggaaagaaccatagagaagtgggggagactattactgtgttggggaactgggatagaatttgtgggcaaattggcagtcagaatgggataaagaagagtgggaggcagaggtggacagcacagaatgggggaattggctttggaaagaaaaatgattggagactttgcagaggaataggaatcaggatatttgaaaggaggagaaggttaaggaaggaaagtatttcagtaggtcagagggtatgggatgaagtagacttggagggaaagtactgaaatccaattaaagggctaaggagagggatatgggggttaagaaatggggatgggtatttgcatattagggagtctgtagagagacagaaggaagtctgccttatttggagatcagagaagatgggaagttaggaaagttaggaaaggctggatggaggtggagtttgcagtctctactaagctgtgatggactgaatcgttagatcagagcaagtatctgggtttataggtggcaggacgggtaatgttttgttgcctggacataaattctgattatcatgtcattccaatggctttctcttgctctgcagacaacctttaaaatacaactgtagctctgaactttgctttttttttttttttctctttatcctgctccttcactcgccctagcctacctctcagctgtcttcattttttccattgcttgcttggtctttgttcatgtgattgcagacaacatcctaggatcaaactacatcctcatctctcccttaaaattataattcagcatttcaacctccaggcagtagcctatgaaataatgccagccattctcaaacactgtaaacccataagcccacttcactgagttagctattctctgagaccaattacatatatcttgtttcaatgttaaagctttacagaagttgtggcaagcaagggtttaagtctatgaatgagtaagcctgacttttactaatcaggagaggtaataaaggacctcatgatagtctggtgagacctaaggggtcttggtcattaggatgtaaaaactacaggctgggcacannnnnnnnnnnnnnnnnnnnnnnnnnnnnnnnnnnnnnnnnnnnnnnnnnnnnnnnnnnnnnnnnnnnnnnnnnnnnnnnnnnnnnnnnnnnnnnnnnnnnnnnnnnnnnnnnnnnnnnnnnaaaaa

SEQ ID NO: 6889 - DNA, 667 bp, Macaca Fascicularis
  misc_feature (1)...(667): n = A,T,C or G
attacagcataaagccacaacacctggctgnacatcagatattttaaagtgtagcccagagtctagctggtaaatgttacttatattgggactagtattttctaatgtttctgngatatgcttcctataaaatgaaatgttttcctggaacaaaactagttaggattgcattcctggccaaagacatgacatcatataagtaatagacatcaccagcaatgaattttgaaaagcaaaaaatactattaacctatataaccatttaaaatggaaaaaattatattccaggtacctctattttctgaactagaagaaaccttagaggccatctgatcatagagtcccagaactggatggatccctagagactacctaatctgactttctgtccactgcatggattcctctaaaaagtgtgtcacttatttccctaccttattaactaaagaagcagaacagcatagagctctttatgtataacaggcattccttgataatcaactctaaaatggagacttgagatgcttaaatattgtactactgtgcttattttataaagatttcataaaatgatagtattggttattttaaaagggctttggcttatgctgaattatacatgtgcaccagaaatattataactctactaaatttccttgttctaaac

SEQ ID NO: 6890 - DNA, 718 bp, Macaca Fascicularis
  misc_feature (1)...(718): n = A,T,C or G
gccatagaatanncagtcttgtggtcaagagagttctcaagtgacaaccattggggtttcttcataaagatcttgatatgatcaagatggaaagagacaagcataaacaatgtgccctgtttgactaagtcaaatgaaatggggtggttttttgtttctgttcctaattcctttaaaaaaaatagggggaatagtattttagaattttatgcagaatttaattctctttttacggttaagattttaagattttcttacttgcacataaaaaataatttgggttcttaaacttaatttctggcctgtgactagaatgtttaaaaaaaaaaagtcggactaaatgttaattactgaaacattaacttaatttctaaaaccatggtgctatcatttattaatctgtaatgtcttcatacaaaatgcagctcctgggctgggttttgggggaaaaaaaaattgtgttctgtactggtctggagtccattgctgcagtctccttggttagttaagacaaagccctcattaacgtttgctgcaggacttaaaattttttacctcccaactaacaaacatagcctcacattaaatttaatgggtcagtaaagccctttttaaaggggctgctgggaaactcaatcaaactgatttgaggagcagtttaggtacatactgccttttgtttagctttttgttttccttactcagtctaactgaggct

SEQ ID NO: 6891 - DNA, 737 bp, Macaca Fascicularis
  misc_feature (1)...(737): n = A,T,C or G
catttgtaaattttgtcatgtattgtaatatagtgaacatttattgtccttatgaaatggtagctttgtgaaatacattcaccaaaaatcaacatttgaacatctttatgattcnnnnnnnnnnnnnnnnnnnnnnnnnnntatcaattgagctnnnnnnnnnnnnnagtttataggctnnnnnnnnnnnnnnnntcctccaaattgtgtaggtatacgttatgatggtttaattcttcagtaagggccannnnnnnnnnntattttctaccannnnnnnnnnnnnnnnnnnnnnnnnnattgnnnnnnnnnnnnnnntttgannnnnnnnnnnnnnncttttttgcctcacttaacaaatatcttaaggtcaaagcaatannnnnnnnnnnnnnnnnnnnnnnnnnnnnnnnnnnnnnnnnnnnnnnnnnnnnnnnnnnncaccctctgcatgtagcttcaccctagatagacttttgtctctnnnnnnnnnnnnnnnnnnnnnnnnnnnnnnnnnnnnnnnnnnnnnnnnnnnnnnnnnnnnnnnnnnnnnnnnnnnnnnnnnnnnnnnnnnnnnnnnnnnnnnnnnnnnnnnnnnnnnnnnntgagtaccagtaagagaatgcattcttttctcatctagggcaggaatgtnnnnnnnnnnnnnnnttacatagaaactcctagattttcattaatgcatttcacaaaagtaagtatttcatatgattcagatg

SEQ ID NO: 6892 - DNA, 190 bp, Macaca Fascicularis
ccccagaaagatggtgtttggttttttgttgttagggtttttttttttttttttttgtgcaccaaagtggcaactaggtcagtgttgggggatcaagctggcctcggggtggggggcccccacctgcttctccctggttcccacagtgttagcgtccctgaaaagacaatattctctgtaaagcaataag

SEQ ID NO: 6893 - DNA, 598 bp, Macaca Fascicularis
  misc_feature (1)...(598): n = A,T,C or G
gccctcccatcttatcnnnnnnnnnnggtggctggagccacggtcacttcttggtcctgttccagaactgttggtagtgctnnnnnnnnnnnnnnnnnnnnnnnnnnnnnnnnnnnnnnnnnnnnnnnnnnnnnnnnnnnnnnnnnnnnnnnnnnnnnnnnnnnnnnnnnnnnnnnnacaaggtgtccagatctatgnnnnnnnnnnnnnnnnnnnnnnnnnnnnnnnnnnnnnnnnnnnnnnnnnnnnnnnnnnnnnnnnnnnnnnnnnnnnnnnnnnnnnnnnnnnnnnnnnnnnnnnncacacgactgagtgaggccctgcnnnnnnnnnnnnnnnnngaggatgtgtgcaggtggcggagtgcaggttcggtggccttcatggtgctctgcctcagcaggccaagcaggctgcccacggccgccattcctccttnnnnnnnnnnnnnnnnnnnnnnnggtaagtacaggccctggcgtgcaacctgcagcnnnnnnnnnnnnnnnnnnggggccnnnnnnnnnnnnnnnnnnnnnnnnnnnnnnnnnnnnnnnnnnnnnnnnnnnnnnnnnnnnnnnnnnnggtcacagcacac

SEQ ID NO: 6894 - DNA, 713 bp, Macaca Fascicularis
  misc_feature (1)...(713): n = A,T,C or G
tgggnnnnnnnnnnnnnnnnnnnnnnnnnnnnnnnnnnnnnnnccccgccagtctggcccccgttcccgagtttncnctgcccgacctagtcaacctgggccacacctnnnnnnnnnnnnnnnnnnnnnnnnnnnnnnnnnnnnnnnnnnnnnnnnnnnnnnnnnnnnnnnnnnnnnnnnnnnnncgacctccaaccctcctggtggaannnnnnnnnnnnnnnnnnnnnnnnnnnnnnnnnnnnnnnnnnnnnnnnnnnnnnnnnnnnnnnnnnnnctacagccatctcttggaccagctctatgagctnnnnnnnnnnnnnnnnncggcgcgccgtagccgcctgggcgtcctcttctgcccgcgccccgatggcacggccgacatgcacatcatcatcaacggcgaggacatgggccccagcgcccgggggctgccagctgcgcagcccctctacgcggtggtggacgtgtttgcttccaccaagagcgtgcgccttgtccagctcgagtatggcttgccgtccctnnnnnnnnnnnnnnncctagtgatacagagaagcatggtgcaccggctggccattgatgggctccacctgcccaaagaacttaaggatttctgcaagtatgagtgaagacccgcagcgnnnnnnnnnnnnnnnncatcctggggcctnnnnnnnnnnnnnnnntggtctgaagttggccatatg

SEQ ID NO: 6895 - DNA, 344 bp, Macaca Fascicularis
attccaactgtatgccaggggtggtgcttgtagatatcactcattcttagcttagtaggagctatcagtccttcagcacctactgtgtgccaggcactgtgcttagtaatttcactcatatgcaaagagcaccctcaatgtctgagcacatgctgcctgcctagcactgtcctggtgatgccctcactgtggtggtgggagctacattatggagccctccctgtgatctgtctgtgccacaaggtcagagcttttgccctgtgctgtttcagttccaccctttttggaggttactcaacagtccatgagggcagagaacctaggcgaacatcacttgccaggtg

SEQ ID NO: 6896 - DNA, 794 bp, Macaca Fascicularis
taatggaattgtgcatgtaggatgagtgtacattacacactgtagagtatgtgttttatacctcacttaaaaggaaaaaaaaagtcagtataaagaagagatctctttgatcccatctgttcaaagagacctttttataaacatcaccaaaagagctcattataagatggccctttcctgatccccagggttaccagacattgttcttaattatgtgtgtctgtcccgggctacatcatgccatagaatccctctgagatgggagagttcactaacccacatttccctggaggggcagttgcatatgtggccttgagctgatccctataaaacgtgctatttggtggtgatggtgacagcaagagacacaagctttggttacttgagctcttactttccttataaagacagaaacatattcaaaattcaggaactcacaaacccctgggcttgaaggaaggccatgttgtcgtgagttacagaaaaaggaaaattccccaattatgtttccacagcatctttcttctttatttaactgctctgataaaccacagagaaatgggcttttccactcaatctgtgtctactgagagttccaaagagactgtcttgactgtgcatcagtttaccccagtagctggtgtggtgaatttgttgctgctattgtttcttggatttgtttggtttgtactatactgacaatatactgatcctgatttctcagtgctacaggggaaaaggggtcagtgacagggaagccctcactgtgagcccctaactctctcgttcctaaa

SEQ ID NO: 6897 - DNA, 797 bp, Macaca Fascicularis
  misc_feature (1)...(797): n = A,T,C or G
ccctcatgactgaggtagcttccagataggccagagtaaagtgtagagtgtgccccgtggcatccctccatcatcttctccatcatcatctaccagggtcagactgggaaacctggttggccacgccacaccatgaccgaggagccaactgggacttgtggctgtttgacatcctcatgttcccattggtcttccggagaatagtgctaccctcacatctcctggagcacagccttcctgaaatgtcctcaccccatgcctttgccattgtgtgctctcagatttcctccactatttgacaccctctttagagggctgcttttttttccagagataatcctagccatcctctccactcgggctatggccacttactacccgtgcactttgccacacaggggacacctggatggtttctcttaggacttttcccacctccttctcatgacatttgctgtggagaatgcctggctggcctcctggggcctgtctcgctttgccaggagacatgacccactaacgtggcaactctaacccaaaggcccctcagacattacagcaaatccggagccannnnnnnnnnnnnnnnnnnnnnnnnnnnnnnnnnnnnnnnntccacgtcaagtttacttggaatgaaagatacttgaattattgtgcgcccgggagtgcccagcttctgtttcatagtcttaacaggtggccattgttgtgaaacgagagtgatgcctgaagatctcaatgatgtttgagccttttatgtaactttctattaagtctttgtatatctcgactga

SEQ ID NO: 6898 - DNA, 664 bp, Macaca Fascicularis
  misc_feature (1)...(664): n = A,T,C or G
cagcacagcacttnnnccagcatctgttcctgctttgattggtggccacaaacacttggcagccagcaatattccttagcaccctattgggcagttttatagcagaggcttccaggagactcctccccatgaatannnnnnnnnnnnnnnnnnnnnnnnnnnnnaaattctagagggtggatttatgggaagttccactggcagannnnnnnnnnnnnnnnnnnatttaatgagccatagctgtactctcttcaaaagggtctcaatnnnnnnnnnnnnnnnnnnnnnnnnnnnnnnnnnnnnnnnnnnnnnnnnnnnnnnnnnnnnnnnnnnnnnnnnnnnnnnnnnttgccatactctttaaagctctctagttcttattagccagtgcttctttattccaataccctgttatagctaataattcctcatatattaaactgtctctattcaaatgagcatggtttgtctcctgatgagactttgactgataaagatatatcaagcttttccatggatccatctatgcctggtccttgtatatagaaggcattcaatgaatatagtcccttaataacatcatgacacacagttttcttatgtagttgtcacaatttcaggccctttcagccttatatttattgaggagttactgtctgtgctc

SEQ ID NO: 6899 - DNA, 1977 bp, Macaca Fascicularis
gacatgtttggtaattgaaaattgtttcctttgttaacttagcagtgattaaagatattggggatgggtgagggagggtaaagatttgaaaagaaactttttgaacattttcagacaggtttttatagctcggcaataatttcttgttctgaatgaacaaacaggtgagctttggcagaatattgatgatgtctgatggttctagtctttgtgacagattttaatcaaagtattctttttgacacaattattttttcagctttattgtggtataagtgataaataaaaattgtatatattcaagtcatacaacaccatgttttgatatgtgtatacattgtgaaatgattaatactatcaggctaattaacatatacattacctcacatagttaccttgttttgtggtgagaatacttaagatgtactctcaacacattttcaatatatattattatgaactgtagtcaccatgctgtacattaacatcctccagaacttattcatcttacaactgcaagtttatgctcattggccagcatctccccatttcccttaccctctagccaccaccatactactctctgtttctgtgagttccacttttttacataacacatgtatgttatgatcctgcagtatttgtcttcatgtgtctgcttatttaacttagcataatgtcttccagattcaaccatgatgcaaatggcagtatttcttttttaaggctgaataatattctgttgtgtatatataccacattttcttcatccatttatctgtttatgtgcacttaggttgtttctatatcttagccaacctcttgacacaatgtaattgttctgtattgtctgtagaccattaatacagggtttgaataatatgcttctatttgattgcttggggtgtgggatttttgcctttgtagctaaatcagcagcaagttaaagtggtgcaggtctgtgaaggattgtaacctcctcttcccccaaacaagggcattgcttgtccaaatatgtgatcactataaatgtgtaaatttctaaatatgtaaatcaccataattgattgactgatcgacttctaggaaaagccccacatttattgctagttccagaggcattctcaaaatgattctcgtttctttcaggtgacattcactgtgaactacattttctttctaggaatttgagcagaacagtgttgggaggcagttttcactttctgtcccacccgctggttgacaagctggctagtgtgttcttggagttccgagtcacagtgagaaggatctctgtgtgcccttattctgctccacttgtgccctagtcagtttattgatagtgaatgcacagatcacagccttttacaaaggctagtgtggcatagtgtttttaggcgagtcggatagacttgctgttttaatcaatactgacatttattagctgtatggtcataagcaaattacctaacctctctgaagctcagttttctcaaagtaagattggactaaaaataggattattagtttaattgatttatgtgtgtcatgaggatttaatgaggtaatagatacataaaatatcagtattaatatttggtgtttattgttgaagctgctcagccatcactgtctttggttgaagggaaacagcttttgcgttctactctcaactcagctcatgagtatgcacagattgcttgtttgtttttcttttaaggaagacaatggtgtaaaattggttgatcctttgggtgaaatgttggcaccatcctgggaggaacatgccacctgtttagcaaatgctgaggaacaagatatgcagagagtgcttattgacatcagcgagaaagaagctgtgaatctgcaacaagatgcctttgtagttattggtagagataccaggtgatgataagagttactggtaaaaaaaaaaaaaaaaaaaaaaaaaaaaaaaaaaaaaaaaaaaaaaaaaaa

SEQ ID NO: 6900 - DNA, 685 bp, Macaca Fascicularis
  misc_feature (1)...(685): n = A,T,C or G
ttggggctggcagnnnnnnnnnnnngannnnggnnnnnnnnnnnnnnnncagctaggcagnnnnnnntgccaggtgcccacgcccaggcctcccaatcagaggcagacaggcagggagggtgtggctgggctgggctgggtggggcggcctggggcaggggtgtagacccgaagtgtccccaacctcagagcgacctacagtcctgagtnnnnnnnnnnnnnnnnnnnnnnnnnnnnggtaaggggaaggtaaccctggagtgtctggaggccaatggctggctgaaccccagatgcctttttttccacgtccccatgaatgaaagctgtttgggccttcattctgcaaatagggacaaacagctctnnnnnnnnnnnnnnnnnnnnnnnggagggcctgggggagccttnnnnnnnnnnnnnnnnnnnnnnnnnnnnnnnnnnnnngaaaaaacaggggtctaaccctctcctcccattttacaagtggggcaatgaggcatgaaaggagaggcgtcggggttaccccgtgggtctgggtccagggaagggcctgtatgggggagggtgctgggaggggatggtgtctggccctacccctgtggggtggggaggtggggctcccctgtatcacaggacaccacccatgaaaggtccctcatatgtctgggtcctgtgggtgggg

SEQ ID NO: 6901 - DNA, 573 bp, Macaca Fascicularis
  misc_feature (1)...(573): n = A,T,C or G
tggttgtctgtctttgcctccccttttcagaggaaaggttatcaggacaggacgcagggagccagaagaccattngaaggaagcctgtttccagcaggcccagcctccagccaccgcttttggggcagcgccattgnncctggctctcaggctgccagtctcccacaccgaggctctacttcccgcatnncggccagctggatcacccagcccctttagactatcccctggcatgcagccttctcctccactcggcctgcctctttgctgctgtaattcctcttgtctcctgggagaaatgagattgttttcccaggacttccagatcccacttcnnnnnnnnnnnnnnnnnnnnnnnnnnnncctgtcaagatctggaatcaaaaggtcaaatgagatgatgtatgtaaaagtcctccacagannnnnnntnnnnnnnnnnnnnnnnnnnnnnnnagaccccccccccaccaacaacgttccaaatcttccacaagcagatctggagtccaggtgtcctggctcctggccccgaacnnnnnnnnnnnnnnnnnnnnnnnnnnnnnnnnnnnt

SEQ ID NO: 6902 - DNA, 2961 bp, Macaca Fascicularis
tactggactgaaagtgagccgcccgggccccgaacgccagtcagccagtgagtgggtcccgcagtcaccggcaaccagggcgaatcatggcggccgccaaggtggctttaaccaagagagcagatccagctgagcttagaacaatatttttgaagtatgcaagcattgagaaaaatggtgaatttttcacgtcccccaatgactttgtcactcgatacttgaacatttttggagaaagccagcctaatccaaagactgtggaacttttaagtggagtggcggatcagaccaaagatggattaatatcttttcaagaatttgttgcctttgaatctgtcctgtgtgctcctgatgctttgtttatggtagcgtttcagctgtttgacaaagctggcaaaggagaagtaacttttgaggatgttaagcaagtttttggacagaccacaattcatcaacatattccatttaactgggattcagaatttgtgcaactacattttggaaaagaaagaaaaagacacctgacatatgcggaatttactcagtttttattggaaatacaactggagcatgcaaagcaagcctttgtacaacgggacaatgctagtactgggagagtcacagccattgacttccgagacatcatggtcaccatccgcccccatgtcttgactccttttgtagaagaatgtctagtagctgctgctggaggtaccacatcccatcaagttagtttctcctattttaatggatttaattcgctccttaacaacatggaactcactagaaagatctacagcactctggctggcaacaggaaagatgtcgaagtgactaaggaggagtttgttctggcagctcagaaatttggtcaggttacacccatggaagttgacatcttgtttcggttagcagatttatatgagccaaggggacgtatgaccttagcagacattgagcggattgctcctctggaagagggaactctgccctttaacttggctgaggcccagaggcagaaggcctcaggcgattcagctcgaccagttcttttacaagttgcagagtcggcctacaggtttggtctgggttctgttgctggagctgttggagccactgctgtgtatcctatcgatcttgtaaaaactcgaatgcagaaccaacgatcaactggctcttttgtgggagaactgatgtataaaaacagctttgactgttttaagaaagtgctacgctatgaaggcttctttggactgtatagaggtctgttgccacagttattgggagttgccccagagaaggccataaaacttacagtgaacgattttgtgagggataaatttatgcacaaagatggttcggtcccacttgcagcagaaattcttgctggaggctgcgctggaggctcccaggtgattttcacaaatcctttagaaattgtcaagatccgtttgcaagtggccggagaaatcactactggtcccagagtcagtgccttgtctgttgtgcgggacctggggttctttgggatctacaagggtgccaaagcatgctttctgcgggacattcctttctcggccatctactttccgtgctatgctcatgcgagggcttcctttgcaaatgaagacgggcaggttagcccaggaagcctgctcttagctggtgccatagctggtatgcctgcggcatctttagtgacccctgctgatgttatcaagacgagattacaggtggctgcccgggctggccaaaccacttacagtggagtgatagactgctttaaaaagatactgcgtgaagaaggcccaaaagctctgtggaaaggagctgctcgtgtgtttcggtcctcaccccagtttggcgtaactttgctgacttacgaattgctacaacgatggttctacattgattttggaggagtaaaacccatgggatcagagccagttcctaaatccaggatcaacctgcctgccccgaatcctgatcatgttgggggctacaaactggcagttgctacgtttgcaggaattgaaaacaaatttggactttacctacctctcttcaagccatcagtacctacctcagaggctattggtggaggcccataggaagatcagccccaggataggtgctgtctttttgtgggtactcagtaaagagcatccctcctgggagtgaagcaatgcttcatcccttttacatccatctcctgtttaaattcaaatccaggctttcttatcatgtgaaatcattcattttctgggtgttttcttaaccagatcattgtgaaattattcataattattctttggccctctgcccagaaacctttgtttgtatctgaaaattgatgggatttggtcaacactaacatgatttgggcaaaggagcaagtcaaaatagaaattagtactcccctccttgaactaggattgtagtcccaaagaggctacctgtaaggcaatcatggtgctcggagcagtgttccgtgtgtgttttaaactggtaggaaactgggtgcatatttatacaaataaaaaacactggaagaaataaaaaaatatatatcaaatatattcagcctagtttcaaattttaagcatgcacaaattctgtctctggattatattatgaagcttttatgtgaaacatgtttctttgtaatgaaaaccacattggagatgtttagtaatcatattctgttactggtaccaagactactagggaaatgcctttgtactttaaggaagtacttttggcattttattatatagacggaaaaaactgagatgtagcccctctcctggaaggtgctaattttgaaaaactgctcatgtgatgtacatgtactaattactgcctattttaataaacactcttgaaaaatgcatgttaccctgttgctgcctgccctattcccctcatctccccatcaggggcacccactcgcttttaaaa

SEQ ID NO: 6903 - DNA, 683 bp, Macaca Fascicularis
ttaaacaatttggtatttattgaaagtcagatggattcttttgctttctgagaggtgaacacagaagactgcaacaagaaccaaatgacatgcaaggattttgcttaattatgctgtactctcagcatcagatacattcagccataactgtaacttcctgagagatggatttcactttcatacattaatggatggagtctacaaatcaatgaaaaaagtttttgttaaagagcaataaaattatgtaaatattcaagtaaccttttttctaattaaaaaaaaattgtaatcagtgattctagaatgacagcaacttctgtttaacctacgtgaaggaaaaaaaaatggaaagaaattaatgtttgctgaaggagtcctttccatggagatttgttctgtttcattgaagtaatgaagtttcagtacgtggccaaagcttggattccactcttcgtcctgcagttccacttttcttcatgatcccatcaaagaaaaacggcatttatgttacttggcttttttcctgcttatcatttacactttgacgttgtttgctaatgaatgctgtgtgaagttctgggatttggctactcttcattggagattatgtttaagagcactacgcagattctgcccttgacataatgtgtgttgttatgtttttagtaattgtacattcttca

SEQ ID NO: 6904 - DNA, 368 bp, Macaca Fascicularis
  misc_feature (1)...(368): n = A,T,C or G
gatgnnnnnnatctcacacatttatannctcacacacacgcacatgcacacatacatgcaggtgtgcagacttggctccaggcgtgtgtctgatagtattattctacgatatttccctcatctccatagaataccagcttctgaatcctcaatcagcctttacttcaagaagaaaagaaaatctctctccttccaggtctgtggtgcagatgggaaaagtgtggtcaacacccattaaggctttagtcaaatgccagctgaattagaacgtgatgaacgttagacaagacaacccgaccgggcgggcgggggcaggcgcagagtctataaatacaaagttagatacttttcaggaataaagactctaa

SEQ ID NO: 6905 - DNA, 1872 bp, Macaca Fascicularis
gttaggagctgctgggaagggctctgataggcctacccctcttctccacccaggagatgagaaggagggcaggcctttttaatctggtatatttcttaatagctaaccagcacaatggaaaactcagggaaagcaaataaaaaggatacacatgatgggccaccaaaagaagttaaattgcctaccagtgaagcacttctagactatcaatgtcaaataaaggaaaatgcagtggagcgatttatgtttcaaataaagacacttagggaaaaaaaccaaaaataccatgaaagaaatagccgcttaaaagaagaacagatttggcacatacggcatctactaaaggaactgagtgaagagaaggcagagggattgccagttgtaacaagagaggatgttgaagaagcaatgaaggaaaaatggaagtttgaaagagaccaggaaaaaaacttgagagatatgcgcatgcaaataagtaatgctgagaaactatttcttgagaaactcagtgaaaaggaatattgggaggagtacaagaatgtagggagtgaacgacatgctaaactcattacctccttacaaaatgacatcaacacagttaaagagaatgcagagaaaatgtcagaacactataaaatcactttggaagatgctagaaagaaaataaccaaagaaactttgttgcaactggaccaaaagaaggaatgggccacacagaatgctgtaaagctcattgacaagggcagctatctagagatctgggagaatgactggctcaaaaaagaggttgcaattcacaggaaggaagttgaagaattagaaaatgctattcatgaactggaagcagaaaatttggtgcttattgatcaactattcaactgtagacttgtggatctcaagatacccaggcgactatatcttacccaagctgctggactagaagtgccacctgaagaaatgcctttggaattgccagaaacacatatagaagagaagtcagaattgcaacccatagaagtagaaagtagagacttgatgtcctcatcagatgaaagcagtaccttacatattagtcatgaaaatagcatcgaagatctccagtatgtaaagacagataaagaggaaaactcatgcacagagtttggggacactgatatgaagtacttactatatgaggatgagaaggatttcaaggattatgtaaacttgggccccctgggagtgaagcttatgagtgtggagagcaagaaaatgcccattcattttcaagagaaggaaattccagtcaaactctataaagatgtcaggagcccggaaagtcgcatcacatataagatgatgaagtcttttctctaagactgaaagctgcaaaggaaacacaacgttttcttataaatgttttttgggaactgaactatgtccgttgcccattttacttatgctttggctcatttttaaaccagctgttgtttctaaaggtcataattacatttaaaatcaaaggtattcagctattcatttacttgcatggtatgagtgaccaaaatggaagcacactttgtatttctacattgaagtattcagaagcatgacagtagtttcaaggtagtctctgaggttccttttcacacacaaaacattcactgattaatctgcaattccaatatgaaatagttccattagaaatgtttctaagaaaatctttgtatagcattgtctacacatctttccctctgaggatgctcaatgtgatagacagccagtctgtaattcaagtcaattcttcttagtttaaccctgtgtattagtctgttctcatgctgctaataaagacataattgagactgggtaatttaaaaaaaaaaaaaaaaa

SEQ ID NO: 6906 - DNA, 736 bp, Macaca Fascicularis
  misc_feature (1)...(736): n = A,T,C or G
tagagcaaataaaatgaggcatgatnnngagttattcatgaaaaataaaaagaggcttgataggtacatttncnntnctgtggcacaggcatgatgatattgggtgtgtagggaagaaaatatcctagaaagaaaatatagtaagctctcagtaagaagtatctagccaaaataatgttgatatcattattagtattcannnnnnnnnnnagcctnnnnnnnnnnnnnnnnnnnnntcattttttattcagaactgaagttgaaannnnnnnnnnnnnnnaaagggaaagaaagcagaaagagattgagaattagaggaagataggtggaatcaacggtagagatacttatatattcaaagtggggatgaaaagatcttcagttaatggaacaagaactagaggattagtatattgttcaaagctataaatcaaaccaatagatgtattaaaaagtgatgtaactatcagacatttggagagagatggacaaaggaaagtggagatagtgtaagttaaatccttatcttttgtaatggggaattattaaagatggtgtaaagtcactaagtcaggaaattattgctcaaacatattatttaaagttagaaagttagttaccagacgatctaaaataaatattgttaaaagcattacctctagggaatgggactagatgtaaaaagggtgggatgggaaactgtgtttttcattttaagtnnntctgtactatttaa

SEQ ID NO: 6907 - DNA, 746 bp, Macaca Fascicularis
cagccaagcttagagcagctgtcaaattataagttacaatcatcttattcttcaaattttttctcacaatttctctaatctttactcatgttgtgttcctgaatgtcttgatacaggtttaagtgtgggacagtctgaaaattgatagcagttagcatttttttttccctcaaaaagaaactgtaggaaatacatgacagagaaagttacactcagggagcagcagcacctcaagactggaaatatgtgttaatctttgcatcatattggattcttgaaatgcaatccttcctctggccaggaacatttttaaaaaataatagttgggtttatttaaatatgtaaactcaagctgccaaagagaaagatattataatcatatctgcatgtcctaaattttgaatttagatattccaatttgcatcagtctttctctggctcaaataatgatgattatggaatgaattttaatgtccttacttgtgaataattactatagctttctcaaatgtacgctttttacaaattttaaattttaaaatattagtttaaatatgtgttatattgataaaatttcatctttcaaattatagtctattattttaaagggatttttccatatgatatgggccattttgtttgtatatctcaaggtaaacatgtaaaatccttacaaagagttgtttcacaaaacttatatttcatgtcaattgtatttattttaataatagctcacaatgcctttg

SEQ ID NO: 6908 - DNA, 489 bp, Macaca Fascicularis
  misc_feature (1)...(489): n = A,T,C or G
gcaggtgtcccaggttccttgaaacagttgcacaccacacagggcacgcccgggggtcgccagccgcacaccaaacccggggcacttctgttgccatctctcccctcttcccctcacgacccaactggagccccaggagcccatagggctggtgttgtgtggaagaaaggtccagatttaatttagtgtaggcaccccgagctccgctcncctcagtatgagggatgggtgggcctcagacannnnnngccttgaaacggtgcaaccagccaagtagaagatgaactgccttccccactccagctctcagctccnnnnnnnnnnnnnnnnnnnnnnnnnnnnnnnnnncctagaaaacgaagaaatgagatcaaaaacagagacaaaacagaccccannnnnnnnnnnnnnnttgctcttttattgacaatgggcaaaaaattaagtagacctgatatggttnnnnnnnnnnnnnnnnnnnnnnnnnnc

SEQ ID NO: 6909 - DNA, 743 bp, Macaca Fascicularis
tgcagatgacgtctaatcgccagaaaagatatcttttgtccactgaccaggctgtgaacattgactgtggctaaagttatttatgtggtgttatatgaaggtactgagtcacaagtcctctagtgctcttgttggtttgaagatgaactgattttttagtttgggtcctactgttgttattaaaaacagaacaaaaacgaaacacacacacacacaaaaaaacagaaacaaaaaaaaaaaccagcattaaaataataagattgtatagtttgtatatttaggagtgtatttttgggaaagaaaatttaaatgaactaaagcagtattgagttgctgctcttcttaaaatcgtttagatttttttcagtttgtacagctccaccttttagaggtcttactgcaataagaagtaatgcctgggggacggtaatcctaataggacgtcccgcacttgtcacagtacagctaacttttcctagttaacatattttgtacaatattaaaaaaatgcacagaatccattgttggggggagggattcagaggtgcatccatggatcttcttgagctgtgacgtgtttttatgtggctgcccaacgtggagcgggcggtgtgatagactgggcgggctaagcagcccagtctatgtgggtaacaggccacgctggtctcagatgcccagtgaagccactaacatgagtgaggggagggctgtggggagctccattaactttatctccatca

SEQ ID NO: 6910 - DNA, 703 bp, Macaca Fascicularis
  misc_feature (1)...(703): n = A,T,C or G
ttaaaggcaacatgatttgttttnnactaagtaaaaatcatacgaatgaaggaaattaggtgaaataaagacatggtacttatttggaaagtaaagacctctgtcaggtttattttgtcattagagtattctgatcatttctgtatatacaaacacgatatttcttggtatgtaaagtattcaaatatgtgttgaatnnnnnnnnnnnnnnnntgcatgccacagacaacagtgttgcaataagctgttgatagtgattctttttaattactctcccatgttttcttaatgaatttatgtatttctcagagttattttgctaaattaaattttattttacaggttggcattgtcaaggaggaacagcttaaggttcatggattctaaaatgaacctaaatacgtggagaatttcttgaatagttttgttctctaaacctggtttggctgccttgtgaaatgattgcctgcagtaaacggacttttcatttatttaatcattcaaacttgcattcacatctgcatgattacagaaaacatggggtatgtaggctagtaacacataagaaaattgcagtaagannnnnnnnnnnnnnnnnnnncgtctttacatgtttccaatggaaaatgtttcgagtgtttattgttcagtttattacgtttcacttgattaaatgttttttgttgtattaaacccatgtacg

SEQ ID NO: 6911 - DNA, 680 bp, Macaca Fascicularis
  misc_feature (1)...(680): n = A,T,C or G
ccaggagcaggtgacggcagaccctgtgagaagccatgtgggtctagggacatatggtgcgttaccgagttaatgggagagggtaggaagaggaggtgagctggtagatgcaggcctgctcccgagagggtaccagggggcaagaggactctatatatttgttaccacctggcctctgggcatccagatctgatgatgggaaacctatttgtgaatgagaagtgagagttcaagttgactgtccttttttttttttttttttaataaaatgaggtctcaccatgtggcccaggctggtctcaaactcctggcctcaagcgatccttacgccttggcatcctaaagtgctggattgcaggcgtgagccaccacaccccactgaggttgaccgtctttgatttgttacactttaagaaccttcgtttgaaaataaaaactggccgggcgcggtggctcaagcctgtaatcccagcactttgggaggccgagatgggcggatcacgaggtcagnnnnnnnnnnnnnnnnnnnnnnnnnnnnnnnnnnnnnnnnnnnnnnnnnnnnnnnnnnnnnnnnnnnnnnnnnnnnnnnnnnnnnnnnnnnnnnnnnnnnnnnnnnnnnnnnnnnnnnnnnnnnnnnnnnnnnnnnnnnnnnnnnnnnnnnnnnnnnnnnnnnnnnnncc

SEQ ID NO: 6912 - DNA, 1307 bp, Macaca Fascicularis
  misc_feature (1)...(1307): n = A,T,C or G
gaagctncnntgatganncttagacagcgaggnnagatgcacatccctggaaggacatctatgtgccgagaagagcagatgatccctatattnnnnnnnnnnnnnnnnnnnnnntatgaacctgccctgctcccacagaacacagcaattcctcaggctaagctgccggttcttaaatccatcctactgagttaatgttgggtagaaagagatacagaggggctgctgaatttcccacataccctccttccaccannnnnnnnnnnnnnnnnnnnnnnnnnnnnnnnnnnnggagatccagggcaaacaggccattgnnnnnnnnngaaacttgaatattttgtcttttgcagagataaagacnntttccacgcaccatcatacacagaaaccaattttcttttttgtagccaatcacttctagcacatggcctggttagaggctagttttttctcttttcctttggtccttcaaaggcttgtagttttgggtagtccttgttctttggaagtacaccgtgctgaccagacagcctccccctgtcccctctatgaccccgccctccacaaacgggaaaaccaggctacttgggagcaccgccnnnnnnnnnnnnnnntgaagacacggttcattcgggcaaagcacagaacagaaaatgaaggtggaacaagcacagatgttcttaaactgtttttttctacactctttttcttttcttctaccatgctgaaggctgaaagacaggaagatggtgcctacagcaaatattattcttaattgaaaaactgaaatgtgtatgtttcttactaatttttaaagatttattccttgccagggcaggcgaggtggctcacgcccgtaatcccagcacttcgggaggctgaggcgggcagatcacccaaggtccagagtttgagaccagcctggtgaaaccctgtctctgctgaaaatgcagaggttggccggatgtggtggcgcattcctgtggtatcagctactcaggaggctgaggtgggataatcgcttgaatccaggaaagaggggttgtagtgagtggagattgcaccactgcactccagcctgagtgacagagcgagaatccatctcaaaaaaaacaaaaaacaaaaaacaaaaaaaaaaactgcttgctaaagaagtggtctcctgaggtcttaagacattcctgacagtgtcttgagtgggagagaggctgctgtcattgcactgtggaattccacaggtgagaaccacacctaaccaaaatcacttttcctgtttgcctcagtgacacagctgcagggaccct

SEQ ID NO: 6913 - DNA, 813 bp, Macaca Fascicularis
  misc_feature (1)...(813): n = A,T,C or G
ggtatatatttcacaaanntccaannnacatatatataatagagatttgttatatagattttcccccacctcagaagttcaggttgctcacccccagcttcataccaaatgccacaacggtttaactgacttcatccctgccccagaggaaagccaagaaacatgttttcataaggaaaacccaagctccttctgaaacatagccccactactttggaaagtaacttaatcagagaaacaacttctttgtttataagtctcagctctccttctcagcttcaagggattcttttgaaatgttaatggagcctggatggcccagagtgcagcccccaaccctgaggtcccagccggaccccagcatccatttgggcccacaggagtgggccatggaaggggtaggacccggcaaccacttagggcagggaaggnnnnnnnnnnnnnnntgagaacgtgctttggagaaaattaggtgtggaaagnnnnnnnnnnnnnnnnnnnnnnnnnnnnnnnnnnnnnnnnnctttaaatatgagccagaagtgtttgtgttggtgttttaaaaacaaaaacaaaaaccgtgttggggtcctgactgggggagggggagagtgaagtgtttgctgaggacgttgctcctctgactcccatctcactttgtccatcgcagccttttgttgggagatgacattgtcagtcagcctatgatgtctgttcacacaagatgcttttttaatagaattgaccaatgttttgctgccactgattaaagtattatttatactaattgttgcttgtagttttgatgtaatt

SEQ ID NO: 6914 - DNA, 735 bp, Macaca Fascicularis
  misc_feature (1)...(735): n = A,T,C or G
tcagtgtcagnccatgcnnnggaggagaggcgctgggaacccacggccacgtgctcggggttgtgcgttgggaagggggggtagtctgtttgaatacaggaaacctccgcatcgtnnncagccccctccagtcaggccctgtgaaggtagaaactgtttccgcctccatttcaccgggccacacannnnnnnnnnnnnnnnnnnnnnnnnnaaaccaccagggaagcactgctctaaataaccacaggccatctgctgcgctcattcaacctcgcccacaagtcctttccaatggtaaaccgaggcccaatgggatgannnnnnnnnnnnnnnnnnnnnnnnntcccagtggagggagtatagggtaggagttagaagacagattttggggagctcacccaaaannnnnnnnnnnnnnncattttggctaagtgacttatcctctttgagcctcggtttcctcatttgtaaaatgagnnnnnnnnnnnnnnnnnnnnnnnnnnnnnnnnnnnnnnnnnnnntaaagcacttagcatagcgcnnnnnnnnngtaagcacccaataatagttgctattgctgctacccttcatagaactcaggtcacctgaccctgacctgtgctactctccacatcctcctgctgcnnnnnnnnnnncttaactattatttaatgagatgaaaccaacaactttaaaacttgtatacaggtatacacaaggcataccggatgctga

SEQ ID NO: 6915 - DNA, 770 bp, Macaca Fascicularis
  misc_feature (1)...(770): n = A,T,C or G
acacatatgagatgtttttatgannntngggctccgtccaggaagcnnnaattcagatggtcctagagggatggactcttatctctcaggtgacactgtgttttggaaacttatttccactcctgcactggattcagtagctgcacctggacctgcacacctgaannnnnnnnnnnnnnnnnnnnnnnnnnnnnnnnnacaataatnnnnnnnnncccagggaaggtgcagagcagggtcctctgcttttgggaacttacagctgtgcagggagggtcaggagtgtgaaccatctccttccactctccctgcctgcttcannnnnnnnnnnnnnnnnnnnnnnnnnnnnnnnnnnnnnntaaaatatgtgatcgttctagcgaaatgtaatacacagatgaaggaatgaggaacctacgtgaaattaaaataaaactaatacatgaaataaatacaaagcactataagatattataatgtaaaagacagcaaacaaatactaaaaacctgtgtgtatatatgtgtgagacagtattcttgtaaattaaatcataatttgcttataacgtctttcaagtaggtacagaatctttgtctttgattcccacaaagatgaagaaggatctggcaccaggactccaaggtcatgctagtgatttcccctcctgtctcctgaggacacattgcttccaattctgaggatcagaatgctgacattgacatgagaagagaaagttggattttctgtgggacagactggtgtgaacata

SEQ ID NO: 6916 - DNA, 749 bp, Macaca Fascicularis
  misc_feature (1)...(749): n = A,T,C or G
tgcataatatttgtacatattntggggtacacataatattttcatgcgtgtgtagaatgtgaaatgatcaagtcaggatatttaggatattcatcacctcaagcatgtgccatttatttgtgttgggtgaatttcaaatccactcttctagctattgtgaaatatacaatacgttgttgtaaccatagccagcctgctgtgctatcgaatattagaatttattccttctatttaactgtatctttgtacccattaagctacctccttttatctcccacacacctttcccagcctctggtaactattattctgctctacctcaataaaatcaactttttttcagttctcacatgtgagtgagaacatgtggtatttgtcctcctttgcctggtctatttcacttaacatatgacctccagttccatccatgttgctgctagttattatgaagtagctctagctagaagaatggagaattaaaagaaatctttgtgaagccactacccaggtttgtccatttgtaacattttaatattattggctatatgtagtatacatagaaaataatagaaatatatgtagatagccctgattttccacagttctgttatgtatgtgtttcagttgatactgaactgagtaaagcaaggactgccagtgagaagtaagcaatgtcttgaatttggtgaatgcctttacaatgttacaaagttttttaaatccgctttgtttgaccctgattttagact

SEQ ID NO: 6917 - DNA, 710 bp, Macaca Fascicularis
  misc_feature (1)...(710): n = A,T,C or G
gggccaccattccacactttgcagnnnnnnacagctcnnntcccacatctgctgcaggcatggctgtctnnnnnnnnnnnnnnnnnnnnnnnnnnnnnnnnnnnnnccagggcccggggtccctgccgcagccccctccccttctgatgccttaaaagctgggccccagnnnnnnnnnnnnnnnnnnnnnnnnnnaaagtnntgggagtnnnnnnnnnnnnnnnnnnnnnnnngcctagggattgggccaccctacttaggatttccaccctggggacagtagaagggcaaagccttcatcttggctaaccagccccaccaccccctcctgcctgggcctcggtnnnnnnnnnnnnnnnnnnnnnnnnnnnnnnnnnnnnnnntgtgggagtcggacgttgtgcccttctccnnnnnnnnnnnnnnnnnnnnnnnnnnnnnnnnnnnattcttgaattctgcctgcccaccccagnnnnnnnnnnnnnnnnnnnnnnnnnnnnnnnnnnnnnnnnnnnnnnnnnnnnnnnnnnnnnnnnnnnnnnnnnnnnnnnnnnnnnnnnnnntgtcgacctgaggtgaccctgggccttgcccccagccaactgggccactagcttccctcccttnnnnnnngggatccacatccactccaagggaactattccccggaccccaccccaatctccccacacggaccttttgaataa

SEQ ID NO: 6918 - DNA, 694 bp, Macaca Fascicularis
  misc_feature (1)...(694): n = A,T,C or G
gccccgccaactcctgtccccatnnngcgggcagatctggccgggatcttggggctctcaggagtcctcctctttggcnnnnnnnnnntccttcacctgctgcgccgacagaagcaccgccctacccctaggctacagccatcccacaccaactcccaggcactgacagcacaagcatgggcgcccagccaggcctcccaggctgctctccacgacccttatgccactatcaacaccnnnnnnnnnnnnnnnnnnnnnnnnnnnnnnnnnnnnnnnnnnnnnnnnnnnctccccacccacgccgcacaccagccccagggccctgccgcctcagcctccacacccatccttgcacgtggcagctttgtctctgttgagaacggactctacactcaggcaggggagaggcctccccacaccggtcccggcctcactcttttccctgactgtcggggtcccagggccgtggaaggacgcttcggagttcgatgagagagaccatgaggccactggactttccccttccctggcctcctgggcgccacccccttactttattcttgggcctccaataagtgtaccnnnnnnnnnnnnnnnnnnnnnnnnnnnnnnnnnnnggtctgtgtgtgtgcatgcgtgggggtgtgtgggcacanggtgtgagtgtgtgcgtgacagaaccccattccagtcg

SEQ ID NO: 6919 - DNA, 1036 bp, Macaca Fascicularis
  misc_feature (1)...(1036): n = A,T,C or G
aggcaaatacaagctggganaanngttttgatgannnnntgaagtttcatggnnnnnnnnnnnnnnnnnnnnnnnnnncacccctgccgattgaaaatggattttaaaattatactatagctgacgaaactcctgattttgtagttaatttattaagtctgggatgtagaacttcaagaagtaagagctaagttcatatttttaaattaattcttcatttggtgctgatctattttgattttggggggtaatcagcattattcttcagaaggggacctgttttcttcaagggaagaaacacttattcccacactacagaataatgtgttaaacgtgctaaatagttctgtcaggaaaacaaatcactgcatttatctccgcaggctatttgttcagagaggccttttgtttaaatataaatgtttgtctagattggctataacatgtctttcagcattaggcttttaagaaacacagggttttgtattcattactaaagatatcagagctcttaaatgttgcttagatgagggtgagtgtcaaatgcaagcaagactgggaccttagaaatcaatggagaaacacagttttgaaagaaaaataccatttctctaagccaactttaattgcttaagagacatttttatttagttgaaaaatctagcttttttttttttgtaaaccnnnnannnnatatgttgtaataaaccttcttatgctagtttattggaagtgttcaagaaataaaaatcaacttgtgtactgataaaatactctagcttgggccagagaagataatgttctttaaggttgtccaggaaaccctggcttgcttgcggagcctannnnnnnnnnnnnnnnnnnnnnnnngccagtgaaggagccacgtgnnnnnnntagttcctgtggccaggaggttggtgactgaaacatttacagagggctctttgatggacccatgaacgctcttagcttcctcaggggatcagcagagttactcaatcttaatttttttctaatgtacaagtttgcaaca

SEQ ID NO: 6920 - DNA, 757 bp, Macaca Fascicularis
aatttatagagacttagaatttcaggctaaggacaaggactaagaaaggaatagcatgagtggtattattgataaacccatcattgcattttaaaggttcttaagtctctagtattgaattaaaaaaataattttcactggacagaaccaaaaggtcattatataaccgtcaagcattttgaaatgattcagtaaaaagcagaataaatcactagcggaatttcaatagcacgtagtagtaaaccatgtgtccagcaaaatcataaaacaagggtttattatagaagggacttagagatattaagaaatataatgtacaaaataattaaagttttctccaagcaaaaccaatgatcctttagggatgaacagaaaggaaataagaaatgtttctttcaaaagttgctaccaaggcttcagagatttcttcagggtaaagttactaagatttgcttctgaggtcaatcttgccaacctttccaccaagatttttaggaaggaataccaagtagggctcaagtattggtttggctcctgtcccatttttcggtccttttgtaactccctttactcaactccaagtacgtctgtgcacggacaatgagaagaaagcatgctcaatgcgaaagcacaaattatgtattgagaaatcactacaatgccaaatttttttagaataaaatatatatataattatatatatatatatatatctttaagaactcgctgtgttagggaaactgtttacatattgagg

SEQ ID NO: 6921 - DNA, 801 bp, Macaca Fascicularis
aacgattatatgattaattttaggaaataccatgttaaaaaaaaaagcggaaatgtttttgttttttaactgcaggacttctcatagcgtttaatatgcaaaggtgaaatacaaagagttcaatataatatacaacttttgtctaactcagctgactacaaaacatttttggttgtaggacatactcttgaaatcatatcagtattatcagttaagatgctattatctgtgagttacagaaaagctaagagttatttacaaaaataaataactctccacctcccagttccagggtggattcagaggcttttcggtatcagggcagtggtttggaatccctgtacttcccttggcctttccttcttccaagatggcggccatctaccccatatcactttctcacagggcagcactctcatcagaaggaaggggaggaggagcgtctccttcacagctcttgaattttattggtggaaaataattcccagaattcgtcactgcagcccttttcttagatctcattggccaatctgtacatcagtcactggcaaggtgaactggaatctcagtgattggctgcagcagttatgattcatttccagcatcaggcacattgtcacctgaacataaacaggatttacttaaactgaaggaaggagaaaatgcactccagagtagttaccaagtggcgtctgccacaaaaggaatccacaggggtccactctgtttgtcagggtgctggtttcctgtcattacttttcattactctaaaaaaaaaaaaaaaaaaaaaaaaaaaaaaaa

SEQ ID NO: 6922 - DNA, 2027 bp, Macaca Fascicularis
  misc_feature (1)...(2027): n = A,T,C or G
gcgctgggagcagaggttggaatcagggctcagggccttcacctcaagggctctccccatcctccatgtgttccttccttgccttccagagctactgagcctaatcactgaagagggagacggagccagtcacatgctgactggcagttcagaaatagtgttctgttcatgtgcactcctcaccccagtccagtgtgaggtcacaaatacaagagctaaaacagcacagctggactgtgaggtggtggctgctctgccttcctcagcgtgcatgtcatcagtggattccctgtggctcttccatgtgttgtctactggcctttggaaaaggtggtggtttagtagggcatgagattatttggaaagcaaagctagaaacaactattatttgtgagattgagatgtgggagagccttataggctatgcccattgtggtggacttgtcttagggtttggaattgttgccctaaaagagctttttggcaaggcttgnnnnnnnnnnnnnnnnnnnnnnnnnnnnnnnnnnnnnnnnnnnnnnnnnnnnnnnnnnnnnnnnnnnnnnnnnnnnnnnnnnnnnnnnnnnnnnnnnnnnnnnnnnnnnnnnnnnnnnnnnnnnnnnnnnnnnnnnnnnnnnnnnnncgtaatcccaaatacttgggaggctgaggcaggagaatcgtttgaactcaagaggcggaggttgcggtgagccgagatcgcgccactacactccagcctgggtaacaagatcaaaaagatcgaaactgtctttaaaaaaaaaaatgtcaaggtgtttccaaggcagatagcctcaaaaagagcctggcgcccagggggtcctttgctcctgtgtggctgcagaggccaggagtgcagtgacagtctcactgcctagtgattgtggcttacatcctgccctgatagagtggagcgcgtcctccaccctctctgaaatactgcagtagactttaccatttcaggccccacctaatgtcctttccttccccctacattcttcccgcccctttcatagttgagatgcataagctgagcaataaccccacttcctgatttccctgaaatatgagcccagaagcagcaggtgacagggagcttcccttaccctggggtggtggcacacagaccacctcctgtcctgtcccctgcaggtagtattcacagtgtggtgttacctgggaggagggaggaaggagctgagatgaaggagattgaggcaaacagtaaccgcagtggccaggacccccttcctggaggatccgtgtccttcctcagcaggtgctcagtcctctcctagggagaagcacagaaagattcctcaaggcctcagccccatgtccaaggcatacctaggttagaaatgtcctttacttgtttctcagtaactatttctcctcttcctctgtccccctgccttctcttggctgtcatttagctctgtggcccacagaaatacttcatccaaggagttggtcctcagtcagcctgatgaggacaggtcagtggccaactcttttgccccagtccttcatctggagacagtcacatagtcacgtcaacagtttacccaaagagaagaggtggacctggcttctcccacagggcacagcgtaactatggagacccagggctccttcctgctgcactaggcctgtactctctttagtagtgtgttcctcacagagcccttttttccttctgcccagttccatcccaccagagtttctacccccgctgaggcatctcctaggcatagaccccccacactctaagccgtctcacctggagagttaggatcctgcccacctggagttggcacgctggtcactcactttgctttggtctgcacacctggtgtgtgcatgtgtatactgcttgtgccatctgtgtacccctctccctggagtacacttgtggcacactacagtggggacatcaagaatgcaatatttatggattgctgcatgattcttaaaaatgaataaaactgtttacaagggaaggagag

SEQ ID NO: 6923 - DNA, 786 bp, Macaca Fascicularis
  misc_feature (1)...(786): n = A,T,C or G
gatgaagaaatgnannncnnnnnncnnaggagcccaannnnnnnnnnnnnacagacatatagacaaatagattatatacttgcatagaaaaaagaaagaggagaaggagatcagtgtgatctgtgtaactaagtgccctgtacaaccctcttggccacagatcatattgccctttatagcggggatggtaatcccatctccaaattccacatgtactttgcaggcagaccacacccatgtgtgggtcctgactctaccatttataaacagcatcactttcagcaattctcagccctccaagctagggtcattgtcaatagggatactgcctcacaagcatcagaacaccaaaggagaccatgtggatgaaagcaaccaacactgccctggcggttcataggtgcttagagtttccagctttcactttcagtctaatgcagcactgcctgctttttgtttttgttgcttcgtttgtttttttcttactgtgttcaccacacttgtgtccaaatagctttgggctgatgcaaaagtatctatgtggaagagagaaagaagagttgttctcatggagggccttcagatgagtgctatagactctaggcaacttccaaagaggcttctcaagcagggtgggcagtgggagctgctatggaatcaatggacaaacattgacagggactgctttgaaagacagnnnnnnnnnnnnnnnactctgttaagggctaaaactttatagtcatcccttaaacactgcctgatggnnnnnnnnnnnnnnnatttgaa

SEQ ID NO: 6924 - DNA, 166 bp, Macaca Fascicularis
gaagagatacataaatgtgtgaatttccaggttttttttaattattttaatcccaaacatcgtcctgaaaataacattcccttaaacatgcagtggaataaaatggattgtgatgaaaaaaaaaaaaaaaaaaaaaaaacacaaaccggcaacccctgaatataac

SEQ ID NO: 6925 - DNA, 712 bp, Macaca Fascicularis
gatagcagatcatctcagcagtaagcacaccgacagaactgagttccacaaaggaagcagtttctggtgctttgcatatgtccaaatccatgcaagtgggagaaagttccaatgcacacttcccatgcttctgagtctaggtgttgtggtgaatatgcaggaatcattcctgagacagaatgtattttgttgtatgacagaaggcttttccaagcaaactgcagtgagtgtagtgttgaatatgttgcatgtctatgttagaaaacagaatccagtcatcagctaatacaaatgatttcccagagcagtgtttgtttcaagcttctgtcaaatagtttggcttttctgcagggtctctgtgatttccccaccaatgtactttctttgttaactcacttattatggtataactcaggaacaggtctcaggatggagagaagcatataacttgagcaaagctttttgttgtgctctgaagggtcttgaggggtgagggtgatgccttctgtgaggatttttatcgcagtgaagctcaagtggtacccaactgcattgtaattaacatgattattggcatgcttttgactctcattttctaccaggctgcagtgggcccacccatgggctggcccataactgtatgttatgtggaagaagtgtgggaatgatgggttttccatgaaatgttgtgatgcttctggagatggggcat

SEQ ID NO: 6926 - DNA, 983 bp, Macaca Fascicularis
  misc_feature (1)...(983): n = A,T,C or G
acggcagagcaggagcatctcaggaatctacgccagctccttggcgctgtctccagacccacaggcgtgctgcggccattnncaaacgggcatttccttgaacttttgagagtgcctttgaccagctgnnnnnnnntgggaaactccaagttttgaagtcggagcttggagcggccccgcaagggcatggctcaaaccctctgcagagatgggagccattgctcgtgcaagcccaaccgattcttttgatataaagatggaagtctttatatcaaatacatcttttaaaataagttaacattttatttcttaccaccagatggataaggctttgaatttaatcatgtaaatgtttataattttatgtgattttgttaaaatgggacgctttcaattggtttccaagaaaaagataatacctctgcattttttggtggaaaacgcatgatacccctaatgagatcaacgtgttacaggaaaaaaattccaaaagtagttacaagctacatcaatgtcaaagtaaatgcacttcaaagctaagannnnnnnnnnnnnnnnnnnnnnnnnnnnnnnnaatttttcctgaattcaggaagtgtcttctgaacagcagctagccaaataaagtggtgtgtgtgtactgcagctgcaggtgaacttaaaaataataataataataaaaagaacaannnnnnnnnnnnnnnnnnnccgctgagccggccgtgtctctgtcctgtgagatggaggggctgtgtctggaagtggaggcgtggacgttgctgcagcctgccgcccgnnnnnnnnnnnnnncggtgcctcctgagtgcgggnnnnnnnnnnnnnnnnnnncctggctgccccatgttgcacctgagcnnnnnnnnnnnnnnnnnnnnnnnnnnnnnnnnnnnnnnnnnnnnnnnnnnnnnnnnnnnnnnnnntcgaggtagaaagaaaaacacctcaaaggcaaaaatgacacg

SEQ ID NO: 6927 - DNA, 623 bp, Macaca Fascicularis
  misc_feature (1)...(623): n = A,T,C or G
agagaccacacagcagctgtccagatgagtgatgctacaggcccaaactggcagtggctgtgaggatgtaggttgtagggggacatctggagtggaaagagtgttcttctcacacagctctgtctacttactgcccctaggacagtgggcgcaacggtagcaagggccgcagggtagaggaatcccttagaggaattcagcagtgactagtgtggtcagcctttcagacaaggcccattgagttatgagccccatcctttggtttgtagaaagagaaggtggcagcctagaacaggtgagacgaggaaggtccttctgctcaaacatactctctccatattttaccagcacgatgctgacctaggttaaaaagctactcctggccannnnnnnnnnnnnnnnnnnnnnnnnnnnnnnnnnnnnnnnnnnnnnnnnnnnnnnnnnnnnnnnnnnnnnnnnnnnnnnnnnnnnnnnnnnnnnnnnnnnnnnnnnnnnnnnnnnnnnnnnnnnnnnnnnnnnnnnnnnnnnnnnnnnnnnnnnnnnnnnnnnnnnnnnnnnnnnnnnnnnnnnnnnnnnnnnnnnnnnnnnnnnnnnnnnnnnnnnnnnnnnnnnnnnnncgtgcc

SEQ ID NO: 6928 - DNA, 578 bp, Macaca Fascicularis
  misc_feature (1)...(578): n = A,T,C or G
gggggggtgggaaagggaggggctgnnaagggatggntnnnggaggggggtgatcccagtctgaggctcccggggatgagataagagtctggagacgggcatgggttcttggagagtggcatgagctggctctgccctgggagcccggtctgagggggatgttgttggagcccccagtgttgggggtggttatgggagggggtggggtgagagagacaagggagaatgaaggagaaaactgagccgtaggttcaccgtgttcatttagaaggacgagccgggtcctcccttcccctcagcccccttccccaggggctgtgcttccatgctcctagcctcccaccttcgctcaggacatgttataacttaggctaaactgtgaaaattccggtggggatggcctggaccgagctctccaggcaggcggccctgcccccagccctgtccatccatttcagtggggagctgggcccttctccagctgtgtctggccgcccagggcaagggctggggccagcaggccttccagctttggcccctgcacctcttctcaatgcactttaataatgtaacatata

SEQ ID NO: 6929 - DNA, 756 bp, Macaca Fascicularis
  misc_feature (1)...(756): n = A,T,C or G
gcacaattttattatgtggttatttgagcacttaatttcactcaaggttcattgggctctgctctcctccctgccattgcgggagctgtggacagagctccctcacttcaagattcctagtgtttttgcacaacaggttgtccaagcgagaaagactgagctgcgtgtctgtaaatgtctgcgcagggtgcacatgctgcaaggtctccatcctgcgggcctttccctcccagatgggctgggcctttgggccctcctcagagtatgcctgggtgcaaacctcactgttcagatgggctgcaagttctcacttcaaagctatggaatggagattttagcacctttaaaaaaaaaaaaactttgacttctaatttatatagtgatatgctgacaggctgacacnnnnnnnnnnnnnnnntcttctctgcgttcagtgttgaggtggctgcttacaagaggcactggttttgtatataaagacactcgggttgttttgtagctctttttcttattggctgtactaacgcttgctgaggttatctgtaataaaggaggtaacaagtggcaaccccctccccaccaaccatcccctttgctgctttctgtgtctttcttgttcagttaccaaaatagctgtaagcctatctaatgctaggtgtgtggacattgtgctagggtagtttcagtgtgtcaactttatgaattgaaatataaaccagtaaaattgtattactgttttcttttgttggttttatt

SEQ ID NO: 6930 - DNA, 658 bp, Macaca Fascicularis
  misc_feature (1)...(658): n = A,T,C or G
gtagcctgggaaggagacaggacattcctgtactgaggtggcacagagctgtcctttgcaacatnnncataaaattgggcacagagttcgcattggcgcaacatttatgggagtgggagggatggggaaaataaacttaactctacaaaagcaaactctaatgcatgcannnnnnnnnnnnnnggcaggtatattcataagtgaaaaatttggaagtgtaatggtagaacataaaacttgtattgcttctgtttcagtgcaaaaatgtactagccaatacgattaagtgtgtggcccacgaattgaacaatttaacctcgaagtccatatccgagatattatgtcgatttttaactgaggggaaattaactagtccagcctaaaatgcttcttttaatctgcattctgttttcnnnnnctagttgtgccattactagtgatcatggttttttttttttcccccctttactgaaaacaataaacatctatttgagacaattaaaatccttctgggggcactggaagcacaatacggtgaccaatcttgctttttttttttttttttaatttgaactatgattttgctagaaatagaaggcnnnnnnnnnnnnnnntagagggaaggaaactgacaacgtgtgaaagttagaggcaaata

SEQ ID NO: 6931 - DNA, 610 bp, Macaca Fascicularis
  misc_feature (1)...(610): n = A,T,C or G
cagcgactggggggagtaccgggcggtgacgccgctggggccnnnngctgcagagtactggaacagccagaaggacatcctggagaggacccgggcggaactggacacggtgtgcagacacaactaccagtcagagctccgcacgaccttgcagcggcgagtggagcccacagtgaccatctccccatccaggacagaggccctcnnnnnnnnnnnnnnnnnnnnnnnnnnnnnnnnngattnnnnnnnnnnnnnnnnnnnnnnnnnnnnntttcggaatgaccaggaggagacnnnnnnnnnngtgtccacccccctcattannnnnnnnnnnnnnnnnnnnnnnnnnnnnnnnnnnnnnnnnnnnnnnncccagcgtggagacgtctacacctgccacggagagcaccccatccccgtgtccaccatgaccctcttccccaggctgacctgtgttccctccccatttatctttcctgttccagggaggtggggctgggatatctctatctctgtctcaacttcatggtgcactgagctgtatcttcttccttccctattacaattagaacctgagtataaatttactttttcaaattattatcatgag

SEQ ID NO: 6932 - DNA, 729 bp, Macaca Fascicularis
tttgtaatttattgaatacagtatagtatagagtacagtattggttgattgcctttgtgatcacattgccaactgcagcttgctgccattgtgtatccagcatcatgagagagtatgcatattgctagcctgtctcatctaggctcatggatttgagatcttatgctccaaatgtagcccacatttttctgattgcaagaaatcccttgtgactgcctcaccactctgggccagtttccttgcaagtttctgtttgccctggtttcacagttgcatggcaagcaatcatgagtgagccgctaggaaagggccagtgctgggatgcacagtactgcaggctttccacctccaatcccacctcttctgcaacttctcgacggatggtctcttccacactttcacctatatcacaaaaacctgccaaggcagaatacattcccttgggaaaggagctttggcgggcaagcaggcatcgggtcccatctgacaccagtgtgattaccacaggagccatctgtggataatagatgatattattggaagggcacacacgcttgctgccagccacgttcttcttggtgggctgcccacttctgctgcagaactgatgagcatcatgccagcggagaagagcttgagccgtggacagcatggaggcatcccttgcattgagttgaaagagagcctttctcagctcaatgaaagaccccttgagctctgtctccattt

SEQ ID NO: 6933 - DNA, 718 bp, Macaca Fascicularis
  misc_feature (1)...(718): n = A,T,C or G
agnttcataggaggtaatcaccggacaactgcagaatgtagaacactgagcaggacgactggcctgtctccttcacacagtccatgtcaccacgaatctcacaacaaaaaggagaagagatattttgggttcaaagaaagtaaaaagggactgtagctacatttctttattttgaaccccaaatatttcctcatctttttgttgttgtcattgattgtggtgacatggnnnnnnnnnnnnnnnnnnngtcagctgtctggctcaatgatctacattctgaagttgtctgaaaatgtcttcatgattcaattcagcctaaatgttttgccaggaacactgcagagtcaatactgtgactttccaacctcagcctgtctannnnnnnnnnnnnnnnnnnnnnnnnnnnnnnnnnnattatcatgatatcaggactggttacttggttaaggaggggtctaggagatctgttgcttttagagacaccttacttataatgaagtatttggggaagtggtttttaaaagtataaacgtcatgtattccaatcatcatcctctaaacacttcatcgtttattaatcatccctgcctgtgtctattattatatccatatctctacactggaaattttctgtctcaatttttactctgcctctgttttggctagtgtctgctgtgaaaaaaaaaccattctctgcctgagttttaatttttgtcca

SEQ ID NO: 6934 - DNA, 2994 bp, Macaca Fascicularis
ggccgccggggccgcagcatggcgggcatcgcggccaagctggtgaaggaccgggaggcggccgaggggctgggctcccacgagagggccatcaagtacctcaaccaggactatgaggcgctgcggaacgagtgcctggaggccgggacgctcttccaggacccctccttcccagccatcccctcggccctgggcttcaaggagttggggccctactccagcaaaacccggggcatcgagtggaagcgacccacggagatctgcgctgacccccaatttatcattggaggagccacccgcacagacatctgccaaggagccctgggtgactgctggctgctggcagccattgcctccctcaccttgaatgaagaaatcctggctcgagttgtccctctaaaccagagcttccaggaaaactatgcagggatctttcacttccagttctggcaatacggcgagtgggtggaggtggtggtggacgacaggctgcccaccaaggacggagagctgctctttgtgcattcagccgaggggagcgagttctggagtgccctgctggagaaagcgtacgccaagatcaacggatgctatgaagcactctcagggggtgccaccactgagggcttcgaagacttcactggaggcattgctgagtggtatgagttgaagaagccccctcccaacctgttcaagatcatccagaaagctctgcaaaaaggctctctccttggctgctccattgacatcaccagcgccgcggactcggaggccatcacgtatcagaagctggtgaaggggcacgcgtactcggtcaccggagccgaggaggttgaaagtagcggaagcctacagaaactgatccgcatccgaaatccctggggagaagtggagtggacggggcggtggaatgacaactgcccaagctggaacactatagacccagaggagagagaaaggctgaccagacggcatgaagatggagaattctggatgtctttcagtgacttcctgaggcactattcccgcctggagatctgcaacctgaccccagacaccctcaccagcgatacctacaagaagtggaaactcaccaaaatggatgggaactggaggcggggctccactgcgggaggctgcaggaactacccaaacacattctggatgaaccctcagtacctgatcaagctggaggaggaggatgaggatgaagaggacggggagagtggctgcactttcctcgtggggctcattcagaagcaccggcggcggcagaggaagatgggcgaggacatgcacaccatcgggtttggcatctacgaggttccagaggagttaagtgggcagaccaacatccacctcagcaaaaacttcttcctgacgaatcgcgccagggagcgctcagacaccttcatcaacctccgggaggtgctcaaccgcttcaagctgccaccaggagagtacattctcgtgccttccacttttgaacccaacaaggatggggatttctgcatccgggtcttttctgaaaagaaagctgattaccaagctgtcgatgatgaaatcgaggccaatcttgaagagttcgacatcagcgaggatgacattgatgatggattcaggagactgtttgcccagttggcaggggaggatgcagagatctctgcctttgagctgcagaccatcctgagaagggttctagcaaagcgccaagatatcaagtcagatggcttcagcattgagacgtgcaaaattatggttgacatgctagattcagacgggagtggcaagctggggctgaaggagttctacattctctggacgaagattcaaaaataccaaaaaatttaccgggaaatcgacgttgacaggtctggtaccatgaattcctatgaaatgcggaaagcgttagaagaagcaggtttcaagatgccctgtcaactccaccaagtcatcgttgctcggtttgcagatgaccagctcatcatcgattttgataattttgttcggtgtttggttcggctagaaacgctattcaagatatttaagcagctggatcccgagaatactggaacaatagagctcgaccttatctcttggctctgtttctcagtactttgaagttgtaactaatctgcctgaagacttctcatgatggaatatcagccaaggactaagcttccatagaaaaacactttgtatctggacctcgaaattataggaacatttacttagacggatgatcatagctgaaaataatgatactgtcaatttgagatagcagcagtttcacacatcaaagtaaaagatttgcatatcattatactaaatgcaaatgagtcccttaacccttgacaagctcaaagaaagctttaaatctgtaaatagtacacactttttacttttacacactttcctgttcatagcaatattaaatcaggaaaaaaatgcagggaggtatttaacagctgagcaaaaacattgagtcactctcagaggacatgaggccttgcagggaatatttaaagcaacttcaagtttaaaatgcaactgttgattctaccaaataagtccaagataaccattgcccgtgagcaaactgggaaacatagtatatcatgaagtaatcttgtcaaggcatctagagagtccaggtgagaagactcacctctgtcgcttgggttaaataaaagacaggttttatataatattgattggtaatagtaaatcgttctccttaaacccaagttcttgaccctattcggccttatacatcaggtcttacaaagaccaaagggattccacgcttgatcaactgaaccagtatgccaaaccaggcatccaatttgcaaaccaattatgataaaggacaaaataagctgtttgccacctcaaaacttcatgaacttcaccaccactagtgtctgcccatggagttagaggggacatcgcttagaagttcttatagaaaggacacaagtttgtttcctggct

SEQ ID NO: 6935 - DNA, 754 bp, Macaca Fascicularis
  misc_feature (1)...(754): n = A,T,C or G
cagagactagagagaggtttcattcacaatgtgcatttccaatttggtctttaattcaagagaagcttcataaaacacgtagagccttaaaccattcaagggctaatttaaaaaatacagagttataaagtcttaaccacaaaaaataaatcaggtaaacattttaacctgttgttaagtgttgtaacttcaaaaaacnnnnnnnnnnnnnnnnatttttctaaaactattgaaaaattaatatttctacaatctattaaagaaaaaagtggaaaatgttttctctcaaatttcttcttacccataggaatgaaaatagttaaatactgtaaagcatatctattaataattcccccagttttttaaactaacaaaatagaatgttaactgaatggaattaaacatagcaattgtcaagccatcaaaatcatatattgaactacttaggcatgttacggggtaaagtcctcacccctgcatttgagaaatattttttttatttttattttaaggcaaaacagtatttactgtgatgggcagaacagccttttgtatctaagagtccattttagttctttccatatttccatatcgttttgtgaatgtttctggggacttccttatttggaaaatatggatatcattttgttttcattcaaaagtaattatatcttaagaacatagtatcatgaatggagtggacagggaggctggagaagccatttttctttgtagataaaaagcattctttatg

SEQ ID NO: 6936 - DNA, 735 bp, Macaca Fascicularis
  misc_feature (1)...(735): n = A,T,C or G
gcaagccaagtgccctnnntgaacctcgatttnnncatctgcaaaatgggaacaatgacgtacctannncttagccatgttgtgagaagactatgatataacgcgtatgtaaatcttcatggtgattgnnnnnnnnnnnnnaacacagtggatggggagctctgactaaaggttacctgttgtcatgatctgaccacatcccagtgagagnnnnnnnnnnnnnnnnnngcacggggtagcccccaatcccaaccctgcatccccatcccttaggggtgatggaagaatcattttccccaccctagttccaagtcccaggaaccaccttttaaccacttccttctcatctcccactgtttcccacttctgattccacccaacaccagttcctcctgtcttggtaggaactaggctggccgtgagtcatatagcaccttctctgccttcatggggccgctggaactcaagggacctcaccttgcttccatcctaacctctaagaccagaggactgagggggtagtgaagattggggaactcttgccacctcaactgccaagtttgtgccaagaaacctccctctgacatttaggggaaaaatctttggtgtgtctgttattaattggctgtgagattttcgtcctgaaaacttgggaggaggaattttttgactctccctgaaattgggggaggggaggggagttaatacacagagtccaggaaaagctaatagaaa

SEQ ID NO: 6937 - DNA, 748 bp, Macaca Fascicularis
  misc_feature (1)...(748): n = A,T,C or G
tagagattcaactgcccaattctaacaaacattnnnnnnnnnngaacttggcatttccttgctaactgccagatgnnnnnnnnnnnnnnnnnnntgcaaaccactgaaaaatgatttnnnnnnnnnnnnnnnnnnnnnnnnnnnnnnnnnnnnnnnnnnnnnnnnnnnnnnnnnnnnnnnnnnnnnnnnnnnnnnnnnnnnnnnnnnnnnnnnnnnnnnnnnnnnnnnnnnnnnnnnnnnnnnnnnnctccctcagaggcannnnnnnnnnnngttccacgtgagtttgaggggacggtggggggaatgatatgaatgtcacaggaggagacaccttctgtctttgtttcaaagaaagtgatgtgccatttgttaatatacaagagaaatattgaaaatatattgaaaagagcaattttaaattatttttggcttatgttgcaatatttattttcttgtattagaaaagattcctttgtagagaaaaaatgtatttttcattaacgcaannnnnnnnnnntcnnnnnnnnnnnnnnnnnnnnnnnnnaacccttaacgagcaatagaatgtatggtcacctgnnnnnnnnnnnnnnnngctgtgccctgcnnnnnnnnnnnnnnnnnnnnnnnnnnnnnncccagccccatcctgtcctgctcactcatgggggcttccagaccccagccccaccagggcttgtgtcatagggagccctttgcactcctcgtgtgtnnnaaacgcagt

SEQ ID NO: 6938 - DNA, 704 bp, Macaca Fascicularis
  misc_feature (1)...(704): n = A,T,C or G
gattagtttgaatttgaaccaaaactcaaaagaatatgacctaatttaacaggttaatnnnnnnnnnnnnngccaagtagaagaccagcaagaaaaaaaaaatgggttcctaggaagaggtagtaggttgcatagttttagggcagggattttgcccacaaggaggtaactatacgacctgctgcctttcttagggccttattattcaacggtaacctgtttccttgctactttgctttggtgtaagcagagttctttctgtaggttttctcaaatgaaaacattacaagaataccaaagagcagtgtttgcattagggatttataaactgcagcatggtgctgacattgataactgaaagtcagctaatgagaattnnnnnnnnnnnnnntatacttagttgctggtgtctctcccttttggggtnnnnnnnnnnnnnnnaaagcatggttttgtttttgctcaggtttctcttgtctcgatgtctacattatgtctaaaggaaagaatttaacaaaacttgaaatactgctgtttttctacactgtaaatatttatcttgccatgtttctaggtttgtcttctggatttaaaatttggggctgttgggatggaattgcatggtgtgggaatgggtagttgnnnnnnnnnnnnnnntggtatgtaacagtgatttgtctgtttaatatgtataagaactggaa

SEQ ID NO: 6939 - DNA, 756 bp, Macaca Fascicularis
  misc_feature (1)...(756): n = A,T,C or G
cccaggctgcagtgcagtggcgtgatcttagctcactgcaacctccacccgccgggttcaagcaattctgcctcagcctcccaagtagctgggactacaggtgcctgtnnnnnnnnnnnnnnnnnnnnnnnnnnnnnnnnnnnnnnnnnnnnnnnnnnnnnnnnnnnnnnnnnnnnnnnnnnnnnnnnnnnnnnnnnnnnnnnnnnnnnnnnnnnnnnnnnnnnnnnnnnnnnnnnnnnnnnnncatgcccagccccaaatttcatgttgaaatgtaatgtccagtgttgggggcaggacctggcaggaagtgtctgggtcatgggggtggatccctcatggcttggtgctgtcctagcaatcatgaatgagagctctcgtgagatccgggtgtttgaaaagtgtgtggcatctccccttctttcccccaacccccaccccctgaccatgtgagatgcctgctcccacccctcccaccttctgccaagagtgaaaactcccagaggcttccccagaagccaagcagccatgtctcgtgtacagcctgcaaaccaagagccaattaaacctcttctctttataaattacccaatctgaggtattccttagagcaacccaagaatggcctaagacaccactataccacccatgtgccttccccttggccctggtggtcattcttcgggattgtcacacctcctgagctcttctcacaagctttgtttcatctgccttcactgctatttgtgtcatcca

SEQ ID NO: 6940 - DNA, 766 bp, Macaca Fascicularis
  misc_feature (1)...(766): n = A,T,C or G
ctgactgatgacatgagacaagagcatcaatggtcacnnttcacatacaaattaggcaagacagggtcagtgcttacattttgtggttatacatgatacatcttttttcagtgaagataaaactatgatttgaaaggtgtcttatattttaaaaagattttaaaatcttttttaaaaaatcttttttaaaaaaactgatcaaaggaactatttctacccgcctatgctctttttaaatgtcaagtttcaaaacccatttttcatacactagggtgagtttgaaatttacctgattacaggaattgcnnnnnnnnnnnnnnnttcccactttcacctctagagatttagattcagaaacactggggtaagccctggagagcagtactcttaataagctcctcagtgcttcttaccattaggcaaattagggaaacggcattgggtcaaagtgctgcctttatcgaccattagagggagttctttaaataacgaagttattgctctaattcaaaatgcgttaaagaattttccaaggaatacaannnnnnnnnnnnnnnnnnnnnnnntgttttcattagaatgtacatttaacattttagttttatcaaaattttttgaaattaagaattagaaccagaactcctatcagtatatatgtacgccggtgtgcatgccagggttaaaaacagattgtgtaaaagttcaagcccattttagaaagccaacattttatattataatgtgctgttaatnnggactttatgaa

SEQ ID NO: 6941 - DNA, 145 bp, Macaca Fascicularis
gataaggcacaggcaagggctgccctgaaggaagctccaaagagaaaggagggcaggaagcccacagccctcaggggtgtagcctgaggcccacctgcagcccccagcccttgccaggaaagcagcagccgcagccatggcgggg

SEQ ID NO: 6942 - DNA, 655 bp, Macaca Fascicularis
agcaggcagagaggcaggaaaacctgtgttcaccctgtcctgggcagcatgagcagcgtgttgtgtggggtccagcatccttcacagctagaccctcatcctcaaggtctgcctcttgatgctctgagctcaatgaccccacccccacaccccaccagggctctccgggctaagtgagggcaagaagatgtcgaatttgaatcacataacagaggaacttggagccatcagtttctgtaccctaaaaagtttaacaaggctgggcatggtggctcacgcctgtaatcacaacactttgggaagccaaggtgggtcaattgcttgagctcaggagtttgagaccagcccgggcagcatggcgaaaccctgtctttacaaaaaaaaaaaaccacaaaagttagccaggtgtggtcccagctacttgggaggttgaggtgggaggatcacttgagtccagatggtagaggttgcagtgagccaagattgtgcctgtgcattccaacctgggcgacagagcaaaaaaaaaaaatgaaaaagtttaatgtaagctgaacacattaattttttaatagctgtattaaggtatgattaacataccataaattgcacatatttaaagtatacaacttgataagctttgatatgtatatatacc

SEQ ID NO: 6943 - DNA, 775 bp, Macaca Fascicularis
  misc_feature (1)...(775): n = A,T,C or G
agatgcagaaagntagggcagtatgttaagtccagactgggcacatggctagggacactgctctctagctgtgggggtnctcaggagtggagagaannnnnnnnnnnnnnnnnnnnnnnnnnnnnnnnnnnnnnaagaccctgttatttgtgttatttcctgccctcctgannnnnnnnnnnnnnnnccctgtaccttgaacctcatgagcctctaagggaaannnnnnnnnnnnnnnnnnnnnnnnnnnnnnnnnnnngggcagagtannnnnnnnnnnnnnnnnnnnnnnnnnnnnnnnnnnccttaccctgggccaaacagggagggctgatatctccttgctcttcttagatgtccaccccctacaatctcaacccacaagtcctttccaccctagggggctnnnnnnnnnnnnnnaccccataatctgatttggnnnnnnnnnnnnnnnnnnnnnnnnnnnnnnnnnnnnnnnnnnnnnnnnntgaagaggaactccctctatttttacagnnnnnnnnnnnnnnnnnnnnnnnnnnnncagagccacattgagnnnnnnnnnnnnnnnnnnnnaagtagagttaaagtccccagtttcctgagggaggctcctgacaggtgccctttgtcagacccaatcacagcctggacaggcagccacattggtcctcgcccttgcttggcactccttggtggtcctgcccttctccctgcatgcctgtgggtctgctctggtgtgtgaaggtcggtgggnnnnntgtgtgcctgc

SEQ ID NO: 6944 - DNA, 680 bp, Macaca Fascicularis
  misc_feature (1)...(680): n = A,T,C or G
gctttgttagtaaagttctctctcnnnnnagagctgcaagttttaaagtgttacttatacagaccaacaaagaatagtgctgaattaagtggcatttagtatctagaagccattttgatccaagaagcaacttgtgaaagtcagcatacagcacatgtagcttttctgtaaacaagggtgtgatatgaaagatgcttttttaagaagagtaaaagcacattccatgtacgtaagtgaattttaaaattaaattgaggcaaacagttacgttttatttttagagcaacaagttaactgtacatattttaatgttagtttgctcatctatgatatgagatcatgccgaagtgagaaaaatgtccccaaaatacaatttaatgcactgggaaaaaaaaatttttaatagtaattccagccacaatctttagatcacccctgtaatgtgttatgnnnnnnnnnnnnnnnnaatagtttaatatgaagcagtttcccctgttttggagattttgtagttaattttaattttggctattgtttggaaaagatgagctgtctgtgtagatatgaagtatagtttttccataaaacagatgtttattttgtattaaaaataccactgtacttgttttacaccatttgtatacatgtggtgatattaatgctaaactgtaaaatcagaa

SEQ ID NO: 6945 - DNA, 734 bp, Macaca Fascicularis
  misc_feature (1)...(734): n = A,T,C or G
gggtcatattgctttatttcctcaaacacacgtgcttatatgcacacacacacatttccatggannnnngacttgcttttgtccccaggcactagtaatttgagcccccctccaaagacatgaagggggttggggtctgtgtgagtagtggggggtgcgtgtgtatccgcatgtgtccttacacttttaagttgtgtgggaagtggattctttgttggtttctggttcagagtgctttcccactaccannnnnnnnnnnnnnnnnnnnnnnntccattgcaggaatacaggagaactaggtcccttggggctctggatgctgagtaacccagaggtaatgtgggtatccttttggaannnnnnnnnnnnnnnnnnnnnnnnnnnnnnncccctcactgccttatgggaatagtagaggtttttttttcctccagagcccctggcctttcagttcttnnnnnnnnnnnnnnnnnnnnnnnnnnnnnnnnnnnnnnnnnnnnnnnnnnnnnnnnnnnnnnnnnnnnnnnnnnnnattggacattnnnnnnnnnnngcacagaagaggctcatatcacctcttccctctgcgacttggcccagctgcttggaggaccgaccccannnnnnnnnnnnnnnnngcaagaggaatagagtttgctccaagtgggaaaggtcccaagcagtccagagaagatgtctgtgtggctttccctccctacctcccccagctccca

SEQ ID NO: 6946 - DNA, 763 bp, Macaca Fascicularis
  misc_feature (1)...(763): n = A,T,C or G
ttatgtgagagaaccgtcattataccagtgttgtccagcattgctagtaggaaatggcagagccacgagttagacctaggtttaatcctatccatattccatgttacaaattgacacgattttccatattaaaaattttccatttattttgtacctcgttctcatgaatagtaatgtgacaaactaatacatgaagcattgcaatatggaattttgcataattttgttagctttatgttatttgctgataccaacttttggtaggaaggaaaacagggaaggtgatggctgcccttctggaatgtgtccattgaaaagaaaataggcgttttgtctcctgcaatcttagagaaagttttacatacttaagtggggaccacaggtaggtgtgtaccttaaattcaaatctacaaatttacaaaatgttttcctttgtgtgcctttcctnnnnnnnnnnnnnnnnnnnnnnnnggagatgtaacaatgtcataaatttaacaggtaatgatacagagattggccattacgcgnnnnnnnnnnnnacaactagggtgtcttgaaacccgtgcatttaattttagaaatggcaaatttgtaagtgcgtcatgtaagtaagttgatcctaagttttagggtctaagttgacctcgagtgagccatgcaaaaatagctttaaaattatacatgaggagctcaaagtatacttgtgtattttttagtaacaatgaaattgtcaaattccaagattttaataacaggacag

SEQ ID NO: 6947 - DNA, 404 bp, Macaca Fascicularis
ctgaatagcagctagacctggacctgctgttcattcattcattcattctttctttctttcactcactcattccttcattcactcattcattcattcagtagctatgaagcaactgctccctgccagacaccacactagttattgagggggcagcggatacagctccagcatcgtactgtcgtctgagagtcgagtcatcatgatggcgggacgccatcgtgatcttcatcatcccggggcacacccctggggacagaggtgttgtatactgttgccagtagatgttttccccagacccaggttcccacaggttcgtggtttgggcaaagcgtgcaattggcgagtttcagccatcattgggattccacctaggatacatgagaggggacagtcaaagggccttc

SEQ ID NO: 6948 - DNA, 1762 bp, Macaca Fascicularis
aagacattgtgcaagtccagagattttctgactgaaaaccagaaagatttcatggagtcaatcaggtttgagccatggttgggcaaagggaagaggagggcaggtgtagaaataggaggggctgagggcaccttgaaagggagtgtggactctgtcctcactggccttgaatgggagaactggagtctccttgccacctgtcacctgcagagaccctattcatggagctgatttcaggaagcaggacacagtcccacctgacaacctagcctggtgtgtggagcttgccctgtgcgtaggaattctatttccatgtccccatccaacagcaggcgaaattctaatggaatttgctttctaaaggggcagagcttacttcctgactgtagtaagggtagagtcactgaatctggaagaccacttagtctaattttacaccctctgcagtgaaggaggcgagcccagagactttgaggggcttgtccacagtaggacaggagcaacaaggccactgccttactgtggctttctgatcctttatgttgcttcatgagaccattaggcaattcatgttgccctcatcaaacacacactcttcacccaaccattgaatcagtacagtcacgagtcttccaagccagctgggaaacacccacatgatccattctgtgcccaaagcaaattggagcagagggcagaaattccctccaactgctttgggaagcttctgtaaggggcttggagctcagcccgtgggactgtagtcagaactttgtaagacactgaagtcatgtacagctctgttcttagttttctgctaggttctacttctctttctaatttttgcagcctctaattcacatagtattgagtatcatttttaaggccagggcctgtctgatccacagaatgtggtcaataaactggaaaggcaaacaaactctgttgacgttcgggaaagcaataagtgatgttagtttggttccagaagaaacacgggagcaaagtgtgctggccaaatagaaacaatcaaaacagagggaagtaagattttctttcaaggtcatgataaggccagacaaatagagtgcaatgatggggtcaggtgcgaggccgtcctcccaggtcagtaaggccgcatagaaggaaaaaaagatccctgcactgccccccactgccaattcaccctgtgtctcttgcacagttaaaaccaggaggtggctttctcttttcttctactggtggtaaattaagtgactgtcctactttgtagacatgcaaccattttgtgtctctagatcttgggcaatcactggtgatgacactacttgagctaacacagaaactgctgtcacctgatgtgcttggtttcattcctgcctgccttctctacaatgtgacttcatttcatgaatgtggttgccatcatgacaatgctaggatgctgatctgtataccgtgagtgactgcgaactttcagaccctcactgcaattcatggggagactttggtgtatcctatttccagagttatcctcttctgtgatcctcagaagcagagaaaaaaatgcatgtggcataaatcaataggaaagaaatgtttaccactggaagatggtgagtgcatgagtcaaataatctagaggcactgccctaatgagaaaaaaacaatgattctggaaaacaaatctttaaaaccaataaacgtctttacacagaaaaaaaaaaaaaaaaaaaaaaaaaaaaaaaaaaaaaaggccaca

SEQ ID NO: 6949 - DNA, 1528 bp, Macaca Fascicularis
atactaaaattggaacgatacagagaagattagcatggcccctgcgcaaggatgacacgcaaattcgtgaagcgttccatatttttccaacaagagaagtgatcatatctgtctttattcacaaatgcgatctcttttccatagcaaggatttcaacagatgtgttgtgtgagtgaaagatgtcaacataacatcatgagcactgggactgacgtgctggggggccagagaagtcaagcatccagagcaccattagcagttgcaggagatttccagaagggcattgcagaggctgccagtgccctgccatagccccttagcacttgtcacatacatgccagcacatgttgcaagactgccaatctcccctctctgcctgagaaagcacacttggccagcacacaagaaaggccaaaaagacccaggagtggatgcccagaggagcagctctcaaccaaagagggaatgtcaatactggggctcagagctccagctacccactttggattttgaagatgttttaagatatgacgaacatgcatacaagtggctttccaccctcaagaaagtaggcatagtacgactcaccggagcatctgacaaaccaggagaagtttcaaaacttgggaaaagaatcggtttcctctatctcacattttatggacatacttggcaagtgcaagacaaaatcgatgcaaacaatgtggcttacacaactgggaagctaagctttcacactgattatccagccctccatcatccacctggggttcagcttcttcactgcataaagcaaacagtcacagggggtgattcagaaattgtagatgggtttaatgtgtgccaaaagctaaaacaaaataatcctcaggcatttcagattttatcctctaccttcgtggactttacagacattggagtggattactgtgatttttctgtacaatcaaaacacagaattatagagttagatgataaaggccaagtggttcgcatcaacttcaataatgcaactagggacacagtatttgatgtgcctgttgaaagagttcaacctttttatgctgctctgaaggagtttattgacctcatgaacagcaaagaatccaagtttaccttcaagatgtatccaggtgacgtgattacttttgataactggcgcttacttcatggccgacgtagctatgaagcaggaactgagatatcccgccatctagaaggagcttatgctgactgggatgtggtcctgtcaaggcttcgtatcttaaggcagagggtcgagaatggaaactgaagtctcccgtagataattttaggaagattccaatgagtatattttgtaagatatgacacattattcacagaccatgattttgtcatttacatataatttccttaacaatgaacatgtaacttctctcacaagagtactctttactttgtaatcatatacaatgtcaactttttagatgtttcaccactcttttgcaaataaagcatcttttctgctcaaaaaaaaaaaaaaaaa

SEQ ID NO: 6950 - DNA, 730 bp, Macaca Fascicularis
  misc_feature (1)...(730): n = A,T,C or G
ttcataattatatactgggccagagcatgttcttatttttatttctttttgcttaattnnnnnnnnnnnnnnnnnacataatttactctttttttaagtnnnnnnnnnnnnnnnnnnnnnnnnnnnnnnnnnncattgcacattttaattttgagcctaattcatattttgctatggaaacttctctctgtaaaatggaaaactagctctaaggcaggcttctctcctatttatttcaagcttcccggggccacttttctcacttgccagatctgggatttcctattaggagtatctcgagaaagatggtagaaggcctgacttgatcccaagagtttctctttttgactcttctagaaatagcctttctcacctattatccttccctcccgtttttttttttcaaactttcttcaagtactatactctttaaaagcagtttaaatttcannnnnnnnnnnnnnnnnnnnnnnnnnnnnnnntcattccagtagcactttaggaaggattttctaggaaggaggttttttgttctgttttaaacgtagtaagacctaacttcagagcacttcagagctctnnnnnnnnnnnnnnnnnnnnnnnnnnnnnnnnnnnnnnnnnntgaatgaggtgttccttagcattatctacagatatggctttaccttcagttgtgtcaggttacatttacctaatgtcagcaagacttcacatttcatgtatgaatatc

SEQ ID NO: 6951 - DNA, 704 bp, Macaca Fascicularis
  misc_feature (1)...(704): n = A,T,C or G
tataatgtacatgataagatttttatatctcaattcaaatcaaataaaaaagaaccaagagcaacaacatttccatcttagaaacataaagaagaccttaccatgtannnnnnnnnnnnnnnntcagatgannnnnnnnnnnnnnnnnnnnnnnnnnnnnctaggaaacacagagtaactgtcagcatgttggttccacagaaggaatcccttaggcagccttgggtgctggggacagggggatggcgtgtgtaaaggaggtgggttaagggcagaannnnnnnnnnnnnnnggacaccctccttggtgatgaggnnnnnnnnnnnnnnnnntcagtaaagccacagaagtcagggcctggttctctggctcagccacctcacnnnnnnnnnnnnnnnnnnnnnnncacagggcagtgttcacacagggcagtgttcacacagggcggtgttcacacagggcggtgttcacacagggcggtgttcacacagggcggtgttcacacagggcggtgttcacacagggcggtgttcacacagggcagtgttcacacagggcagcacacnnnnnnnnnnnnnnnnnnnnnnnngtgtcccatcacccccttgtgcattttgaggcccggtaaatttccttttgttgttgaaatgttataatgtcatttatctttcctggatctacatatgcaccacctgtacttatcc

SEQ ID NO: 6952 - DNA, 787 bp, Macaca Fascicularis
  misc_feature (1)...(787): n = A,T,C or G
agcacagagtnnnnnnnnnnnnnnnnnnnnnnnnngcagcctggcagncnngcagcccgtccagttctcccagcagctgcacagccctcaccagcagcccctcatgcagcagagcccaggcagccacatggcccagcagccctttatgnnnnnnnnnnnnnnnnnnnnnnnnnnnnnnnnnnnctcacacaagcaggaacccccccagtattcccacacctcccggtnnnnnnnnnnnnnnnnnnnnnnnnnnnnnnnnnnnnnnnnnnnnnnnnnnnnnatgtcttcaagnnnnnnnnnnnctnnnnnnnnnnnnnnnnnnnnnnnnnnnnnnnnnnnnnnnnnnnnnnnnnnnnnnnnnnnnnnncacaccatcagcctnnnnnnnnnnnnnnnnnnnnnnnnnnnnnacctgacaagcacctgcgagaggtccctgcttacccgacggacgtcctgctggcacctcaggcaatccactctcaggaggcgcatcctgaaacccagcttcccttctatgcagtattgccacgatgcctctcccacgatgtcacggactcctgtctgtnnnnnnnnnnnnnnnnnnnnnnnnnncgaagaggaagcaagaaagccgtactgtctacgttgtgatccttcatcgaacaaactgatgcgaaaacttgaatctgttactgaaacgaggagaggaggacnnnnnnnnnnnnnnnnnnnnnaacacactgtaaatatctgcagactccctcccccgccccatcccaaatgatcttgagatttctttaaagaa

SEQ ID NO: 6953 - DNA, 140 bp, Macaca Fascicularis
ccaactctgttcctgaagtttccagaaacagatgcagaggtaagtccaggtagggtggagcaccagcatcagtagtaggggcaggagcttgtgataaacctggttggtgtgtcttagagaaacaggaagcacaggtgtca

SEQ ID NO: 6954 - DNA, 755 bp, Macaca Fascicularis
  misc_feature (1)...(755): n = A,T,C or G
ttttgttaggtgtggtctcagcattacaggcatttgtgcctgcttgggggtatatgcacgaaaaagaaatggacaaatgtgactttgaaaggcctactgagtcaaacctcaccttgaaaacctttnnnnnnnnnnnnnnnnnnnnnnnnnnnnnnnnnnnnnnnnnnncaagaatcagtaaataagggagtttcacatttttcattgtttccatgaaatgggaacaaacatacatttataaatggaaaaaaaaaatgttttctttccaacaaataatgcacagaaaaatgcagcctataatttgctagttagaaaggaggtcaaagaagnnnnnnnnnnnnnnnnnnnntaagtaatatttcataatcttagaattctctcaaagcatgtgaaataggaagaaggaagttcttgcccagaatcttaggaaatcaccactgtttggttataatcactgcctcctgaatcgttgaggagacttttctcctttttttaattagattttttttttgttgtctcccaagttaatattatatttagatatcagagagtcagccaaaaaggaaaacttttatctctggggaaaaaaacatttagaaaagtgtattcagtgtatctaatactgaaatgcagaaaaaatctaatgttaaaaaaaaaaaaaaaactatagacattgacatggaagagatttaatgttttgaaaaaaaactttatattaaccgagtaacatcctcnnnnncngaagtactatataa

SEQ ID NO: 6955 - DNA, 365 bp, Macaca Fascicularis
cccttccccttccccttccccttccccttccccttccccttccctagccagggctcaggtacctcactctcctgccttgtgcacagctccccgggcccaggtcagtctccaccaaccttggcacacagtgtccggagcctctgctctgctgcaaaagcagaagcctgtgaaccttctggccagtactggaaaggggaatgctatttatttttatattgtgtatattttgtcgtggtctgctgattccctgtttcactgagagcgacacttacctcaatagttagttcaatattgtgtgttggataatttttttaaaagaactttttaaaaagctttttgatccttggaggtctgtagatttattt

SEQ ID NO: 6956 - DNA, 724 bp, Macaca Fascicularis
  misc_feature (1)...(724): n = A,T,C or G
ttgtaaatcagaggttatctgtctgcattttaaactgccaaattaccttacaataagtttctattttatgactttgggccaagaattaagtattttcctaagcaaaaatctttttctgtattctcattttattatcttatgctattattctataaacattttaattttagtttcatgggcctttattttttattacctgcaagttcttcattgaatttcagacttgagagacatttgtcttcatgaaacagatttgcattggaaccattgctttgctctagttggaaataccattgttttggggacagactttcaaaatgcccttgtgtctccccctgaggagccctaagcattgacttctccaccctaaaactgagagggagagcgggccctggctttctcaagcatgggttgggggctcagcggggcctctgtcttttgtggtgacccctcaggggtttcattgttttcttctgaatgaagcaaaagataatttgctttggcactctttggaggaattgtgctttggctcataacttggccatgttctccatgaattagttctcctttttttttnnnnnnnnnnnnnnnnnnnnnnnnnnnnnnnnnnnnnnnnnnnnnnnnnnnnnnntaggctttaggagctctgtaaggctggtatttttgtctgttttatcttctgtnnnnnnnnnnnnnnnnnnagtatctgnnncacataataggt

SEQ ID NO: 6957 - DNA, 712 bp, Macaca Fascicularis
acttggtaatgttttggatctttgtaaaaatgatatttctgtataacagagtacctctctgttacttttggcctatgttgttagaaataagatgatatgttgcgtagttagaattaagcgtttgtccatctctagatacatcgaaaagtttgagtgttacaggctctcaagtgctacagagaaaaattgcttaggaggaggaaggggaaagtatacttacactggtgtgtaagcacgcatggaagccttgtggcaccgcaacaaggccctgttcttagcacatctctgttctctacctgtcatgcttcaagagttccagctggcctgctgtgaagccaatagctattttaaaagtgctggctgcaggattaagccaacccttgtacaactggccaagtccttaatggccatttcttcttaaaaaaaaaaaaattgtttttgttttttttttggtgtgtgtgtgtgtggtgggggaagggtgtgggtgttgggatggggtgaatttgaagttgaaacaagatgatgtggtctacttgctctctgcttagacagactttaagaccagttggattttcatggaggccaggacagagagaggtaattgatggcttgtgtagagacaagcatttatccaggttgcgttatccaaactgatttgttaaagctccaggtcacattcttacactaagaaaatcattcagtaaacatgaga

SEQ ID NO: 6958 - DNA, 760 bp, Macaca Fascicularis
  misc_feature (1)...(760): n = A,T,C or G
cnnnnnnnnnnnnnnnagggtctccccgacggagctggtctccgcaactatttcctatactcaaacatctaaattgtttgtnnnnttacttgagttgcaaaggaagtaaggaagggtgagacagaaatgattgagcatattaagagggaggagtttgctgatgtgggagtgtagttatgacactggggcatcatattataggccatgggctcagcaattagcaaacatccactgagtcctatgtgtgtttcacgtatgtgttttgcctctgaaagttgaaactgttttctaagtgtatttcccttttaactgatataaaatttctaaaaagcaaagaagaaacttctctagtaaaaataacaaacattagtaaatgtatatatacagtcttgtgttgcttaatgatggggatacattctgagaaatgtgtcgggtgatttcatcgtaacaacatcatagagtacgctgacacaaacgtagatggtagagcctattacacacctaggctatatggtacagcctgttgctcatcactgtgtagcacatcactgtactgaatactgtacacagtttaacactgtggtatttgtatatctgaacagagaaaagtacagtaaaaatataggatcataattttatgggaccactgtcatatatgcagttagtcactgatcaaaacatcacgtagcacatgacttgtgtgtatggatatctcaattgtaaacaatttcacaaatgttcacnnntctctttttaagta

SEQ ID NO: 6959 - DNA, 746 bp, Macaca Fascicularis
  misc_feature (1)...(746): n = A,T,C or G
ttaccccttataaaagggaatatactctggttgtaaaaaattttagcaattcagtacacagtacaagtcacataaaagtctaccaccgaaatgcaagcactgttgatattttgacattcatatatttagttttaccacttttttaaaccagtgttaagtcatggacaacttaccatatacatgaaaaatgtatatataatcattttatgttcatttttatactataatcaattctccattgatatttagcttgtgaccttttttttactactttttactatgataaaaaatgctgtagtaaacactgttgtgtcacatacattgtcattctgtccagttttctctatagaaaccaatttttagaatttcttggttaaagtatatacatgcatttcacatgctttttgcttactagtttttatattagacaacttttgattaaacatttaggttaaatgattaaaagtatggcataataataatttatggcttatttgattttaaaagtaggtcttaaaacaggcaatatactatgacaagcaaaatatttccttgtcattatttcctaagtatccttaagagagagagtatctctctcaggacttggaccaaggaatgagatgaaaggggaataatgattagctgcttaattcagctgatctcaaatgcctagggggaaattttttttaaaaaagtccnnncatataccctatttaacatgtgataacacatattctatgttcagt

SEQ ID NO: 6960 - DNA, 3020 bp, Macaca Fascicularis
gcatcgagcattagggctgactgtccacgtttcggggctcgtcagccttgtcacccgcccttggttttccttttccttttgcctttggctcctttgaccactcgaagccgcgcagcgggttccagcggacctcacaacagccccagaagtggtgcgccaagcacaccctctgctcctcctcgagccggtcgggaactgctgcctgccgccatcatgtctgctgcaaatcctgaaactccaaactcaaccatctccagagaagccagcacccagtcctcatcagctgcagccagccaaggctatgttttaccagaaggcaaaatcatgccaaacactgtttttgttggaggaattgatgttaggatggatgagactgagattagaagcttctttgctagatatggttcagtgaaagaagtgaagataatcactgatcgaactggtgtgtccaaaggctatggatttgtttcattttttaatgacgtggatgtgcagaagatagtagaatcacagataaatttccatggtaaaaagctgaagctgggccctgcaatcaggaaacaaaatttatgtgcttatcatgtgcagccacgtcctttggtttttaatcatcctcctccaccacagtttcagaatgtctggactaatccaaacactgaaacttacatgcagcccccaaccacaatgaatcctataactcagtatgttcaggcatatcctacttacccaaattcacccgttcaggtcatcactggatatcagttgcctgtatataattatcagatgccgccacagtggcctgttggggagcaaaggagctatgttgtacctccggcttattcagctgttaactaccactgtaatgaagttgatccaggagctgaagttgtgccaaatgaatgctcagttcatgaagctactccaccctctggaaatggcccacaaaagaaatctgtggaccgaagcatacaaacggtggtatcttgtctgtttaatccagagaacagactgagaaacactgttgttactcaagatgactacttcaaggataaaagagtgcatcactttagaagaattcgggcaatgcttaaatctgtttgatcctcctggctatgttgtttcatgggaagttgctggttttgaatattaagctaaaagttttccactattatagaaattctgaattttggtaaatcatactcaaactttctgtataagttgtattattagactctctagttttatcttaaattgaaactgttcttcattagatgtttatttagaaactggttctgtgttgaatatatagttgaaagtaaaaaattattgagactgaaagaaactttaagatttatctgcaaggatttttaaaaaattagcattttaagtatttaaaagcaaatactgattttcaaaaaaaagtttttaaaaccctatattgaaaggtcagaattttgatagtctgaatacaagcatttcacttctccaacaagtacctgtgagcagtacagtatttacaatattgagctttgcatttatgatttgtctagaaatttaccacaaaagcagaatttttaaaactgcatttttaatcagtgggaactcaatatatagttagctttattgaagtctttttatctgtacccggttaaacagattcaaagcaaacggtccaatcagtgggtcatatgtttattcaaaatattttatcttttatctagaatccacatatataaatcctatttgatgggggtagtaattaggataactaaaattctaggcctaattttttaaagaatccaagacaaactaaactttactaggtacataagcttttcaatgagccaccattcatcttttttgtaaaaacttttttctttgaaatgctgaacttggctgtttgtcaaattgtgcaaaatattggtattaaagaatgctgcaacttttttatgtcacttagaggttaatcagagtatctgaaaggaattgtttttataaaaacattggaatattagttacttgctataaatagatttagtctgttatacttccttttgtaaagtaaaatatgtccagaagagtcaaagtaggtagttttggtatttctaaaccacaaaagttgtttaataagtacatctcaagaatgtgctagagttaaaagttaacgtcgtttctagattaggtggtgtcttcattttacgttgtgacaaacagctagagcaccagagcccttttgctctacccggtctttcttttccagcatttgtcacttgtctttcagaaggtttgcttctagaactggtgatgtaaggaatggaagtagctgtatgagcagagcagttcaagggccaaaccctggaacggtagcaatgggatataatacctttctaaggtaaaatagttgtatcagtatcatttgatctgccaccggacatgagtttaaagcggctttctggcccttgtttcagtggcttcttccctaaaacgtagagactctaacttaatgtgtagttactatgagccatattattagtacccactggggtctataattcctcaaaattttcattctgaatctgaagaaaagagtcttttaactttagaattcccaagagggctttattacacctcagaaattgaaagctccctgaatttgtccatttaaaaattaactgtagtttttttggtgctataacattgacacgtatcattctgtgattaaatctccagcttactataagtgatacctatattctaaagagctaattctaattattccaatatgaccttaagggaaagtaagggaataaatttttgtgtgtgttagagtgaagcatttaaaagagtaagggtaaaagagatgaagtcctgaatctttcaaaatgggaaattaactttaaacttagaaatatgcttttacctattgctgatactgtttttgcatacatgaataaaaataaacttttttttttcaaaaaaaaaaaaaaaaaaaaaaaaaaaaaaaaaaaaaaaaaaaaaaa

SEQ ID NO: 6961 - DNA, 124 bp, Macaca Fascicularis
tggttctgaagatactagaaatgacacagaaggctttaagtatccattgggaagtgaagttaaccacagtcaggaaacaagcatagaaatagaagaaagtgaacttgatactcagtatttgcag

SEQ ID NO: 6962 - DNA, 724 bp, Macaca Fascicularis
  misc_feature (1)...(724): n = A,T,C or G
gcctcccaaagtcctgggattacaggcatgagccaccatgcccagctgaatttgagctttttaataatctcattccacatagccttatagatcctgtaaataggggggtcacaaaagtaatatattgtgttatggaagataattttgtactgtgctgtttcctaaatcaaaacaatatcctaaagtcatgcacttcccagannnnnnnnnnnnnnnnnnnnnnnnnnnagatggggtagggcgtggaaatacatatatatacacacagacacacacacacataagtatagtatatattttcctaacctttcttctgggtccttcctcagatctttgagtcgcgatagaaaaggaacttgagttctttgtgtaggaaagttaagcttcccgcctgcggtgttcttgcaattgccttacgaattcacaagctctaggagttctgaacggaaggcagacaagaggcactttatccaatcccagaaagaatctctacccgtgggactgagaattcatctagaaaaccttatatttttaatgtaaaaaaaaaatggggcttaccagacctcacagagtattggacgtctacaagtgcttttatattttgtaactgtaaagaggtttcatatgcacagaagagcagttggaaatctggtcaactgcaataaaacaagatgacctttgcatgtacaaagnnngttgcattcagaagaatgaaaatagcaaa

SEQ ID NO: 6963 - DNA, 2094 bp, Macaca Fascicularis
tttcacttaattttagtccaggttcacatttttttcccagaaggtgagattcttcttcaccaagatgtcacagtttgggcaaagttcaaagttgcttaaatttcttcaaggggctccgtgagcagttgtactccagccggactgtcactccaaactggactctccagctggtcatgggaggctttccaagaatcttgatgtcccagagtccctctgatacagcatctgaaaggccttttgtgaatgtttggaatgctgttatctgagagagatcttaatatgaaagcaaatacctgaagcacaataaaaccttgtaaagcatcaagaaaagaaatgatctcaggaaaacctaaaagtaactcatgatccagggacttttaaaactggagatacacagtgaggtaaaaatgtcaggtaaaaaatgtcatttacagcatgcaaatgactgaagccaaaaaacaaagaaagaagagaagaagaatcaattaactgtgagagtctgcatccttccccagggccagtgttaatttccatcactgtctttaagcacatcgttttgaaagagtgtgctcgggttcatccatcttatttcttctgttagcctcagaaaggaagaaagtaattttcctgcattgtcagcttctttacaaatgtctgggccttttctaaacagaacccccattgaatagaggaaaacaaccattctcacacagaatgccctccttaacactaaacgcttattcagtcatttagcacctctcttcctgcgcctgttttcccttctgaacatgacctgaaagaagatgttggaacccccacctgcatggcagtgggtggcattgccctgccccattcatctgcctgttcgtccgtttctctttctctgtgagcagcctgggtgctctacggatatgccggtgccaatctgtctccccaaggttattcagcatctaaagttgctattgaagctccagatttctaaacttgcagcagactggctgtgaacaggccagaatatttgttttctcttaaaataagcacttgattgttgcgttgtgtggggccggtctttggtggtcactgcatgtaatcaacatacatagactgtaggaaaatgcgatttaatgaaatattctgccactttttcttctttggcatgcgttaagcagcacgtgcagtgccttgcaaatgcaagtaattcagagtttacaaggaaaggaaggacagtgaggaaccacagaggacagggatgtgaggtggtgggacagggcttcaggctgatttacctttcacacagtagtttggccagtgggaccgcggagagggaggaggctgtggctgcctgctcttcccagtggggagggggctttgcagtcctctcagcagagctgatgtttactaaaaggtctttcctaaagagcccaccgaatagaaaacatctacttcccataggctcccgagaagcttcctgcagtcagcgagcatgttctgcataaaagctcatctgaactccgcaataatttgtctagcaattcataggaatcaatcatctcatattcagtccccatctaatgaatggctgcttaaacacacaattctatctttttttttttcattgcattaggttagaaactttgcagctggtaaattaaaataggaggcagtctttggtaaaaaaaaaaaaaaaaaaaaaaagtggcatattttaagtgacttggaatgcacctgttacgagtgccctactgttatgtgatcagcagtctaatgtggttggccaggcctggtggctcatgcctgtaatcccaacactatgagagcctgagacaggcagatcacaaggttgggagttcaagaccagcctggccaacatggtgaaaccccgtctctactaaaaatacaaaatagtggggcgtgggtgtgcacgcttgtaatcccagctgtaatcccagctactcaggaggctaaggcaggagaattgcttgaacccaggaggtggaggttgccgtgagctgagattgtgccactgcaccccagcctgggtgacagagcaagactctgtctcgagactctgtctcggaaaaaaaaaaaaaaaaa

SEQ ID NO: 6964 - DNA, 3168 bp, Macaca Fascicularis
aacatattacattattctatgaattggtttacacttaaaatgtacatcctatatgtctttccttgtctgtacatattgatcatgctcaatgtatttaacagtttcataataatctattgtacagatgtgctatcatcatttaaccagtcccccatagatgatcatgtcatttgtatattttgctattataaacaataccagaatgaacatctttgcctaactctatgtctgttcactgttcacatatgagactgtcttttgcaagaagatggatttccagaaatagaattactaggtcaaaaaaacataggccttttcctgtatcagaatttctgaaaattttagcagcagtgagagaatgtgattcaggaaccagctgcttatattcttttgtggcctcgtttcctactcacagcctcaccagcattggcaactgcctgcacatttgtcattccaacatctccaagttgatatgtagaaaaaggtaactggggtatgaattgtgtgagttctggtgaactcttggccaacaagttgctatgcaccctcgtgcaataaacgatgccacagttgacttccatttcttttcctgtaaaataagacttttctagatctggcactaaatgtttcttaactctaaagacaaggattacatcttgctcctctgacttcttagattttgaaaaatgtatgcatactgtaaagggttatcttgcctcattgaaggttccaatggtatggtgataagaccatattaaaagcatttataaaaggttcatggtaaagagttcattatggttcattaaatcccttcatgcttttatccacttcagttactgtatttcctgtaaatgggatttacgccagggccaggttaacaccatttcacattctgctgtgctattacccactgagcttgaatcaattgaatgaaagaggccttttcaagtgtattgattttcatttatccaaactcatctgtttgctttgccgcatgctcatacatgagaacagggcacagctaatcttctccatggtgttgctttttcccctaagcatttaatactagaatagacatatgacaggcatcagtataaaaattgcagaatattcactagaactacagttttttatgggtgatataagagcctggatcttgttctcatgtcagaaagaatgtagcctaaagcaagacactatagcctttcttcctgcatgaaagcagtcacctcctactcttccagctcccagagagctcagtccaaggatgctgtcctcctccccacaggtagaggagtgttgcctatacagtggttcttctaagtgcaaatttgtgcttactgtcagggagctaagttttccactgctgctttctacagaaatactctttatttctttgaccaggtatcaaactgaaaatctgaacaaaaggaagtatccaatagggcaaataatacttttaatgtacattgtaatgctcttgttctacattcctagcttaacgtgtatgatcatgtgtgtgtgtgtagaaattagaaagatacactatttattttaatccatgttagaattttggagatgaaaagcgttttaacaatgtttactgaattgttgtgctagtcactggataatatgtggctatgtggtggaggattaaatgatatgttctaggcttctagtaaatagatcttgacttctgctcaggtaaatactgaaatatatttacctgggggataaatactaactaaggcaaagcaaaggtcagtatttcctttgagctgcaataaatatttctatacacttaaataagattttatgttatagctaatgattaaacattatccaaagccacaccagaaaatattattatcaagtgaattctaaggcatctttctttcatgcacaatgctacaaaggataatcacttttggcttaattcagatctgatggtagatattggcctaagtgttggctaagcctgagtccttattgttaaatagaagatgaaaagattcatttatggaaagctcaatatacataaatataatacacattaaacattattgacttaaataaaatgaacaattaatcttaaccaaagtctgaatatgatcctatttagtgaatgagctaattatttttcctcctacacatttatgtcatgtgctgtgttatgtaattttggagaaataattcatagaaaggatttttttgaaaaatatttctttcaaaaaagaactatatcatagtaagtataaaacatttgagtatcacttagctagggagtaagcaatatagaaatgtatcttcaagaagatgacaatctaactgaggagaagagcagaaacatgcaaatacagaattgtgtagctgttaaaaacatgagattttgtagtcccagctacctgggactacaggggaggtgggaagaccgtgattgcgctactgcactgcagacttggtgacagagagagaccctgtctcaagagagaaagaaaaaaaagaacatgagatttggaattttaatgagtataaattctagctctggtactatgacttctgacaatgttttctgagccttgatttccgaatgtgtacaaaggggataatacaattgatttcataggataacagtaagaacgaaaggtctgggaagccctgaaaaggtacctaccaaaaagagaacactccataagtggtagctgttttaaagatgtattgctatagtgacagatgaaggtaacttttatgggggtaactcaaggatgtacatgatgattgcatttggaataaaacactacttttagcttaattccagagacaagagctcttacaattgtatttcatggttcatcaacacttcaaaaaagaggtgggatttgaactagaggctgactgaggaatagggttttattagttgtaaaagaggagtgatgagccttacaactgccaataaaagaggagtcatctcttcagcctgggcttgagcacatcctccttctaaatgttctctcctaggttaacaccaacattggctccaggttttaaaagtatttttaaaattatttcttctgggtctcctttgtttcttcctgttttgttttagtccccccaaatgaaaaaccactttcaataaaaaatagaccttaaaaaaaaaaaaaaaaaaaa

SEQ ID NO: 6965 - DNA, 634 bp, Macaca Fascicularis
  misc_feature (1)...(634): n = A,T,C or G
gagttttcatgaaatgtacaattaannnnnnnnnnnnnnnntaggtgagnnnagccaaattaggaagtatttgctattctagaacttgtgtaggcacaattaaaaaagaaaaaagaaaaatcattaatgttcttgaaaagcttccagtgttttcagtcctacagtgccactcaaaaaattaccatcaatcttagttttgtccctgtgaagccgtctatttattccctgggggcgctctcttctttctatgccttccttttgtttcctggaaatccttcccagacaaacccctctctagtctgttacactggggtcttgcctctcagtgtttatacctgtgtggtcgtgtcccctggaatctggattggccaaccactttaagccccggaagtgttactgtgccagttctgtccctaaaccctaaaaaggcctgtcagcttctgcttttgtgcatctgggagccctaaaccattatgtaaaaagtccggctgtcctgttggaaagacacgtggagaggccccataacaagggggaggccctgagatcctggatataccagcatccctcctaacccagtggctaaatgtagtggcctctgacaagaccagcagggctgctacccaggtgaacccag

SEQ ID NO: 6966 - DNA, 749 bp, Macaca Fascicularis
  misc_feature (1)...(749): n = A,T,C or G
aaggnnnnnnnnnnnnnnnnnnnnnnnnnnnnnnnnnacttnnngcagagccccccggaggaggagcccgaataccaccccgacgcctcggcccaagaatcannngctgtttcaaatagagaactgtgcgatgatgagaaagagttcatacattttccagtatgtgaggggacctctcaacctgaaccctcgtgttcagctgtcagaataacagccaataaaaactacaggagcaaaacctctcaggaaggtgctttaaaaaagatgcatgaggaagaacaccatcaacaaatgtccatcttacaactgcaactgatacaaatgaatgaggtgcatgtggccataatccagcagatagagcgagagtgtgagatggcagaggaggaacacaggataaaaatggaagttctcaataaaaagaagatgtattgggaaagaaaactacaaacttttaccaaggaatggcctgtttcctcatttaaccggccctttcccaattcgccctaagactttgggggtggctctcttgtaattaatctgtgttggcaaagaatgtttggaacatggacttgcggtcagtaacctgtaacagagctacaactaggaaaattagagtggtagtagtcacttatttaagaattcattcaggtaaacagctgcaccctctgtaccccttaagtggcaaagaagctgttatagtcttctgaaaattatcactatgagtgctataattctgnnatgtaatgtct

SEQ ID NO: 6967 - DNA, 723 bp, Macaca Fascicularis
  misc_feature (1)...(723): n = A,T,C or G
acagatccacaatnnctnatctaaattcctagnnnnaaaannnnntgaaaacaaagttttttcattactcnnnnnnnnnnnnnnctccacctgaattatatgaggctatttgtggtatttatccgactttaatgtgaatatgaatatattttgccatagatatatcaatatatttgattataaactgcttcctcagaccctctgaatgttttacataatgtaaagtatatgcccatatttcctttcaaaannnnnnnnnnnnnnnnnnnnnnaacacatctgtcccaaaaggtttcagaaaagggactatggacctgtatttccattctcttaagttcagaaagtgatattatgatccaaatttaatatacataatttccaaaacaaaaattttcaggtccttagttttctaaattattttaatatttannnnnnnnnnnnnnnnnnnnnnnnnnnnnnnnnnnnnnnnnatactttgaaatgcttgattttatcataccactaggtggcatctttgtaaagtaaaagcacatcaaaagaaatgtttatcacataaataaatgctgagatgaataaaggtagatgtgacatgagaaatacaaagtcatttggtggaataaatcctgagaacatgcatagatttatcatgaaaaggaaaatggaaaatggtattgtaaaattactgtttcactttgggaattgagaagcttttttctattggtt

SEQ ID NO: 6968 - DNA, 2134 bp, Macaca Fascicularis
ttttactatttttatcatcactatgaatagactggcctccattcatgctctcctgatggatctgtgttgtcaaccatgaagacaaaagagttttgttttagctcgcctatcttatttcacaagagattgataatttcccactgaagctcttacagtttgtgtctcattcatatgaaggcctttctctccaccctacccatgtgtaggcaaaaaacaagtcaagtggttctgcctccaaactatatcccacaggtatttgcctcaccacagccatcactcaaaccaagttcccaaaatcacttacctcggctattgctgcatcttctccacaggttctaccactcagctaatgcactctccattcagcagccagaaagcctttttgttttactttttcttggagatttttttttgtcaatgcttgttggcatttccaaagtatttgcctctccagtgcgcaatctgggatgtataaggtgaaaagaagactcaggaaactcattgctgcattgttcctcagaagctgaagtccctagcagcctgtcttcagctctccagctttcagaatatacttgtattcgctttatatataatgtcgagagttttaagctgaacctagcaggagggctaggaaaaagtatatcttttggtctagatctgaaagtcctgaatgtcatttaaaaatataggggggcggagcaagatggccgaataggaacagctccagtctccaactcccagcgcgagtgacacaaaagaccggtgatttctgcattttcaactgaggtcctgggttcatctcactggggagtgccggaccatcggtgctggtcagctgccgcagcccgaccagcgagagctgaagcagggcgaggcactgcctcacctgggaagcgcaagggggaagggaatcccttttcctagccaggggaactgagacacacaacacctggaaaatcgggtaactcccaccccaatactgcgctttatgcaaacaggcacaccaggagatcatatcccacacctggccgggagggtcccacacccacggagcctccctcattgctagcacagcagtctgtgatctaccggcaaggcagcagcgaggcttggggaggggcgcccgccattgctgaggcttaagtaggtaaacaaagctgctgggaagctcgaactgggtggagctcacagcagctcaaggaaacctgcctgtctctgtagactccacctctggggacagggcacagtaaacaataacaaacgtagcagaaacctctgcagatgcaaatgactctgtctgacagctttgaagagagcagtggatctcccaacacggaggttgagatctgagaagggacagactccctgctcaagtgggtccctgacccctgagtagcctaactgagagacatcccccactaggggcagtctgacaccccacacctcacagggtggagtacacccctgagaggaagcttccaaagcaagaatcagacaggtacactcgctgttcagaaatattctatcttctgcagcctctgctgctgatacccagacaaacagggtctagagtggacctcaagcaatctccaacagacccacagctgagggtcctgactgttagaaggaaaactatcaacaggaaggacacctacaccaaaaccccatcagtacatcatcatcaaagacgagaggcagataaaaccacaaagatggggaaaaagcagggcagaaaagctggaaattcaaaaaataagagcgcatctcccccggcaaaggagcgcagctcatcgccagcaccgggtcaaagctggacggagaatgactttgacgagatgagagaagaaggcttcagtccatcaaatttctcagagctaaaggaggaattacgtacccagcgcaaagaaactaaaaatcttgaaaaaaaagtggaagaattgatggctagagtaattaatgcagagaaggtcctaaacgaaatgaaagagatgaaaaccatgacacgagaaatacgtgacaaatgcacaagcttcagtaaccgactcgatcaactggaagaaagagtatcagcgattgaggatcaaatgaatgaaatgaagcgagaagagaaaccaaaagaaaaaaaaaaagaaaa

SEQ ID NO: 6969 - DNA, 154 bp, Macaca Fascicularis
atagtatgagtaggatatctccacagagtaaatgatgtgttgtctgtcttcatttggtatcagctggaccttccattctagaattatgagaccagccttggagaaaggtgtgtggtacatgacgctgggttacatcataacgtgcttccagatc

SEQ ID NO: 6970 - DNA, 726 bp, Macaca Fascicularis
  misc_feature (1)...(726): n = A,T,C or G
agaggaaagcttctttatagatgtcctcctttgtttggtatcctctgtcgccctcccagtcagtcatgtgcttgctctctcacactggagttgcttgtgccattcagtaccagtgttctcccaatagaaatgagtcaagccagtgctgtcagtttgcttcccctccttttttcctcttgttgatagcactgtcatacttttgttattgtttgtactgaaataatttgagtatatttataatgattaataaataacgcattgatggaatcaagtatttaaatgtaaaaagttttagtgattttaaaaattcaggataaaaatctctggttctaaatgattgaatcagaaggttattatatagggcaactttctggaactcattgttttgctatcnnnnnnnnnnnnnnnnnnnnattgattttcattcctttaaccactgctgttactagtttgctgctattggcagtagggtttggaaagaacatttcgtttgtcctactgaccataaaatagagtatctttcttctgcagaccttttggaagcacaaggtatgatttaggtgcgatatgatttaggcaggagattcagggataagctaaagagttgtttggttattcctgtaactgagttatctctaaacagaaaaatgtgagtttgannnnnnnnnnnnnnnnnnnnncttcatttatttgtttaacaaggaatgagcatttgttgagtgtaac

SEQ ID NO: 6971 - DNA, 1586 bp, Macaca Fascicularis
attattttctctctagtggggattttccctagaatttcacacataggttttcatactgagtctcaatatagccccaggaggtagaaagcccaggaataacctaagacaattatttccctggatgatgaagcaggaaaacctcagagataccaggctggaatttcctctgggacagaagttattcttatcaagccccttccacaagaaatgagcactgtctttataggtgacatttaatgtagtgttcactataactaggttctgatctaagtgcactgcatacatcagctcactgaactcagtccttggatataggtactattaccaacaccctcattttgcagatgatcacatcaaggcacagagagtttgcactgcctgcttgcccaaggtaaaattgtcagaaacagaaaaaaggggagaaaaggtgaacaactgaagtggccgtgccaagacaaaatcaaatactataaagatccggtggcccagggccaatacagagaagactcgggctgcaaggactgcgtccacttggagaagaccccaggaatctgaatgaggggaggacgggccctcacatatccgctttacagattaagaaagtgagactcaggtcaaggaactctcatccaaggccctactggcagcaaaggcaagaactgggactgaacccgggctcaatccacccacggacccagactcctcctcccctatcatggaagcagggtctgtcctcagaaggccctgaggcaatgcctctctcaccaactctcactgtgggttccaaaaaacaacagttgtcttagacacaaacatacccttgtagaaatgagtccccaagccccagagagcccctcctctgaagcagagaaaccaaggcaggacattcttgactaaccctaagttgaaggtgctggaagggcttgggccagtgctcagggccctgactcaaacccatcaggagcttcaccccatgaagcgtcctgagggcactgggtcactgagcctgcgagagtggacctaagaaactgtttactggggagcaggagaccaaaaaaagaagaacggagtagggggtagggagaggagtctgtcataaaaagtaagtaaaatcagcagaattccttcatgtaaagggtggaattagcatatgggctcagctgccaagtgaggccattgaagcaagcaatgtaaatgagttcaagacacaattagacatttttctggatggagacagaggtactgaagaaggcatggcaggtcacatttcagaaggagcagcaggaacacactgcactgtgaagcagcctgcagagcccaccatgtcctgcaagccccaagcaagcaaccagagggacaggatacaatggcccaagaggggccggggcagcagggccccccagtggaggcaacaggcaggccaggctagcgggctctccttccccactattaatttctcaagatgcctcatgctgtacctgcaagccagctaccctctgtgcaccacccaaccctctgtgtaccaccatatctgggcacagaaataaaagtttgcttctgttccattctgaaaaaaaaaaaaaaaa

SEQ ID NO: 6972 - DNA, 728 bp, Macaca Fascicularis
  misc_feature (1)...(728): n = A,T,C or G
agcaagacacagaganttccatacaagcatcccccatgttgccctctcataatcattgccacctctctccctggcccttcctccttaatccctgacaaccaccaactgttctccatctcagtcattttgttattttgagaatgttatataaattgaatcaatatataacctcttaagactggctttttttcactcagcataatcaccttgagatccatccaaggttttggatgtaccactagtttgttcctttttattgttgagcatgtagtgcaggtatatcacttagttttagcagctaagctatctatttaaagataccatcttaaaactaaatgtttctttacacaaattcatacaactttcatataagcattaaaccatacagctgcatctacataagtataattagcaatannnnnnnnnnnnncacttcctgcctccgtccacagtgttgacnnnnnnnnnnnnnnnnnccgagagtcaactgttctcatcacggtggccactgagggcagtgaaatcactttgatagcaccagtacccagatgtttgaaacttaaagtatttctttaatttttcataaacccattatttaaaaaaaatcccaacttggaacttaactgtatctggatgttcatatttttattagttgttgaagttgtacatttaaaaagacatttcttgcaaattttgtaaatttctatatgcttttaaaatagaaacat

SEQ ID NO: 6973 - DNA, 761 bp, Macaca Fascicularis
  misc_feature (1)...(761): n = A,T,C or G
gtcattagtacagcatntnntatgcacgtcgttgacgtcagtgannctgaaacaaaatccttacccaatctcagatgactcactgcattgaaatgttaggtagctgtttacagccacacaggtgtacctcgtggctttagggagaaattttgtaacttgannnnnnnnnnnnnnnnnnnnnnnnnnnnnnncattgttctcaggatatttgttgtatataaacatggtgcttggctctatacagacttccatgcaagaactttagaaaaagacacatgtctggtgtgaaaatnnnnnnnnnnnnnnnnnnnaggtaatcataggagtccaaagatttctcttaaagaactctaattgttgatatttaaaaacaactgcgagatttttctgatgtttgtggcagaatcctggaatttctatttggaaacaaatagtcatgggtttagaccagaaaatatgtagtttattgtttggatggacacaattcatacacannnnnnnnnnnnnnnnnnnnnnnnnnnnnnnnnnnncactaggcattgcagcgcagcaaacctcccaacacatattgacttagaacaatcatttnnnnnnnnnnnnntcagttaactggactcatgtgggtggtagattatgtggtgagagtctcgttttctgaagaatcttttaggctggaattccagaggatgcttcactcatgtctgactcaacactggggctgggtgaacacctgggggctgactggttatttccttcctacc

SEQ ID NO: 6974 - DNA, 732 bp, Macaca Fascicularis
  misc_feature (1)...(732): n = A,T,C or G
gatgaccgggaaatttnactggagtgtcagaaaagagggccatcattaannnnnnttgcnnnntagccaccaagttggataaaaatccaaatcaggtctcagaaagattccagcagctaatgaagctnnnnnnnnagtcaaaatgcagataagttgctgaattcctgggactcttaattgatattgcatactacacagaagcttcaaattcctcatgttttaaatgagcactagagggaggtttgtcacctttttgattaccagatgataatctacatttgtaattactcagtgactctaatttnnnnnnnnnnnnnnnnnnnnnnnnnngtcatcactctgatttgcttatctgtttttggtcaaaatatttatttttaaacatattagaacttatcaaaatgaaagcaacagtgatgtattgaaatcttagttttgatattttaaagaaatgactttgtagattaaaaaaatagttttgtagcattttaaacttagtgactatttagttnnnnnnnnnntccattttttatttgcttttataattgcctctccttgttttggtatattgtaaaataatttaaataatgtatttataaatatgtataatgatgtaaaatactgtgtgtatatatatgtatgtgtgtttctgtgtatgcacacacataaaatggctttacctagccannnnattttttttatctgnnnnnnnnnnnnnnnnnnngtttgctt

SEQ ID NO: 6975 - DNA, 727 bp, Macaca Fascicularis
  misc_feature (1)...(727): n = A,T,C or G
gggccaggnnnnnnccacagaaactgcaggttctctcttgtgaggatggaggctgtgccacccggaaaggcagtagccttgggggaacatcgggtcccagctgcacgtctgaggacgggtggggacggggctgggactcggccttcattcannnnnnnnnnnnnnnnncaggtctttgttgcactaaagcagggacaggaccctgggggttcaggaggcgggtctcaggctgctgggttcttccggaagtgggactggagagcggaatggaaaggggcttcctgagctgctggggggtgaaggacccccaaatccgcatttcttgagtgtgagcaaacactcgaggcaagagccagcacccctcccactgcatgcccggcccccggcccaccttgccccctgaccccccttcacctgtgccccttctttccacccttccttccnnnnnnnnnnnnnnntgggaagaccctggagaggctgcaggtctgtccacagacactcagctaagccccagtctgctccctcagcctccttgctcatgttggagcacaggccccaggcttcctgcctggggccccaattcctcttatgtcccccagccccgccctggcgtggacatccactcactccttccagcaataagaaccgtccttggtcgtggagagtactgtgaaacaaaccaatgcacttaccaggaggcacaagactctgaagaagatgtcaaatg

SEQ ID NO: 6976 - DNA, 650 bp, Macaca Fascicularis
  misc_feature (1)...(650): n = A,T,C or G
gattggagatctgcagagaannnatgttgctgcgcagangncnnnnnnnnnnnnnnnnnnnnatgtggacacacaacatttaattaaacaattaaggcagcattttgctatgctctgattgttcctgagaccacatatgttcttatgaagaggcattatgcaaggggaaagaagtactatgtctgtgtatgtatgtatatagtgtaatacatatattttacaagcttgtccttgatattagtgaaggtgatatatacgggtgacacagaatgtataatgcaaatttcatagtaatagtaactttataaaataatatataacacagtatctcatcaggtccaaatagatcgagggtcactcttcaacagtcactagaaggaatgtgtgtgcaattacgtccaccaaagacctgtgttggggggaatgaaggaggggccctggggaccccctgaagcatttctgcctcattttatgtcacatgcttctcccctgttggggctaaggaaggagataggtggcccctaaaagaggaggccctcttctcacccaccccctcccctttggcacagttactcctggctgggggtggggccttgggggtctgggctgggcatccatggtcactgcctcagcccatctaggctgtgcct

SEQ ID NO: 6977 - DNA, 788 bp, Macaca Fascicularis
  misc_feature (1)...(788): n = A,T,C or G
actgtnnnncagaagtcttaccaataccataaacagtcagtttaacacgtattttatatgttatataattatatactatattcttacaataaagtaagctagagaaaagaaaatgttattaagaaaatcataaggaaaaaatattcactcatcattaagcagaagtggatcatcttaagatcttttttgggtgttttgtttcattttttgagactgggttttctttgagactgcactnnnnnnnnnnnnnnnnnnnnnnnnnnnnnnnnnnnnnnnnnnnnnnnnnnnnnnnnnnnnnnnnnnnnnnnnnnnnnnnnnnnnnnnnnnnnnnnnnnnnnnnacacaccctgctaattttttgtagagatggagtttcactgcattgctaaagctgatctcaaactcttgggctcaagcaattcacccaccttggcctcccaaagtgctaagattacaggtgtgagccactgaaactgaactcagccagaaagatcttcatcgttgtggtcttcacattgaggaacctgaggaggaggaagaggaagaggaggggttggtcttgctgtctcaggagtggcagaggcagaggaaaatccacgtataaatggacccagccagttcaaacccacgtcgttcaaggttcaacgataggtgtatttaatgaattgatctttaattatttagaattaatgggtttctgtccttttttaaaaaaatcttgtatcctgttttgtgcctttatcttgtcaaaattgtgataatctgactcgctatatcagagagtaact

SEQ ID NO: 6978 - DNA, 746 bp, Macaca Fascicularis
  misc_feature (1)...(746): n = A,T,C or G
agtgtgagactnnnaaaatatattcnnnnaaagaattcaaagaagtgannnnnnnncagctgnnnnnnnnnttcccacaaatttctaattcaaggcactttatgactccaaatgagtggcnnnnnnnnnnnnnnnnnnacatagaaagtgaattttgtaaaaggagaaggttaaaagtgaaagtgaattttaacgactgtagttttgatttgaaacccttggcaagagctccttatctttnnnnnnnnnnnnnnnnnaaaaaaaacagttatttacaaaaacaaagggtcatcctttctagaaagagaaccgctgtnnnnnnnnnnnnnnnagaatccnnnnnnnaaagaggccaactctgaagggtatttttcttccttgagcctcagccaggaaggaggcagaacgggaggaagaccagaatgggtctccctccccccgtttggnnnnnnnnnnnnnnnnnnnnnnnnnnagaagagggannnnnnnnnnnccaaggagcacacactctgatccttgattggtgaaannnnnnnnnnnnnnnnnnnnnnnnnnaggaagtcatctgctcgcaggaatcagggtgaaggccaaggaaggcactcaagaattgtcctgtctctagagaaaagcatctgccacaaacttcctttaatttttgagttcagtgtctgtgataattaagaaatggcaataccatgtattttcccccaaagtaagaaatatnnnnnnnnnnnncaaaaaaa

SEQ ID NO: 6979 - DNA, 745 bp, Macaca Fascicularis
  misc_feature (1)...(745): n = A,T,C or G
cagcccggggctccagctgcacggccctcaaactcgaacattggctcnccacggatctacagcagcacgnnnnnnnnnnngaacatgagctccccactgggtctccagctgcacggccctcaaactggaacatcagctccnnnnnnnnnnnccagtnnnnnnnnnnnnnnnnnngaacatcagctccccatagggtctccagctgcacggccctcaaactggaacatcagctgcccctcgggtctccagctgcacggccctcaaactggaacatcagctgcccctagggtctccagctgcacggccctcaaactggaacatgagctcctctccagttgcaggacactaatactagaaaaatgccagctcctcctgggttctacagctgtgcaaccctcaaactaaagaaacgccagctcctctctgggtnnnnnnnnnnnnnnncctcaaactagatcacctctccccctggatctccagctccacgaccctcacagaggaatagccacaccggctccttcactgtcttcagctccacaacctaagacatcagtggcagcaccagctcctccgtggacctccagctcaactactctcnnnnnnnnnnnnnnnnnnnnnnnnnnnctccccaaggctccagctccaccaccttcagatttgaacagcggtagcaccagctcctgtccgggtcttcagccccacaaccctccctgaacaatcccttctcacgaaattcagcagtcaa

SEQ ID NO: 6980 - DNA, 1905 bp, Macaca Fascicularis
atttagatgtataaaaaatttcctgcatcttttatagcataaatcaaggcaaatgccatatatcacagagggaggtccctctcttgtccaaacatttgctgttcaccctcccctcactaagcccctttccctccacttccagcctagttactccgggtaacaatccattgttatttcattcattttgctattggaaaacaggccgaaataccaatccttggctctctaggaactagtgatttctgtctttcttgacttcattttcatcactgatgctcattgattctctttgtctctcactgtctttttctctctcttaccagaacatcaactcgcaagactgcttcgaaggtagatatttgaataagaatttcaaatattagatgtatccaacagtataatcctgggcggagggggataaacaatgactatggttcaggtctgagattggtggtatggttcctcccctcattcagccacaggaacccctgggaatgagaactacttgctggtatacactcatatcttcccagcacagttactggcacatgacagacactcagccagtaattggagtggataaacgagtgattacataactacctgtcttgcttgatgaagggagctaaagtttatgcttcaactgttcagtacatttgcctaagagcagataagaatatgtgatttgagcactataaatgttttcatccagaaaagggtgaaatctaattacattattttatgtacccagtttgacaggagttacttgctcagattatatgagtgaggattgaacgaattaatacactgaagcacttagcaagtgcctggcacatggtaacacccaaaaagtactagctattattgttgttgttattattttgttaagagaggaaaagtgagtaagaatgattgcctgatcggaatgttcattaattcttcttagaggaaataatcctgacatcccagtgttgtgtttgctatggaagaaaatggcattaagtataattatataaatttcttctaggatcaccattttagaatataaaactgatcatgtcataaaccttcttaaaacctatcaaaggctggccattgccttcagtatggaattggaagtctttagcaggacatgtaaggctcttcatcacttggtctctaaattttatctaatccagttttagaagcctttcctttacactaaccaggacagaaatgattatcttagccactagaacagagaatattcttggtgagaagggccggtggattcgggaactcactgctgtagttcagaagacgtttggctttccagagggcagtgtagagctttatgctgacaaggtggccactaggggtcgtgacattgcccaggcagagtctctgcgttacaagttcctaggagggcttgctgtgaggagggcctggctatggtgtgttgcagttcatcatggagagtggggctaaaggctgcgaggtggtggtgtctgggaaactccgaggacagaggactaaatccataaagtttgtgggtggcctgatgatccacagcggagaccctgttaattactacattgatactgccgtgcgccatgtgttgctcagatagggtgtgctgggcatcaaggtgaagatcaagctgtcctgggacccaactggtaagattggccctaagaagcccctgcctgaccacatgagcatcatggaacccaaagatgagatactgcccaccaccccatctcagaacagaagggtgggaagccagagccacctgccatgccgcagccagtccccacagcataacagggtctccttggcagctgtattctggagtctcaatgttgctctgtaaagacctttaataaaatattgcagaaagacagaaaaaaaagaaaaaaaaaaaaa

SEQ ID NO: 6981 - DNA, 169 bp, Macaca Fascicularis
aaacttttggtaagagtgacctaaagaaaatagcacttagataagctactttgttttcctttttcactttactatttttttttatatatatttgttccgatttacggggtacttgtgatattgtgagacatggatagcatgtgtcatgatcaagcgaggacatttatgt

SEQ ID NO: 6982 - DNA, 2207 bp, Macaca Fascicularis
cttccagaggccttgataaggttcggcggtttccgaaaaaggaaaaaagacaagtcctcagtttccaagaagccgggagaactggatgacagttcggagcagccctgtggtttgggctgtctagtcagcccctgctgtgagtgttgcaataacatttgctgcttcatggttttctactgcatcctcgtcttatgtcaaggtgtggtgtttggtcttacagatgtcagcattggcaatgttcagagggaatattctctgaaaaccattgaaaagttggcattggaattgagttatgatatttcatctggactggtagtaatgtttatagcattctatggagacagaaaaaaaagtaacatggtttgtagcttcctcctttcttataggacttggatcacttttgtgtgctcttccattcattaatgaagaaaaaaataaaagtaaggtaggaattgaagatatttgcacagaaataaaggttgtcagtggttgccagagcagtgatgcatcgttccaatcaaaatacctgtatttcatcacccttgggcagactatgcagggaatagcaggaatgcctctttatatccttggaacaacctttattgatgagaacgttgctacacactcaactggtatctatgtaggtattgcagaatgcatgtcaatgattggatatggtatgggttatgtgataggagcaccactagttaaagtccctgagaatagtacttctgcaacaaacactacaggcacaaatggtagtacagaatggctatggacttggtggattcgttttctttctgccgctctcgttgcatggtttacattaataccattgtcatgctttccacacaatatgccaggttcaacacggataaaagctgcgaaacgtaaacagcgtcattggtttgacagcaaacttaaagatctgcaagttggaactagtatcaaggatttatgtgctgttttttggattctgatgaaaaatccagtgctaatatgcctatctctgtcaaaagctacagaatatttagttattattggagctgctgaatttttgcctatatatttagaaaatcagtttatgttaacaccccctgcggcaactatacttgcaggacttgttttaattccaggaggtgcacttggccagcttctgggaggtatcattgcttccacattagaaatgtcttgtaaagcccttatgagatttataatggctacatctgtgatatcacttatactgctcatgtttattactttggtacgctgtaatccactgcagtttgctgggatcaatgaagattatgatggagaagggcagttgggaaacctcacggctccttgcaatgaaaaatgtagatgctcatcttcagtttattcttctatatgtggaagagatgatatcgaatacttttctccctgctttgcagggtgtatgtattctaaagcactaacccgaaaaaagacatactacaattgttcttgcattaaagaaggattaataactgcagatgaagaaggtgattttattgatgccagacgtgagaaatgtgatgcaaagtgctataaattacctttgttcgttgcttttatcttttctacgcttgtattttctggtttttctggtgtaccaatcgccttgaccatcatgcggattgtacctgtccaactgcgttctctggccttgggtgtatgctatgtggttttgagaatatttgggactattcctggaccgtcaatctttaaaatgtcaggagaaaattcttgtattttccgggatgttaatgaatgtggatacacaggacgttgttggatatataacaagacaagaatggcttacctatttgtaggaatatcttttctctgcaaactatgcactatcatcttcactactactgcattttttatgtacaaacgtcaggtaaatgagagcactgacatcccaaatataactgtgaagaatccaaaagttaagaaagaaagaaactgacttgtaactggatcatcatcgtgatgcagatcgtttgaggatcagagtgtgaaaatgagtttctcttttaaagattctccaacatttgttcctgtgcccaactttcagaagaggaaaatcacaaatgatgttgacataagtagcaaaaatgtatttatggtgatctgcattttcataataaagtgccctattatgaaacaaaaaaaaaaaaaaa

SEQ ID NO: 6983 - DNA, 663 bp, Macaca Fascicularis
gagtaatggtgaaaattgttgtctttggaaagcacaaaaaaaacgtggaaaggcagttcggctcaggtagctacacataccattgtgtatgattttcacttcaaagctgtctggaaggaaatgcagtcagctccaactagtactatttacgtacccagataactaagatattgtttcatggccttgccttagttagaggcccttttctctgtcctgaacccccaggtatgggtgaaattggaaattactaatctattggaaatcagttcctgacatagtaaagtttgctttcataactgcagcaaaagagctcaccaagtcactgctgccatgtgtgtactgtattattttcagaaaaaaatataatagtctgagtccaagttaccttgatttaaaattgatagagaaaagaaactgtcgagcaagttatataacaactaacaacattgcactttctgtatatgaaatcaatatttaaataacttatttttctccattgctgttcttaaaaacattgtaagtagctgtaatataccagtaccaatatgttcttgcaattgcttcagcccaagaaagctgtgtattgttttaaaaattgtaaaaattattgtgatgattcatttagcataaagagaggtggacagagggttttcctatgtatca

SEQ ID NO: 6984 - DNA, 744 bp, Macaca Fascicularis
  misc_feature (1)...(744): n = A,T,C or G
ggtggccctgtccgcctccccattgagagtggctgcnnnnnnnnnnnnnnnnnnnnnnnnnnnnnnnnnnnnnnnnaggaaaggtgcaggtgcctggttctgagcaccctggaatttctggccgcacatcctctggtgccctcccttccaccctgacaaggagcttccagcctgttttgattttctgtttgtggannnnnnnnnnnnnnntcnnnnnnnnnnnnnnnnagggtgatttcctttgtaatgctgctctggggcctcttnnnnnnnnnnnnnnnnnnnnnnnnnnnnnnnnnnnnnnnnnnnnnnnnnnnnnnnnnnnnggcatgctgtcccctccctctccctcagtctcctctccatgcccaagtcggtttccagctgctggtcttcacggcattcccagtacagccaggcaccaagaggcaatacccaaggcctggcttggccatgttaacaattgtacagacatatatttttaaataacttttgtgtaatacttttctagcatagtaagttcttgttaannnnnnnnnnnnnnnnnnaaacaccaggtgttacttccactgagtgtgtccgtggtcgtggtctatgcctttgtaaacagaacacttgaaccacctcccgaattgcgtcatctgcttcttgaaattgacacttaagagatgtgcatctctcttaactttcaaggaaacttccccactaaatggcatgaaaaggtttaaataaaatccgagagtc

SEQ ID NO: 6985 - DNA, 514 bp, Macaca Fascicularis
  misc_feature (1)...(514): n = A,T,C or G
tnnnnactccccgtccagaaaccccccggaggnggaggcacggtagccccggggccgcagacgcctctccgagcgcaccgctgtccgtttctccatcagttcctagaactcaagcacagctcccgccgatcctggggcggcgccgcctctccacccgcagcctgaggaggcggggacttgggtgtcggcttttcagagggtgatcttttgttttccgagtttgggattcggctgttgggaaaaaaaaatcgcgtttgtaccttttccccccacaaatgagaagtgtttgtaatggatttgtatttttcttaattttatgctatttagacgtttaaaagaaccaaaaaagaaacttttgcttcttcgttttcggttgggatttgcagtttaatggcctcagatccttcttcagatccccagggtttctttgtcttatttatggagaaaaaccggtcactttgtccagcgcactgtgaggcccccactcaggccagccctggccccccttggtact

SEQ ID NO: 6986 - DNA, 239 bp, Macaca Fascicularis
  misc_feature (1)...(239): n = A,T,C or G
cttcggagagcaannnnnnnnnnnnnnnnnnntactggagccacccgcgaaaattcggccagggttctcgctcttgtcgcgtgtgttcaaaccggcacggtctgatccggaaatatggcctcaatatgtnnnnnnnnnnnnnnnnnnnnnacgcgaaggatatcggtttcattaagttggactaaatgatcttccttcaaagcattatccaaggtcatctactcaggaaaaactatgat

SEQ ID NO: 6987 - DNA, 701 bp, Macaca Fascicularis
  misc_feature (1)...(701): n = A,T,C or G
ttaattttggaaaatatataagcatacacataaataacntatctcaatcaataaactcattttgtggttcattagcatgatcacgtgtgtgtgagatgtgcccccctcaaatattgttaggctgttggcacattacccatatgacatgagaaaaacaatataccaagatgttttgtgaaccagatcctgttagtatttctcacttaacaaacattgatactgaacaatttagaggaaatattttctgatatttttgttgaatgatgtagtgctggtttgaaatcagcatggagttcttttcgattatgttttaaaatttatttttgctctaattcaaagaatgacaagcaacttggacccattttatctgtcagaagtgtctgtcttagatatttggattcctgcccccctcctttttttcttcttatagagatggattctccctgtgttgcccaggctggtcttgaactcatgggctcaagtaatcctcccatctccgcctaccaaaatgtggattacagggtctccggttgcccaggctggaatgcagtggcttgatctcatctcactgcagcctcaacttcccgggctcaagcgattctcccacctcatcctcctgagtagctgggactacagtaacttcacgagcccggcttttggacttcggtttccaatacttcaacactgaacaacccacctga

SEQ ID NO: 6988 - DNA, 706 bp, Macaca Fascicularis
ctgaacatgttaaaattggagaataaagagacatttttcatctctttgtctggtttgtcccttgtgcttatgggactcctaatggcatttcagtctgttgctgaggccattatattttaatataaatgtagaaaaaagagataaatcttagtaacgtgtattttttagtattagcttgattattgactcttctatttaaatctgcttctgtaaattatgctgaaagtttgccttgagaactctatttttttattagagttatattgaaacttttcatgggaaaagttaatgtgaatactgaggaattttggtccctcagtgacctgtgttgttaattcattagtgcattctgagttcacagagcaaattaggagaatcatttccaaccattatttactgcagtatggataccaattcctctaactgtactgtaacacagcctataaagttagccatataaatgcaagggtgtatcaaatatacaaatcaggaatcaggtctgttcaccgaacttcaaattgatgtttactaatatttttgtgacagagtatgaagaccctatagtgggtaaattagataccattaacatattattaatttaatgtctttatcattggatcttttgcatgctttaatctggttaacacatttaaatttgctttttttcctatgtacccgaaggctctgtgtatagtatttcatggca

SEQ ID NO: 6989 - DNA, 739 bp, Macaca Fascicularis
ctcttgccaaatgctttggctccaagttttctatgtgtatctattgatataaatgtatatatttatttattctagctgtcaggtgttaaaataaatgccgaagattagtcccacgtctctcccactctaggatatagatttttatgtatttattattattattgttgtctttgagtgaatcggccggttcggggaggcttttgccaccctcccttgtgttgttttggtttttggaaaggaggtggaggcgaggaaggagggaattagggggcggccggagcagagaggacgagacactgcttgggggtgattcgggcaagtctgggggctgtctggccccagaccgcggagaggacgcgcgctcgcgctctcgctctttctgctgctgcttgcgtacggcttgtgatctctctggattcgtgcggctgtgttttttccctcttttctcgcttgcaaactgctttccttgctccctcgctgctggcctccccttccctccctcctctttttcctcgcctcttcttccttcccttcccctgtccttctgggtaactccgggaggcaaaaagggaggctgcccgctcgctcgccccgctggctctcttccatcggcctcggtcttttagattccctgccttcgagccgaaccgagatttggaaggaaaaaatgcaagcgaactcctcgggtttttgtttttgtttttgttggtcataaatccagatgagatgaagtatcgtg

SEQ ID NO: 6990 - DNA, 745 bp, Macaca Fascicularis
  misc_feature (1)...(745): n = A,T,C or G
gaccagatacacagatgagagtgaggctcatggtacaatgagttctagtactgtcacaagaaatnnnntnnnnnnnnnnnnnnnnnnnnnnnnnnnnnnnngtgaannnnnnnnnnnnnnnnncatgaaagcattagaagatgtgtggtgtttgtaaaagtacagttnnnnnnnnnnnnnnnnnnnnnnnnnnnnnnnngagctgcttgggtgtggaaatttnnnnnnnnnnnnnnnnnnnnnnnnnnnnnnnnnnnnnnnnnnnnnnagtgactccaggacagagctgcgggggcacccagaggtcctaagccccaggactgagggtggtnnnnnnnnnnnnnnnnnnnncgggaggtgccctgggcccagggacctcacgggcaggatggcgacacccttgcagggagagggagtctggctccagcttttcccattggaggtgattttccttcaccaggggacaggcaggagagatgcaggagccccagaagcttctacccctcatgcctggggcccaggggacacttggannnnnnnnnnnnnnnnnnncgtccagggccatgccctctgcgggttagtgcctgagtctcacctnnnnnnnnnnnnnnnnnnnnnnnnnnnnnnnnnnnnnnnnnnnnnnnnnnnnnnnnnnnnnnnnnnnnnnnnncccctctcagcccaagacatcagcttcctcgttctcctgtgctgtagataggctgaattccagtgttgtgacagc

SEQ ID NO: 6991 - DNA, 2426 bp, Macaca Fascicularis
  misc_feature (1)...(2426): n = A,T,C or G
nnnnnnnnnnnnnnnnnnnnnnnnnnnnnnnnnnnnnnnnnnnnnnnnnnnnnnnnnnnnnnnnnnnnnnnnnnnnnnnnnnnnnnnnnnnnnnnnnnnnnngtgaagaagagtgctcaccagattcccttctggtctggaaaaagaaattccttcttttgtggatgtcatctctaccatctcttggtaaaaaatttttcaagtgactcctaagatggagagagcattggaagtcaactggcccatttccctcatgcaactcaaagcttcttcgtaagaaaaatactcccagaagtttgtttgccttatgaagatcaggtcttgagagacccagtctggctcttccctgtacaaaacattcctcacaaacagaatatggacaattgctaaatgtcaaagggcctgaaggagcttttttaccctgccaccatgtgaggacacagtgagaaggcaccatctatgaaccagaaagcagatgccctaaccagacactgaatgtgctggcgccttgatcttggacttctcagcccacagaactatctgcagtgtctaacactgtgcttggtacagaaaaactgttctagggtacatgtgcataacgtgcaggtttgttacatatgtatacttgtgccatgttgctgtgctgcacccatcaactcgtcagcacccatcaactcgtcatttacatcagtgtaatttctgcagtgcggggcaagtccagaccaaggtgctgttgaccaccatacagcaaaacctcccttttggtgagtgaatattttgccatgctgcttggaaacgtgaaaagagtcctcagattgccttctcagggtttaggtaacttcaagactttgcttttcagaagagataatattagttaggtacagagacaaattatttgggggaattaagaggttgggggaggctaaatgagggaagaatttaaagaaagaagtatatccagaggttatggccaaggaagaaacttgattgatatgaagtttctttcttttttcctttttttttttgtgatggagtcactctgtctcccaggctggagggtggtggcacaatctctcctcactgcaacctctgcctcctgagannnnnnnnnnnnnnnnnnnnnnnnnnnnnnnnnnnnnnnnnnnnnnnnnnnnnnnnnnnnnnnnnnnnnnnnnnnnnnnnnnnnnnnngcatgaggtttcaccatcttggtcaggctggtctcaaactcctgatcttggcctcccaaagtgctgggattacaggcgtgagccaccatgcctggccttgaagtttctttttcttcttcccataatatcttcctgctgatatttaaaatttgatggattaaacagacgtttagatacaggaaaaaagtgaaggagtcaacaggaaaataaatctcagctccatcctaccaccctcctccgccaaattctaaaatagaatatacggagaaaaacagaaaatacaaaaaagagagagatttgtaacatatattattgatcttagatttgcattcagaatttaaaaaggaagaaaaaggtccactataaattggtaagaagtcaaacaaaatgatggaaatacaagcaaaaaaagtgaaaggggaaatcatatgataagcaatattgatgataagtaaacagaagaaattcaacttcaccaggaaaatggaaatacaaattaaagccatttttatgttgacataacattttatacccagcagattgtttttttaaattcgtacaacattaagccttgacaagtatagagatcaatgggaacttatattctaatggtggaagtattggttcgttcaaccactgtggagagcaatttaatagtatttcccatatgatatactatgacccagcaaatcctcttctaggtacatttccaaggatactcttgcacattgcataaggaggtagggataaggatttgtattgcaatattgttttcaataggggaaaaattgggaagcaatatcttgtttatggttaagttaaaacccttatgatgatgttttgctccattagaggtacattgactagtgcagcttctcacgttttcttctccagaggaggaagagtaaattatttgtgagtttgacataaggaaatgaacctgtatggcttagcttctttctctctctttcttaggagagttcctccatgccggaagtgcatgcaatgctctgcttctttccagaagaattataggggctagtcctgccttgttggtgtggggaggactgccttaggtgacctcagcctatgtcttaggttctagggttcagaattaggaagcccatttgcccacccatgtaagtcatatctttcagttcagtttcaccagtaaaaagatgatattctgatgtctaaaaaaaaaaaaaaaaaaaaaaaaaaaaaaaaaaaaaaaaa

SEQ ID NO: 6992 - DNA, 684 bp, Macaca Fascicularis
  misc_feature (1)...(684): n = A,T,C or G
gatgccagtgcannnnnnnnnnnnnnnnnnnncatnnaagannnnnnnnnnnnnnnnnnnnnnnnnnnnnnnnnnnnnnnnnnnnnnnnnnnnnnnnnnnnnnnnnnnnnnnnnnnnnnnnnnnnnnnnnnnnnnnnngttgggnnnnnnnnnnnnnnnnnnnnnnnnnnnnnnnnnnnnnnnnnnnnnnnnnnngaccacacccagtcccgcatggacggggtcctcaggaagttggccaaagtatcccacatgacgagtggtgagtccccttgggggcgaggtcagtcctagtgggggcaggttgtaggtggtaccctcttccccggtgacctctgatcttctcgttcccagannnnnnnnnnnnnnnnnnnnnnnnnntgctggtgggggtgcttctcctcgttcttatcttacttttctctctctgaccccagccctcccnnnnnnnnnnnnnnnnnnnnnnnnnnnnggagccaccaagcactttggagctggcctagccccctagnnnnnnnnnnnnnnnnnnngggtagctggaaagtagaggnnnnnnnnnnnnnnnnnnnccccacggctcccccccagagccagtggtacccttcaggaccctgggccgaaaccaccaccactggtnnnnnnnnnnnnnnacttnnnggggtggtagnnggcagnngtcnnnct

SEQ ID NO: 6993 - DNA, 762 bp, Macaca Fascicularis
  misc_feature (1)...(762): n = A,T,C or G
taggtgccacacggcacagctccatcattgccactggttttcctaagtgcaccaaggatttcagaaggttcttcctccgagtcagccagtggtgccgggaccccagggcagcctcctcaactcctgaagaaaagtcagtgcccatgggtgcctctcttcnnnnnnnnnnnnnnnnnnnnnnnngcctcctcttgtaccttggacaagggatacacctgaannnnnnnnnnnnnnnnnnnnnnnnnnncaaatgaggattttgctcaaaacagcacttgctgccagggggaggagggaggtttctttattcccacagtttctactgggccttctggaatgaccgtgttttcctgtggcggtgagtgtgtcgttgagcccaccgtcttccaaagccttacttccccaagctgccagccaggaggtgatagccaccctcccagagtttctctcggctctttttttaaaagtcccccaacaaataggattcttgctgggaaaggaagtttggtaaggaaatgtcaaatctggtttttaaacaaggtcccaccctgcnnnnnnnnnnnnnnnncagccccgagagatgataagaactgatgtggccagagtgcctccccacggtggccccggtgctctgccctcacaccccgaccatccgtgttggtagatgtccctagatgggctgagccatgtgcaataagaacatcgatcctaaagnnnnnnnnnnnnnctgtatttcttcaattagaattctcaaattgtaca

SEQ ID NO: 6994 - DNA, 2364 bp, Macaca Fascicularis
attcatatctctggggtaacttacagcctttcttttgttactgaaaattcccataaaatcattacttggaaaagaaataatagtgagtaaaagggggctgtaatggtcatagatagaggaattttactcataatatacattgagtaatttatgtgctcaaatatgattgacagtttccttgttttaaacttattgtatggctgagaagtgttaggcaaaatctgaaatagaagttgtattgatatatgtattattcttatctgatactcgcatttcacctgatgattctcccagttcacatcagtttgtttttaacatacacataatccattaaggggtatccagtttgtctattttatacccatcagtgttctttatgcatttactgtgtcaactggggcctctaaaattaggaataagtccttgaacttgattcctcgtagacacctcaatctcaatatatctaaaactgaactcaacgcttttctcccaaatatgctgtggtatctatatttcctttgttagctggtgacactattatcagtcgattccataaaacagaaaccaagaaattattttcactttttcttttaggtatattttattgtatatttgtaaggcctggcactattcatctagaggcccctaccttacattataccacacactgtacttcatatcaaatacatattttctgctgttaaaattgtgtaaagattttatgtaaattgcttttgaaattagctttagttttataattttctttttttgtgttttggagccatatctttcatgtttcatattttttatatttttgtatttctcacttttcttagaccctggcaagccctgggtactgtacctgtatgataatgattaagaggactttttctttcttgctcatgtcacacagccaagtccaacaatcttatttattaagtatttctcaaaattacccctccttttcaaccctaagccacttcctggactagttgagtaactgcctaagaaatacctgtgtgtccagcttcatccctctgatgtatcctccccagtaatataaatgatccacctgaaaatccgatggtgtgatcagcgaggttgtaaggttaaggaaggcacagagtttcaaagaacacacctccctcacacattggcatctctccttgacttaaaagggactagccctccactgaggaccctaatgaatgctatgaggtgctctttagggaagtgtgtattgtatgtgtgctgtcacaataccaactatctgcagtcagaaaagaagttttcaccatgtggcatgtcaggtgttctatgggtgagatattttttgctcttcatttgcatcttcttccatgccccattcagcctaaattttaggctgagccttgtctggctttcctacctatgctcatattcatctcttgactcaggaaaaatgattttgactcagtgaaagtttgtcacacaagggaagcatatagacagacatttgcatgttcagagtgtgtagttgtaaagaagatgctagccaggcacttggttatgactcatgaagtgtttcaaagtgattctcaaattttctgtatgctgattttgacaacatttgtattcattgtagtttaatgagatatggcaaatatcagttacaagtaacctaaaataatttaagcagtttgattgaaaacacatggctttcatcattttagaactaattatttaaaagatatgttttataaggcactctagtttttctcactaaaagaaaaaaatactaggttgagtttggacgttttctatgggccatttttctggtttactattcctgacttctgctgtttctgatctgctgttagacccatccattgagtttttaatgtcaaatactatgttatttggttccagaatattcatttgatttttggaaatagtgaagtttaaggaggtgaaaaaccttgtggagagctaatatgagtgaatatatgaaatcttttaaatatttgatatctactttctcattgtcaccactgtcctggataaaaacccaaacaatttatgggcataaatgcaatcataacccattcagaactaatttttttcctgctgtttttatctaaacattttatttttggggggattgctgtaaatgccaaaggcctttactaactcaacaaatttgtatcatttttatcctaatgactgtttacttttcctcctttaacaaaaataatgcaaataggtgaattatagcctaaaattaagatctttctattatttctcctaagtcatccatgtattgcagagcacatttgcttagactctccaagagttttcttggaaattaaaaaaaaaaaaaaaaaa

SEQ ID NO: 6995 - DNA, 751 bp, Macaca Fascicularis
  misc_feature (1)...(751): n = A,T,C or G
atgaccatcataacaggccttgcttttgtcgtatttnnnnnnnnnnnnnnnnnnnnnnnnnnttcagatattgtagttatttggatgtataatagtttagcaagatgttacttttgtaagacatcagatgttcaaaaaagtgcatccgaacttgtactaaatactgcagtgtccctttataaaaagtcagactaaaactgacaattgtacagcgaagcctgacatttggatattttgaagttttttcataaatcatagaaattagtatatggctgtagtttagctttttaggtaaaaggtatgtttcattagtgcatttcttactgctgatcacagtaaacatgtgaatcagctttccatttcttatgcaggtcatgataacttgtagagtagagtacaatcatttgtgctatgtttttaattttctaaagcaccttgacagtgagtgttcagtggtgaagcatcctctattgaatcaccctcaaaaatttttttgccaagtcctgagttgatagcttaaagtaaaaagtgaaaattatagtttcattaggacttggtgtaaagaaatcccctctccccttccccaaagggatactgcagttatatcacatacccaataggcaccacgatgaagatcagagcttatacttaattaaggttttatacacaccagttccccagtaaatgcaaatttaacaagaaaattagacatgtcatatgttcaaaatgctcatggcaaacaatcatttgc

SEQ ID NO: 6996 - DNA, 644 bp, Macaca Fascicularis
  misc_feature (1)...(644): n = A,T,C or G
gtnnnnnaagagntcatcnnnnnnnnnnnnnnnnngatggaggttcaggagagagtttttgacttgctcccgtgcccttcctttgtctttttcttagtttgnnnnnnnnnnnnnnnnnnnnnnnnnnnnnnnnnnnnnnnnnnnnnnnnnnnnnnnnnnnntctcaatgggatgacnnnnnnnnnnnnnnnnnnnnnnnnnnnnnnnnnnnnnnnnnnnnnnnnnnnnnnnnnnnnnnnnnnnnnnnnnnnnnnnnnnnnnnnnnnnnnnnnnnntttacatagnnnnnnnnnnnnnnnnnnnncnnnnnnnnnnnnnnnnnnnnnnnnnnnnnnnnnnnnnnnnnnnnnnnnnnnnnnnnnnnnnnnnnnnnnnnnnnaagacaatatttgtagaccaagacaaaaaaaaatgcttgttactttaaggcaatgtcatagggctttattctttgttagcactgcttaaaagatttgatcactcatctgatgagaaccnnnnnnnnnnnnnnnnnnnnatttatatgtatttgcaagatataaagannnnnnnnnnnnnnnnnncaatgatgtctattcttgaatttggaatgacttcataattaatgtattttctggaaatctgagaataaaatcttcattgtt

SEQ ID NO: 6997 - DNA, 715 bp, Macaca Fascicularis
  misc_feature (1)...(715): n = A,T,C or G
atttgaaaggctagagaaggggatatatatactatatnnnnnnnnnntaaggttgttactgtacataattnnnnnnnnnnnnnnnnnnnnnnnnncattatgtaaacccaacccactaaatgagcaggttacaagacaaatgttaccagccccaagtattttatgannnnnnnnnnnngggtagttatgttaaatagattataatgtggtaaattatttcctgaatcctttatcacaggaaaaacacagatcctcataaaagggnnnnnnnnnnnnnnnnnnnnnnnnnatttagtgaagatgagacttaaaacatgaaagtgtatttgtgtattttgagggttttagaaaccagttgccttagaggttagacttctggggggaaaaaagaagatagaaatcttttcccctggccaaagggaagttgtgtgagtctgtgacatctnnnnnnnnnnnnnnnnntggtnnnnnnnnnnnnnnnnnnnnnnnnnnnnnnnnnnntactacaaaacagaagaattttctgcnnnnnnnnnnnnnnnnttacaaaatgactgtaaatatttgtaaagtaacactaaactttaagcccagaaggagaggttctagagccatgtattcagctgggnnnnnnnnnnnnnnnnnnnnnnnnnnnnnnnnnnnnnnnnnnnnnnnnnnnnnnnnnnnnnnnnngcaaattcgtgttttgcgaatg

SEQ ID NO: 6998 - DNA, 686 bp, Macaca Fascicularis
  misc_feature (1)...(686): n = A,T,C or G
acgtactaccattgcctataattggcaaatgatcctcagatgcacagaagatgcccagatggaaagtttgccccttgggcaaagagacagccgtgggaaccttcagacctacagagagaaggaagcgcttcttcctacattcctcgaatagctaagatttgaccagtgtgttttctaagtcagttctagtgtgtttcatcgtcacctcttccctctgtggctttgatgatagaagcgtagtcctaacctgggacccctacccccagatcccaatactggggatgggaggaccttgcactattcccctgagtccatctatcaaggtctttgnnnnnnnnnnnnnnnnnnnnnaaatgagagactaaatgacatctaagaaaggcagtgttcaatcccaggtattaggtgaggatgggattctagggacatcagtgggaggcagggagccaccttcaggcctcggcatggaagcttccaaaatccagaggaagaggcaacgggctgtccacagcagtgagggtcacgggtagaagaatcatcacagccctgctaaccaggcagctgacgcccctctcccctggctcgctgtgtccaaatcctacaggggcatctgttggctgaactcaacctgaagccaaagagaagatgagtggagagaggcaacatttatagagttcaggtttcta

SEQ ID NO: 6999 - DNA, 801 bp, Macaca Fascicularis
  misc_feature (1)...(801): n = A,T,C or G
gcccacagcnnntngaacaggcacagccctcccattttnccaatgaggaaacagatnnnggaagagccnnncagtccacaccccaatggaaatgggggccctcctanctcagggnnnnncagggatcccctctcccgctactcacctgggtcagggctaggaggcaggggccgcaggctcagcctgacnnnnnnnnnnnnnnnnggcagagaggtcctgcatgaacagcttcacctgggggggagcccaacacgaagtcacatcccagccccagagccactgtccagcccctatccctcaacacgtggggaggccaaaaggcagggtggggactggagaccccctcattaaaagaacagcagtgatggtggttcccagaggcggtgactgagatcctnnnnnnnnnnnnnnnnnnnnnnnnnnnnnnnnnnnnnnnnnnnnnnnnnnnnnnnnnacaccttcacagcttccttgctgctgtcacctgcactgtnnnnnnnnnnnnttcatttatatcnnnnnnnnnnnnnttcttgtacctggatcagtcatattcattggtttgtgatctactcttatctccatgggtggccgtcctttattgtgttttaattaacttctttatgaatatgaacttaatgaatgccatnnnnctattgtaaaaactaggacttgagggtgaacttacaaccatctgtgggctcccctcatattcgtcattgtatcaacaactgagaaggaaactttatctccaccaaaaatggagaaaaataattaccccttgtcctaactagggggcaa

SEQ ID NO: 7000 - DNA, 778 bp, Macaca Fascicularis
  misc_feature (1)...(778): n = A,T,C or G
agtaataacgtatgnnannnnatcattgctgnctgtctcgtggagatgatctattagcttcataagcacaaaaaaagtcagtgtcttcattatttatattttacaaaaagccaaaatatttcagcatattccagtgataactttaaaaattagatacattttcttaacatttttttcttttttaatgttatgataatgtacttcaaaatgatggaaatctcaacagtatgagtatggcttggttattgagcagtgtgttcatagcctactttatctctccttgcttttctcacctctcccttacccccattccctattacctattcttacctagcctccccccacttcctcaaacaagagatggcaaagcagcagttcaaccaagcccactggaattatcctttaattttacagataccacttgctgtagactatggaccaagatgtccaaaattattcttgagcactgatataagttagatcttctttgaggtcaaaattcagccatcatggtaggcagtgcttgaatgagaaaaggctcctggtgcatcttcaaaatgagtcctaaagaacatactgagtacttacaataagtagaagagcaaaaaatgtatttctgactaaaacaaatggctctttcacatgtgctttattagactctgggagagaatagtaaccaagtgcttcagaatgggtttttagtattcttcatggtaacataatgaagttctaatgaactatttctcccatggttttaaaattgtcaacgagttattct

SEQ ID NO: 7001 - DNA, 761 bp, Macaca Fascicularis
  misc_feature (1)...(761): n = A,T,C or G
gcattcagatccttcaaaggctcaaaggaaacaggaatcgtggctcaccaaatccagcccaactgcttccnnnnnnnnnnnnnnnnnnngaggaaggcctagggagggtaagggacttgcccaaggtgcccagttcattagccacagaacccatgcccccagctctgaaacaagttccagttaaagtcttcgctgataactttaaatcctccactaaccaagggagtcatctttgcatttgcacagaggagacgggaaaaaatcacaaagcccttaaggtccagaggaaatgagtgtcaccacattgggctcccaggctgtgcaacaagctgtggactgagatgtctgggcagggagcccggtccagctccctacccatcgcatcatgaagtcagccatctcctctggggactgcaccctctgggtgctgagaaatccaaatggctctttttcatgcagccgccccaagtgtgcaagatggcctttctcttgatttatttcctgcttactttatgagagtcaaagtgcatccttcaggaccaaagtggccaaggnnnnnnnnnnnnnnntagagtgatcaaaatggaccattttcaacttggccctaattcatcttcagagttttggtttccacttgcttttacttatctgtattttctagcatttctttagcaaatttgtattactttggcaattagaannnnnnnnnnnnaatttttataaaaggatttgtgtttgatttcctttcagaaaggcacttc

SEQ ID NO: 7002 - DNA, 728 bp, Macaca Fascicularis
acgccagtgcggtagcgtgtggggagaatcccggggcctgagccctgccttggccgctgcgggatcacagccgaccaggcgcccggatctttccccgccggcgggctctggagtctggattgggtgcgcggcgctctagcccgagtgcgctgcggcgcgggtagggttaacagcctcggcacccgggctgggggagggtgggggcggggccggaggaggggatccccgcagtccgccagcagagccggcagggcttcccgggtccccctggcgggggcggagggctttccccgctaccgccagctcacatttgcgccttctccggaacatgaggggctggcgcccccggccgccggctgctgggctctggcgctcaggctctccggcagcccgaatccggaggtccgagggctttccaagcggtggagaggcaggcggctcgctcaaaggtgtgggggctgctcagtcaccgccggcctccagctcctcttctgctcctcttcctcctcctcacctgcagcgcagacacaaagcaaagaccggtcacaaataacgcaaacatcgagcatctttgccaagtcctaactgcagcggcgggtgggagaggggcctgggacgggctgattcaccccggtagtcgcagcctggcagagaaattattaagaatgatagcttgggctgaataatcgctgcccacggacagtgctggaggtttgttggagttcggt

SEQ ID NO: 7003 - DNA, 398 bp, Macaca Fascicularis
gagcatgggtgctaagatcattaattggtacatgtaacatatacttgtgtttggtcccatgcgccagagaagcacagcttcatcatgatggacccccaataatgcagaaccatggtgccacgaagtacacaaatttcatgcctatacattagatcttagcacccatgtgcagctgtgtgatcttagcagccatgggtgctatgatttaatcaaggtccatgtgcgaactctagtgagactcctacatgtttaccagtttgtaccggcctaacatgggtaacacgctataagaaacatcatgggtgtgggccccataatatatacatggtactcctctagatagttatatacatgtgatactaagtactattgacttcatgcatctagagggcccaatc

SEQ ID NO: 7004 - DNA, 741 bp, Macaca Fascicularis
  misc_feature (1)...(741): n = A,T,C or G
ggaaaacatgctttaaaattnnnnnnnnnnnnnnnnnnnnnnnnnnnnnnngcatagaaatgaaaggaagaacaatggcatctgtttttctttttctatcttcccctatgctttctcctnnnnnnnnnnnnnnnnnnnnnnnnnnnnnnnnnnnnnnnnnnnnnnnnnnnngagtgttcactaagtaaggggaaatggagagacagcatgagggaggcagcacccctgttnnnnnnnnnnnnnnnnnnnnnnnnnntgaaggttgtaaccattacctccacctgaagnnnnnnnnnnnnnnnnnnnnnnnnnnnnnnnnncaccaataggattcgacagtgctgcctttgcctactttttgacctcctgcctctnnnnnnnnnnnnnnnnnnnnnnnnnnnnnnnnnnnnnnnnnnnnnnnnatttaacccaccctgtctgcttagannnnnnnnnnnnnnnnnnnnnttccttaggnnnnnnnnnnnnnnntttgtcctatttgnnnnnnnnnnnnnnnnnnnnnnnnggnnnnnnnnnnnnnnntttgtcctatttgnnnnnnnnnnnnnnnnnnnnnnnnggnnnnnnnnnnnnnnntttgtcctatttgnnnnnnnnnnnnnnnnnnnnnnnnggnnnnnnnnnnnnnnntttgtcctatttgnnnnnnnnnnnnnnnnnnnnnnnnggnnnnnnnnnnnnnnntttgtcctatttggttctgtactcnnnnnnnnt

SEQ ID NO: 7005 - DNA, 724 bp, Macaca Fascicularis
  misc_feature (1)...(724): n = A,T,C or G
gattggaatgtcatgtcccccagtttttgattgggnnntgctatttcnttgctgtgtcagtttttgtctgtttcttctcttttgctgacccttttatcatgaacctagttactcaaaccagaaactaggcagtcattttcagttttccttctcgtttacttttatattttagttcacttctttatccttaatatttcttaaatcctaccacttctttccattttcactgttactatcttacaccagattcctataacatctctgatagtgctacagtcttagaatctgatctctctgtttccaatctagatattatccacctgtagttagtgacnnnnnnnnnnnnnnnntctgaacccaactcttcctgacattaagagctacttgcaataatttctccaaatgccaatcttttttctcacccctagagttctgtctgtagtattatattgtgtgctttgcctttttattggagaatgcctatatcattattttttgagagaaaatttcaataatttatatttcttttaaaagaaatctgtaagttcacaagaacttgttataagatgtattgtatttcctaatggtctttaaatatttttctcactttcaactttcaacagaaaaaaataaattctagactgctatgcctggagtattccatttccttttgtgaaatcatgaacttgaatttattaaacnnnnacatataactgtgaatgga

SEQ ID NO: 7006 - DNA, 1956 bp, Macaca Fascicularis
aggcgcaacgcagaggggatgcgagatggaaccccgggagcggccgccgcgggagatggccccggctggcgccggccgttcagggaaaagcatgactgcagtatgctactaccacaaattacgcagctgagtttcccacatttgcagaaatcacagggataagcaagtcttcattggactagagaagccttgccctaggaaaaactacccttgtggtcatggtatctacctgcctgatcgctaatggaagatggaggaattactgcaacgctttcttgttggcacaagttcttcatctttgagttagccatcagacagtgggcagattctgtacatgctttattactggggtctccaacccctgggccagaaaccagtactggtctgcggactgttaggaactgggccacacagcaagagattggaacttggatcatttattggacccccacctgtgtctggaatgataaagaagggtctacaaccagcatatcttcatggctgtgaaattcatggctgtggaattcatggctgattttggaacgttcctgactgtcaatcacatcggaatgctcattgctgtcatcactggctttccgcttatataatctggagtgcttgtggctgtgggtttcagcactgtggtcatccagctgactcgtttcatgactgtccttcccacggctgtcccaatcagaaggcacgttcaggccctggacaactgggatggccttgtatgcaccattcaactcctcgctttccacatgtgaggtgatgtcctcgtctgtagcatcagggtactgaatcatggcacaaatgaagaagaattatatgaacagctagggatgggaatacggtaatccttttctgctctctagcttttaggccatcttatactaaaaattggctaaatctggctgaaattatactagcatgttactttgtatagtactttaccaagccgtttcacatatgttgtctcctttagtttaataagtacatcgcttacatatgtaatgaaacttatcaggtaggtttcattatattgaaacctacataaagaggaagtgaattggaagttaaaaaataaagagaatagtaaatggcaagcctatgtcaaatccaggttctgtgactaaggattcagtgtaatttgcaactacaactcctcttaggtatttaacttcgaaacatgaccattatatatttttaaataattggtgttttccattcattttaatctaaaaataagtgatccaggatttcaaaaagtagaattgtgtttgagaatcaaatctagagagaaattatgtacttacaaaaaccaccgagcagaaaaagatttgtattcaatgatcataaagtagaatatgaatgaattcttgctgaatggatgaatgaatggatgaatggatgaatgaatgaatgaatgaatgaatgaatatgcaaactgtggtttcctagacttgagctctagtcagaactatcaggtgtgtctgttaaaggatttacctggatgtcaggtctgcggaacttcttagattttgacctcagtccataagccacactatcacctcggccatcatatatgtctactgtggggacaactggagtgaaaacttcagttgctggcaggtctgtgggaaaatcagtaaccagttcatcggattcatcagaatggtgagactcatcagactggtgagaatcatcagtgtcatctacttcatcagagtcattcgagtcgatggagtcctggctgtccacatggtcatcatcatcttcatcatccacatcatccatgtggtcatggctttcgttagacttacttggaagggtctgaaaattaaaatggccaggaaaaaaaaaaaaaaaaaaaaaaaaaaaaaaaaaaaaaaaaaaaaaaaaaaaaaaaaaaaaaaaaaaaaaaaaaaaaaaaaaaaaaaaaaaaaaaaaaaa

SEQ ID NO: 7007 - DNA, 748 bp, Macaca Fascicularis
  misc_feature (1)...(748): n = A,T,C or G
gtgccgtgctgcactccgtggagggcggtgaatgtgaagaagagatagtgcgctttggctttgannnnnncactgccctgaaggcctgcaagntnnnnnnnnnnnnnnnnnncaaggaagtgctgggttcaggcatgcaccaccacctccagtgtttnnnnnnnnnnnnnnnntctgctttggccgaagaggacccccagccctttcccttcccagctccccaaggtgtcactctctgtccccactnnnnnncctgtacaatgctgccgnnnnnnnnnnnnnnnnnnnnnnnnnnnnnnnnnnnnnnnnnnnnnnnnnnnnnnnnnnnnnnngcaggacctgctgaagaggagactttctatgctcttggtctgtatttttaacagaagacagtgcaacaactggtctccaccagtatttgtcactttatttttttaatgacaaaaccaaaaacagacatggggtgggtagctgggggcccggacacttgggaccctggcccctttgtccctgcactcagccctgtggcctcttcctgccctgtctcaggccaggctaaatacgtgcctgtcccagggctgtggggcaggcactagggggcctttcccttcctttcctttctcaggcccaggatgacccactcttaggggggtggtggcatctggacaaatgccaccacagcaggtggagaggcaaagctacctggaatggatttgtgtgctgatttttaagaattattagagataat

SEQ ID NO: 7008 - DNA, 667 bp, Macaca Fascicularis
  misc_feature (1)...(667): n = A,T,C or G
tgacagtttcatgggtaagaaacctcatcaatntaaggcatgttaagaattcttccagtgttactaagtcagtcaacttgcattagagagaaaccctatgaaggtaagatgtgggaaatctttacttctgcctcatgcgtcaatatatggtaatctcaaagaggccagaaacattatatatgctagaaatatgggaatgccttcnnnnnnnnnnnnnnnnnnnnnnnnnnnnnnnnnnnnnnnnnnnnnnnnnnnnnnnngtattatttcatcctttaatataaatgataattcatactggagagaaattttgataatacagaataagggaaatgttgcatccattttacaagtcttactatacatgtgaaaacccactctgcaaagaagctatataaatgtgaaaatatgggaatatgctgggtgtggnnnnnnnnnnnnnnnnnnnnnnnnnnnnnnnnnnnnnnnnnnnnnnnnnnnnnnnnnnnnnnnnnnnnnnnnnnnnnnnnnnnnnnnnnnnnnnnnnnnnnnnnnnnnnnnnnnnnnnnnnnnnnnnnnnnnnnnnnnnnnnnnnnnnnnnnnncagctgcttgggaggctgaggcaggagaattgagtgaacccaggagacggaagctgcagttagccgagatacctccactgcact

SEQ ID NO: 7009 - DNA, 847 bp, Macaca Fascicularis
atgaaatgattcaataatttggaggcatttgcaagtcattaaaatggcaatttggttttcagttgttgcccccctccattttttgcatttcccccatagaaaaagacatcctttgggcaccctcaaatattctggaatgctgaagtaatgcctacaattatttaaaattttagaaattaaaattcaggaggcagagcaagataatcctattattaatatatcagtattatttagctacgcataacaacaggaaaacgcacaatgcaaaagttttagagataatgagcttagagaaattacatggggggaagaaatacctggatcatatttgaaagcatttgtcttgaattctgctcatctgaatgagaactttctttctacctgtgttatttaaaaaacaatttcagtatccccctacctgctaccccagcctgaagcagggtctaatgaaactctctctggacacacagatgttaagacactgtattacacaacccttttttaaaaattgtttcagaaaaccaaatgtgggcatgcaaaccaaaagaaaaacctcaggaatctttataagatagccagctcagggttcaagatcgagagaactttgttgcggcaggataagaagacaacagtattgcgttttaactaaacatctcttcttggcaaatgagaagcggtgaagcagggaagattttttaaggagctttttagctcttttgcatctctctccaaagactaatttaattgaaaagctatagtgtccatttatgataaaggacaggcctcatgtttccgcaatgctggtagacactaaggtggggtaaaaaaaaaaaaaaaaaaggccaca

SEQ ID NO: 7010 - DNA, 567 bp, Macaca Fascicularis
  misc_feature (1)...(567): n = A,T,C or G
tcatgccatgaccagggcaagaccctggaactcagcttccttttctataaatagagaatcagcacccaagtcacagggtnnnnnnnnnnnnnnnnnnnnnnnnnnnnagtgcgtgcnnnnnnnnnnnnnnnnnnnnnnnnnnnnnnnnnnnnnnnnnnttaatttttaaatcaagctccagggtgaggcatccctgcacatnnnnnnnnnnnnnnnnnnnnnnnnnnnnngtccccacttctggccacacccagctctcacaaccttctctccccacctgtagaaggagaaaaagaatgataagatcatagaccacatcatggagnnnnnnnnnnnnnnnnnnnnnnngnnnnnnnnnnnnnnnnnnnnnnnnnnnnnnnnnnnnnnnnnnnnnnnnnnnnnnnnnnnnnnnnnnnnnnnnnatgacgagggccctggccaccaccataagccaggtctcggggnnnnnnnnnnnnnnnnnnnnnnnnnnnnnnnnnnnnnnnnncatggccacgccacagccactaatcaggaggccaggccaccctgcctctacccaaccagggc

SEQ ID NO: 7011 - DNA, 1145 bp, Macaca Fascicularis
  misc_feature (1)...(1145): n = A,T,C or G
agaaacaggagtggtagaaccacannnntnnnaggccacagnnnctgtttatagaagcttctgaatgtagaaaagctgttgaatttcatttaaatgtaaataaccttttaaaaagcatatggagttagccagttccccctagttaatggacataggnnnnnnnnnnnnnnnatggcagggtggccaccttgtgaccatgacgttgcaagtcaccctccctggcatggcgagttggcttcccgagctctgggtagaggacatcgcctcacannnnnnaggcaccagccgccgcctacccatcaatgcaagcaaaacagttactgactttgtatacctgggagattggagactctggttccctcgccaagtgtgacaacctgtgcagtgttgggggcttacttggtgtgtgttggagaatgaggtcctgtcctgctttcacccatgacccatctagcttcnnnnnnnnnnnnnnnnnnnnnnnnnnnnntttccattgtcctcacgagtttctttggtctttactgaaagaagatggtagaaatttaaaagttgagagaagactagaaatggaactgattagaaggggaggttcaaactgnnnnnnnnnagacttttcaaagaagttgtttttattttccaannnnnnnnnnnnnnnnnnnnnngaatgttcagagacgatgtgtcatggaaccttcaaacaagtctcttgttcggatgataataggtagtgtccttttagtatgctggttgatctttcatagtgttagtgttttgttacttaaaaaggaaatcagctataaataaaatgtatttttgtaattcccgtgtgtatatatggtatatttctatcaatggccagttgttgtagtccaaaacctaaatcagttnnnnnnnnnnnnnnnnnagtgtgagattttattnnnnnnnnnnnnnnnnnnnnnnnnnnnnnnncataggcattcaatgcacttgaatgaacaaagagccaaagaaactcagccttttcatgcaaatggtatgagtctgataaaatcagctacattgtcctgctttatcaataatatttcattagtgcaatgatatcaacnnngtactttgtctatttggtaaatgcctggaaatactgtatgtgaaaatgacgtttc

SEQ ID NO: 7012 - DNA, 1986 bp, Macaca Fascicularis
tcctccacagagggtgagccagggcggagaagagccagcccagtgacccaaacatccccgataaaacacccactgcttaagaggcaggctcggatggactatagctttgataccacagccgaagacccttgggttaggatttccgactgcatcaaaaacctatttagccccatcatgagtgagaaccctggccacatgcctctacagcccaatgccagcctgagtgaagaagatgggacacagggccacccagatgggaacccaccaaagctggacaccgccaatggcactcccaaagtttacaagtcagcagacaggagcactgtgaagaagggtcctcctgtggctcccaagccagcctggtttcgccaaagcttgaaaggtttgaggaatcgtgcttcagacccaagagggctccctgatcctgccttgtccacccagccagcacctgcttccagggagcacctgggaccacacatccgggcctcctcctcctcctccatcaagcagagaatcagctcctttgaaacctttggctcctctcaactgcctgacaaaggagcccagagactgagcctccagccctcctctggggaggcagcaaaacctcttgggaagcatgagggaggacggttttctggactcttggggcgaggggctgcacccactcttgtgccccagcagcctgagcaagtgctgccctcggggtcccctgcagccacggaggccagagacccaggtgtgtctgagtcccctcccccagggctgcagcccaatcagaaaactctccccactggctcggacccgcttctaaggctgctgccaacacagactgagaaatctcaaggtccagtgctcaagatgccaagccagcgagcacggagcttccccctgaccaggtcccagtcctgtgagacgaagttacttgatgaaaagaccagcaaactctactctatcagcagccaagtgtcatcggctgtcatgaaatccttgctgtgccttccgtcttctctctcctgtgcccagactccctgcatccccaaggaaggggcatctccaacatcatcatccaatgaagactcagctgcaaatggttctgctgaaacgtctgcctcagacacggggttctcgctcaacctttcagagctgagagaatatacagagggtctcacggaagccaaggaagatgatgatggggaccacagttcccatcagtctggtcagtctgttatctccctgctgagctcagaagaattaaaacaactcatcgaggaggtgaaggttctggatgaagcaacattaaagcaattagacagcatccatgtcaccatcttacacaaggaggaaggtgctggtcttgggttcagcttggcaggaggagcagatctagaaaacaaggtgattacggttcacaaagtgtttccaaatgggctggcctcccaggaagggactattcagaagggcaatgaggttctttccatcaatggcaagtctctcaaggggaccacgcacaatgatgccctggccattctccgccaagctcgagagcccaggcaagctgtgattgtcacaaggaagctgactgcagagtccatgcccgacctcaactccaccactgactctgcagcctcagcctctgcagccagtgatgtttctgtagaatcctcagcagaggccacagtctacacagtgacactggagaagatgtctgcagggctgggcttcagcctggaaggagggaagggctccctgcatggagacaagcctctcaccattaacaggattttcaaaggagcagcctcagaacaaagtgagacaatccagcctggagatgaaatcttgcagctggctggcactgccatgcagggcctcacacggtttgaagcctggaacatcatcaaggccctgcctgatggacctgtcacgactgtaattaggaggaaaagcctccagcccaaggaaaccacagctgctgcagactcctag

SEQ ID NO: 7013 - DNA, 677 bp, Macaca Fascicularis
  misc_feature (1)...(677): n = A,T,C or G
tcaccctgcaggaggtggatgccagtgtggtgcgtgagannngctccaagtacannnatgaccagtgcccagcggtggctggatatggtaagtggcctaggggatnngctctttgtttatttcctcaggccattnncttggcctcgccttccacctttgctccccaactggtgctcagcttacagagcagccagttaaggccccaagcagctctcccaagtcccctggctgccagggagttcttgctcagaaaacctgtcccggcagttccttgactgcctgccagggtgcctccatcaataccctgcacccgtcaggtaacgggcacctccatgtggggtggggcttcaagggccagaacatgaagggacaggctcagcacccctgggggaatgttctcttccctctttccactcaaagcctgtcttgtgctgctctaggcagcagctccgaactgggtgcggcgcagggccaggtgtccctgtgcaggccaggtaccccaccctgacgctccaccctatccccacaggccccattgagcagctcccagactacaaccggatccgtagcggcatgttctggctgcgcttctaggcgggaagcctgtgtaaacaagagagctgggctggggctcgtggtccccccaccacaaacacagcactccggctcctctaacc

SEQ ID NO: 7014 - DNA, 757 bp, Macaca Fascicularis
  misc_feature (1)...(757): n = A,T,C or G
catagccactcatgttnnncctagaccttacagtagannncttgtactcactcactattggagnnnnnnnnnnnnnnnnnnnnnnnnnnnnnnncagcattttttttatatgagtacttgttggttattttggaattttcaggacattgagatattcctctacttccttctgcacagatgctgataattcatgtggtcttgtagttgtcagtggcttcttcctacccacttgtattttgggnnnnnnnnnnnnnnnnnatcacctggttttactgtagctgttgtaaacaggttttggtttgaccttcctagttagttgctctgtatgtttttatggagagagttgagaaaattcgtaaattacaccaatgccggtaccatctttcaagaatcctcataattatgtttcttaatcttgacattgacattttttcccctttcctcactagatactataaggttagttatatgttagataatttattaaactaaaatacaataagttagataggtatagatgtacagctagatatatatatactgtgtactaaaactaaagtgtctctctaaatcttgatatcatatattttgatacataatcaattccctaattttggaaatatggctattttgttaaaaacttcccctgtcagggtgaagatatctaatgaatgttaatagttcctgtattgtgtgtttgtatatacacacacacattttctctctctctctctcagcttttgtacccaaagggtgg

SEQ ID NO: 7015 - DNA, 2125 bp, Macaca Fascicularis
agctttcagatccgcctgccttctgtcccagcctaatactgcccggcctcagcccccattgtccctggcgctggcgaggtgtccggttgcggagccggctgcgtctctggaaatgcatcctgcaaccccgcatggataacagctgcagctatgtcagagatgcacaaagaggggagagcgtcactgtgtgccttttgacacatacgttaagaccaaaaaggaaaaaaaagtctatctgtgctgccaccgaccagactcatggaggccagattttctccaattaaccagatcttgccttggtgcagacaagacttagccatcagcatcagcaaagccatcaacacccaggaggcccccgtgaaggagaagcacgcccggcgcattattctgggcacacaccacgagaagggggctttcaccttctggtcctatgccatcgggctgccgctacccagcagctccattctcagctggaagttctgccatgttctccacaaggtccttcgagacgggcaccccaatgtgctgcatgactgccagcggtaccgcagcaacatccgggagatcggagacctgtggggacatttgcatgaccggtacggacagctggtgaatgtctacaccaagctgctgctgaccaagatctccttccacctcaagcatccccagtttcccgcaggcctggaagtgacagacgaggtattggagaaggcagctgggaccgatgtcaacaacatcttccagctcaccgtggagatgtttgattacatggattgtgagctgaagctttctgaatcagttttccgacagctcaacacagccattgccgtatcccagatgtccacaggccagtgccgcctggccccgctcatccaggttatccaggactgcagccacctctaccactacacggtcaagctcctgttcaagctacactcttgtctccctgcagacaccctgcaaggccacagggaccggttccatgagcagtttcacagcctcagaaacttcttccgcagagcctctgacatgctgtacttcaaacggctcatccagatcccccggctgcccgagggaccgcctaacttcctgcgggcctcagccctggctgagcacatcaagccggtggtggtgatccccgaggaggccccggaggacgaggagccggagaatctcattgagatcagcatggggccccccgtgggggagccagtggtggtggccgacctcttcgatcagacgttcggaccccccaatggctccgtgaaggacgacagggacctccggattgagagcttgaagagagaggtggaaatgctccgctctgagctggagaagatcaagctggaggtgccgggggtggggatgggcgggggccgggcccctcaaaagcccaggcaggggccccacatcagccatcctcccgcaggcccagcggtacatctcgcagctgaagagccaggtgaacgcactggagggcgagctggaggagcagcggaagcagaagcagaaggccctggtggacaatgagcagctccgccacgagctggcccagctgagggctgcccagctggagggcgagcggagccagggcctgcgtgaggaggctgagaggaaggccagtgccacggaggcgcgctacaacaagctgaaggaaaagcacagtgagctcgtccatgtgcacgcagagctgctcaggaagaacgcagacacagccaagcagctgacggtcacgcagcaaagccaggaggaggtggcacgggtgaaggagcagctggccttccaggtggagcaggtgaaacgggagtcagagttgaagctggaggagcagagcgaccagctagagaagctcaagagggagctggaggccaaggccggagagctggcccacgtgcaggaggccctgagccacacacagcagagcaagtcggagctgagctcacggctggacacgctgagtgcggagaaggatgcgctgagtggagctgtgcggcagcgggaggcagacctgctggcagcgcagaccctggtgcgcgagacagaggcggcgctgaaccgggagcagcagctatcaagggttcgtttgtaaaaaaaaaaaaaaaaaaaaaaaaaaaaaaaaaaaaaa

SEQ ID NO: 7016 - DNA, 676 bp, Macaca Fascicularis
ggcatgtactgatgggttgcccgcagggtctgcaggtgagggggagcccatagggtgggcagcgccttctcctggcttccccacagtcccccgcagtgtcccgtctgactgttgacctgcatgcagtcgggcacacttcacactacaaggctacccctgggcccatccctgccccttccacggcccccacctgtggtcaggggttgccaccccctcaggacttggtctcgaggcagccccactcgagtcttctggaatctgaggcacgccactggcccaaaagggagggggtgtttgagggggctctgactgtctccagaccttaggggagctgggcaggctgtagccagtggccctccagagagcagcgttgaccacctggacgcctgcgccaagtgacaggagaccctggtcctgcaggcctggtctcgcccagctgggcggcctcgggtgtcagaaaggggggtgggtgtccctggctcccaggccaggcagctgctgacccccagttccctgcacttgctcatgaggactccacacccgcaggccctcccgggtcctgaccagcctctggtgcagcatctgctttggcctgtgggccccctcgctccccacccacgcaggccccttcctccggtgctcacctggggcctccatcccagaagcgcagggctta

SEQ ID NO: 7017 - DNA, 728 bp, Macaca Fascicularis
  misc_feature (1)...(728): n = A,T,C or G
aagcataagaccatatggaaaaagannnaagacaannnctggtgggaattgaattccagtttttaatagagttataatccatagttttagttacacacacacatagtctttcctgcagagataagcccttcagtgcggctgtggcttggccaggatttgtttgatctttgtttttcctgcagggccagtcttgtctttgtgtccctgaggactggtctgtttagttgtgcctgcctggaatcaaaaggtttagtcaggctccataannnnnnnnnnnnnnnnnactacatgcaaaccacaatgcccctnnnnnnnnnnnnnnnnnnnnnnnnnnnnnnnnnnnnnnnnnncagctctctgcaatgagacttaaattcagattcactctactcattagttatctgatttttggaaacttaatctctttaaacctgtttcatctctaaannnnnnnnnnnnnnnnnnnnnnnnnnnnnnngggaggattcaatgaattaatgtgagtgaggacactaggattcccgtatagaaataggctcaatgaatagtagctgttcttatttctatgtaaagtgagtagcggtagttgatgggagctgttgaaacaggtaaacatacagcattctagcaatcctannnnnnnnnnnntagcaaccataaaaacaattttagtgactgttttattaaagcacatccacaattcaatgtanncaaaaaagaaattaaac

SEQ ID NO: 7018 - DNA, 103 bp, Macaca Fascicularis
ttgcgttttgtggcaacacatttatagagtgtgtgagatcccttttttatataaagagatcaaagcacaatatttgcacacaggtgaccctgtgtgggggggt

SEQ ID NO: 7019 - DNA, 723 bp, Macaca Fascicularis
  misc_feature (1)...(723): n = A,T,C or G
cagagatnnngacatacaggnnnnnngccacagccagccaggggggttacactagggctccccacnnnnnntctggacagcgccctgggctggggtgggtgtcactcctctgggcagttcctgattcctcattggtcaaatgttcagccacacgctcaggccctggggtgcctgacccagttccaagtgtgtgctggcagggactctaagggccaacactgaacacaccctgggatgaggctgagggtgtggcttctgagccagggccctgaggctggcagaggggacagtccccgaggaacctgagagctctgcaaaggcacacaccctcaggccatgggactggggtcactgacctcacagttctttagctccaaggctgggcatggcatccaggtctggctgcagcaccagaatcctctggccacagcaattgtcacaggtgcatgcgggtcagtggtggccctccaggatcttcccttgagttgagcaggcagaggtgcagtttcccattcctggcctggctaagctggtgatacacctggacctcctgggagctgtttcctagctgtcagggagagttggcctccgagggagaggctatggggcctgtgacaccgttaagtctgtttctgtagatgtgtggttggggtctagtatatccctttagcctcctcnnnnnnnnnnnnnnnnnnnnnnnnntcttaccacctggaatccagg

SEQ ID NO: 7020 - DNA, 707 bp, Macaca Fascicularis
atatttgtcatatcaaactacaaaatgtacaaagttaagtttagcccttttctagaaagtgatctttaaaattgaaaatgctcttcttttaaattaaccaaatttatatgtgtgggaaggcaccaaaatgattttgtaagtgccactgcaatattccctttcaagtgtggcctaaatttcaatcttaaggatggaatgcatgttctgctcctggttctgaaaaatgtgggcatctactacgttttaaaacacagtgaaacatatacataagcctataaaaaagatttgtgcaatttgaaagcctgttaattttttatgtaaacatacctacacacgaaagggttaaattcacagccttactagttccttgcttccagtatttaaattggtctcctcccctcattattattactactactactactattatttttgcacatagttaactgcccttcaatatgattcttaaaaagtgctgtttctgtggtattgtattctctaaataatcatatttaattttttaaaacaaggttgcagtttctaattgttttgttcctgtatttttgctggtgtgtaataaaagcaagttttttcttttcatggttatttaatacattagctgcctgtaaataattcttgttataatgctctggaatgtgttgtagaagttgtattagattagttttaaacccttgttgaaagccaca

SEQ ID NO: 7021 - DNA, 705 bp, Macaca Fascicularis
  misc_feature (1)...(705): n = A,T,C or G
tgggtgtagcatcaagatgcccgacagaggaacnnnttctttctaaccttgtttggattgaggtgaaaagtccatcttgctgatttgatgattgaaatgtgaaagtgaagtggaaggaatgagtgaagtgctttttttttttttcttttttgaggaattatcagggaagtgaggaaattttgggagaggactttctaagctctatttagttgttagatctaattatagattctgtagtctggtgaaggtgtgggtgacgtgatgagaggtttgagaaatgggtgaaatgaaatgggggatgtgtaggtcaaatcaaattaaagatttttttaatgtgaataaagttatgttctgatannnnnnnnnnnnnnnnnaaaatggatgcccatgttttattgctattactaaatgtcaagattgtatgctattatgtcttgtaaatttctttgttggtgtaaatatggaaatgccacattggttaagtgccatcatttgtaatgcagtgtgtcacttgagaagagatttgaagaaactgacaacttcaaaaacaaatgggaagcccaaggaactgtgagcaattaaaaacaaactgcgatgccctttgtccccaccanntgtagtgtnntttggaagcacaacgtccaggctggtaccgcagcgccatgcccattcctcgcctcgttcataggacacttcactgccctt

SEQ ID NO: 7022 - DNA, 686 bp, Macaca Fascicularis
  misc_feature (1)...(686): n = A,T,C or G
tagaaacctgaactctataaatgttgcctctctccactcatcttctctttggcttcaggttgagttcagccaacagatgcccctgtaggatttggacacagcgagccaggggagaggggcgtcagctgcctggttagcagggctgtgatgattcttctacccgtgaccctcactgctgtggacagcccgttgcctcttcctctggattttggaagcttccatgccgaggcctgaaggtggctccctgcctcccactgatgtccctagaatcccatcctcacctaatacctgggattgaacactgcctttcttagatgtcatttagtctctcatttnnnnnnnnnnnnnnnnnnnnncaaagaccttgatagatggactcaggggaatagtgcaaggtcctcccatccccagtattgggatctgggggtaggggtcccaggttaggactacgcttctatcatcaaagccacagagggaagaggtgacgatgaaacacactagaactgacttagaaaacacactggtcaaatcttagctattcgaggaatgtaggaagaagcgcttccttctctctgtaggtctgaaggttcccacggctgtctctttgcccaaggggcaaactttccatctgggcatcttctgtgcatctgaggatcatttgccaattataggcaatggtagtacgt

SEQ ID NO: 7023 - DNA, 703 bp, Macaca Fascicularis
  misc_feature (1)...(703): n = A,T,C or G
gccnnntatnngaggtcannnnnnnnnnnnnnnnnnnctgggccgcccgtggtctctgtgtcctgtctgtgggtgccaacctcaccaccttngatggggcccgtggtgccacgacctctcctggtgtctatgagctctcttccnnnnnnnnnnnnnnnnnnnnnnnnnnnnnnnnnnnnnnnnnnnnnnnnnnnnnnnnnnnnnnnnnnnnnnnnnnnnnnnnnnnnnnnnnnnnnnnnnnnnnnnnnnnnnnnnnnnnnnnnnnnnnnnnnccaaacaagggtgtgtgggtgaatggtctccgagtggatcnnnnnnnnnnnnnnntagcatctgtgtccgtgagtcgtacacctgatggctccctgctagtccgtcagaagnnnnnnnnnnnnnnnnnnnnnnnnnnnnnnnnnnnnnnnnnnnnnnnnnnnnnnnnngacnnnnnnnggaaactgtgtggggcctgtggaannnnnnnnggnnnnnnnnnnnnnnnnnnnnnnnnnnnnnnnnnnnnnnnnnnnnnnnnnnnnnnnnnnnnnnnnnnnnnnnnnnnnnnnnnnnnnnnnnnnnnnnnnnnnnnnnnnnnnnnnnnnnnnnnnnnnnacctgaccctcctggaggttgctgggtctgaaggatnnnnnnnntgctcctaccctgctctaccagtcttctgggtcgcagaggccaaatgtga

SEQ ID NO: 7024 - DNA, 739 bp, Macaca Fascicularis
  misc_feature (1)...(739): n = A,T,C or G
tgcccagtgggctctgtgaagacaacagaaacaggctgtccccgtggatcactggaccgtcagcttagggannncagacccgggagcacacttctccaacttcacttagaatttttgctatatccatatgtcacctgagaagttagtactttttcctttaaatctacttaatttttagaacttttaaatatgcagaaaaattgagcagatcgatggttacgacagagttcccatactacccttgccacccccaggtttccatgttattaacatcttatgctatcagtgtacatttgtaaaaattcataaactagtactggtacattactaactaaagtccatggtttattcagatttctttctttttgaaatgggannnnnnnnnnnnnnnnnnnnnnnnnnnnnnnnnnnnnnnnnnnnnnnnnnnnnnnnnnnnnnnnnnnnnnnnnnnnnnnnnnnnnnnnnnnnnnnnnnnnnnnnnnnnnnnnnnnnnnnnnnnnnnnnnnnnnnnnnnnnnnnnnnnnnnnnnnnnnnnnnnnnnnnnnnnnnnnnnnnnnnnnnnnnnnnnnnnnnnnnnnnnnnnnnnnnnnnnnnnnnnnnnnnnnnnnnnnnnnnnnnnnnnnnnnnnnnnnnnnnnnnnnnnntgtgcctggccttagatttctttagtttgttacctaatgtcctttttccattccaggatcccattctacaacatgtctttttttcacacactgaa

SEQ ID NO: 7025 - DNA, 414 bp, Macaca Fascicularis
tttcaggagcctcacagacatatatccaggtaaaaagatcgttaaataaacgccttcagtcatctcaatgcaaaaataaatatcaatcctccagacgcagcagcagcagcagctgcgctgcgccccaagtcccaacggccacgcctaacaattataaaagtgttcagcgagagtgttggcgtgagtgtgaacgggtgtgcgctgggggtcacggtggagcggtgtgcaaaatcgaagttgcaaaccttggaacaagggcatggagcggcaacccgggcggccctggcgactcgcggctaactcagcgccggcgcgcctccccgcgcacactggcagcatagttcggactgggaagagttaatttataaacatttacaagggcaaggaaagcggtcctggtcccggggtcccggg

SEQ ID NO: 7026 - DNA, 248 bp, Macaca Fascicularis
aataacggtttgaggacctccaaaggtgaaaataataatccttttggccatttattgagagagagagtgagagacacagtagggtgacggtagttaatgtattgaatgttcttgttacaaataaatgataaaggtttgagttgatgggtatgctaattgcaatgatttggttgatactcattgtatgtgaaagtcatacaccataaatatttacaattacgtatcagtttaacattttaaaaaacatt

SEQ ID NO: 7027 - DNA, 708 bp, Macaca Fascicularis
  misc_feature (1)...(708): n = A,T,C or G
tccctccttcctcnnncctnnntctccctttgctctcctctctcctctctcaatcttgttctttctgtgtctctcctcaaaccaaagtgttgcagtgaaggacacgagccattgaaatcagggtggggcctgacagccacagtgtggcccccgcccctcgctgggcaggagcagagagaggggagagccctgagaccacagggctttggcctgggcagcttccacgttctgccggacactttgaggagaggcagatggagccccaggcctcagcgttctcttttttcttgtctcccttctcccacccgggaaatgaaactgttgggctgggccacggaggcagcagagactcggccattgcaggggcctccgggtgccttgtccgggcagtggtggagtagccgcccctcccacccctggcacgatggggcctggcaccttgttgacccatcctcgccggaatgtaagcatctccgctgaatgactccctgcccttaccctacctctgagtttgtccatgtttatttcctgaagagagaagggactggcaagagggcctgggccccagcccaagggtggagagggggccaagggctcctgaccaaataggaaggacatttgagcagagcaaaatgaaaggaattacaaccaaaaaccccctccgagaagacaggcagcatggaaggcatggnnagatactcaacaaga

SEQ ID NO: 7028 - DNA, 953 bp, Macaca Fascicularis
aagagagagatcccaggacaaatgtgcagcaggcccctgagcatgtgtagaaatgtcatcagttccacatggaaagacttggaggaaatcaaagaagacagtaaaagtcacaagatcctatccaaccttcccttccctgaatgcctgggaagaattcaggggcctctttcctgtggatcaagagcctcccagcccagcgagagtctcattcaactaatggccaagggggagagtgaagccctctctcagatttttgccgacttacaccagcagaacctgtttcctaactccgtggtgtttgaaagcaacttcgtccaggtcaaaaggggcaggaattggagagacatctacaaagcctcctacactatggccctgggggtgacctcctcagtgccctgcctgcccctccccaacatcctactcatggccagtgtcaaatggcaccaggggcagagccagacatggaacagaccatccacagcccccaacatcttcctgaagaggattctcccattgaagtttgtggagctccaggtatgtgaccaccatcaacgcatcctgcagttgagaacagtcaccgagaagatttattacctaaagctccaccctgaccatcctgagactgtcttccacttctggatccgactggttcaaattctgcaaaaggggctgtccatcaccaccaaagatcctaggattcttgtcactcactgcctggtacccaagaactgctgcagcccctcaggagattcaaagttagtacagaagaaactccaagcagatgacagacacaaagagaagcagtaacaagaaacggaagagacttggcagacgagataaggaggacaagagaagggacacacccctgagagatgctcaccaagcttctatttatctaatttaaaacttgaaagtaaagccataaacaaacaaacaaaaaaaaaaaaaaaaaa

SEQ ID NO: 7029 - DNA, 693 bp, Macaca Fascicularis
  misc_feature (1)...(693): n = A,T,C or G
acagaaatctttcgttttcatatagtttttggatttcaaaaaatggataagagactgtaatctgttttctgcgtttgcactcttcatactgtgatggaaataagagtggttatgttacaacagaacttcagtctaacagtttctcatcttttaatactatttatggtaaatacatatatataacttacttgcaatttaaattacaaaattcatatacaaagtaagcaaaaaggcacacataagaaattcaccttgaccacagaaatgtgaaaacaccagccctaatgaccaagacaatgtttcaaaggcaacaccaagaaaagttgagattctacaataaatcatattaaatgcaagtactatgatgcgcagacnnnnnnnnnnnnnnntttctaaagcataaaacaggaaaaaccattttatggggaatctattcacatattccaaacagcattttnnnnnnnnnnnnnnttagcttcgttttaaaaacaaaattcagacccaaacaatcaggaaccagaaaatgggtttcttaccttttgtttccagtaggatgtgggctgaacagcaaggtgggttattcaatctgatgttatgaaaaataattgcttcttaaagagacttaagtttttccttggttagaaaataattataggctccctaannnnnnnnnnnnnnacataaatagggaga

SEQ ID NO: 7030 - DNA, 786 bp, Macaca Fascicularis
  misc_feature (1)...(786): n = A,T,C or G
ttttgaagcaagnnnnnncacacgtgccagttccaggatnnnnnnnnnnnnnnnnacnaagtcttccttcaaagttgattttgggaaaatcatgtatcctatcttttcaaaggagaaatactgtacaataatacgaagtcttatattttaaataatttttctcaactaatttatttcacttaaaattgagagaacaaggaaacccacatacctagctagaatatatgattgactattcaataccatactgaagagtttgatagtattaaaataagtcattttgttttttaaatatggaggcatgggttcatcttaattctataattcccttccagattattaactcttcatacttacagcaatgaatctgacaatgtttttcaaaaatgtatgatcagggttatttgtttcaagtcataggtcagaacttctgactatgtttattatatctaaaagagttggttgctgttttccttatgaacagtcagtattttaaaagctcaaagtagaagaggagtcactaagccctaacagcttgtccaaagatttaaattcttatttcaaatttgatttgtgctttaagatttagggctattttatattcagaattctgaatagatgattactttgaaattgtagtatcatgaaattgaaataaaatacatctaggctgctagccaaagtgtcatcattacaagcccatgaatgttaaaatgtacaggtgggattgtgaagatttactgacatcaaaagttcttctggaaaaaaaccttgtaaaaaaaaaaa

SEQ ID NO: 7031 - DNA, 760 bp, Macaca Fascicularis
  misc_feature (1)...(760): n = A,T,C or G
ctttctctttnnntattctttcatatggaaagagctagtacaatcacatatttgaaaggagaaacaataggtactgaaccggagggaaagggcgagggtttgagtgtgccagcaccggcctggtgaatccacgattccatttcccatccaaggtaagtttcccgaaataacgtctaaacaagctgcacttacacctctagccatcnnnnnnnnnnnnnnnnnnnnngtctacatggaaagacaaagaggaaaggccaaaacataaacaaaaggaaacaaaacaaaaaacacagccctctcaggaaccaaacaaaaacccccaaatcctttttttactacacaaggcatgaggtcaaaagcttaagagtacagtgtcccctttagatcatgggagaaaggcgtccacacagagcnnnnnnnnnnnnttccactccgaggctccggaacatgctgaagatgggggctctgggggtgccactaccatcctggaggccaccaactggggtagagacagtgaagagcaggtctcacgtgcccgannnnnnnnnnnnnnnnatacactggtggccctggtggagcatggcagggcaacagcgtccatctccaacaccaagccactcctgtcctggatgacttcctgcttaggtccgtcacatttcagaagagagctggctttctggaagcctgtttcccattcatcacagaatatgacagagcacacacactctggtatccttggtcttcaaaggccatttccagc

SEQ ID NO: 7032 - DNA, 627 bp, Macaca Fascicularis
  misc_feature (1)...(627): n = A,T,C or G
ataataagcgcaagatggctgaaggtggctgtgatgagagtgttggggttgggattttttcttcctcttttttctttttnnnnnnnnnnnnnnnnnnnnnnnnnnnnnnnnnnnnnggagaccttgtccgaagcgccctcccctctcttgagaagcagcgggcagacagacggacctcggaccgagcaacgggcgcgggcccgccccggacgcgtcgcctgggcagcagccggggaccgcgggcgcttgcctttctgccgacttcttccaattctcatcttttttttattttttggacaggaccggggtgggtggagcagaggtggagagaaatcgggacttcgcgttttctcccctctctcctaatttgttggaggccgccagccctccccgtggaaaaagaaaatctcaccaaaaaaaaaaataaagaaaaaggagctagaggacgccgcgggcccctcaacgagtgcgcccagaccccggctgccgccgcggagcccaagatggctgggcactgagggaggtggctcggcctggccccgccgccnnaggctggctccaaccgcagcccggagccttccaggcccgagcagaggccgagaannnnnnnaaagtnnnnnaggtaaa

SEQ ID NO: 7033 - DNA, 705 bp, Macaca Fascicularis
gcagcacccagagctgatccttcacctgtcaggactagcctcattttaagaggttggcttggtagtttctcttgttaatttgcatgtcattcataccacagctttctgccagaccagtacataggacagagaagaatactagtttaaaaataaattaagggggtatattttttccttaactttttattatttggatccttatagcaattagatgcctctttatccttgaattcaaatgttctctctctctggttttatctacagtaacgatggttatgattagtagcaatataaaatgcctgtgatttattgaagttgatgtttaataaaagggtgatgaaaggaaaaagaatcctgattttgtgataaaaccaccaaaactcaatgcccagctaaggtaaatcccatgttcagcatgaacttgatacagaaaatcacaaaaaagaggggcaaaacttttatgtcgggcagtgttctctggttgcgatgtttaaaattttcatattttgaatgaaactcaactggtttttctacattatgtttgaataagcaatgtgtctgaagttctcattttgcatacaaaggaagattgagaaatgaataaaaattaatggttcaagttgtaaaatgttatcttctaggaaaaaaacgagagatatgacacagattttatagatactcttgcccgaggaggttgcaaacaaa

SEQ ID NO: 7034 - DNA, 766 bp, Macaca Fascicularis
  misc_feature (1)...(766): n = A,T,C or G
cccagcaaaaaattctgatggaaatgaggagtaannnnnnnnnnnnaatctttgnnnngataatatgnnnnnnnnnnnnnnnnnnnnnnnnnnnnnnnnnnnnnnnnnnnnnnnnnnnnnnnnnnnnnnnnnnnnnnnnnnnnnnnnnnnnnntatggttgaaaatgaatataaggctgtgaacaattcaaattatggttggagagccctgagactattagcacggagaagccctcactnnnnnnnnnnnnnnnnnnnnnnnnnnnnnnnnnnnnnnnnnnnnnnnnnnnnnnnnnnnnnnnnnnnnnnnnaggaattaccgcctccttctgaagaaataaaaacaggtgaggatgaagatgaggaagataatgatgctttactgaaggaaaatgaaagtcctgatgttcggcgagacaaacctgtaacaggagaacaaatagaggtatttgccaacaagctgggtgaacaatggaagattctggctccctacttggaaatgnnnnnnnnnnnnnnnnnnnnnnnnnagtgtgacagtgaagacatgaagatgagagcnnnnnnnnnnnnnnnnnnnnnnnnnnnnnnnnnnnnnnnnnnnnnnnnnnctgagaatctgatnnnnnnnnnnnnnnnnnnnnnnnnnnnnnnnnnnnnnnnaagtctaactaatgacaatgagacaaatagttagcttcttttttttctttttattaaaactgtgatagattttgttnnnnnnnnnnnnnnnataagaggtccactg

SEQ ID NO: 7035 - DNA, 1859 bp, Macaca Fascicularis
  misc_feature (1)...(1859): n = A,T,C or G
atttacgttgttcaaataggtaattgctaaacttcagtagccgcttctgtcttgatttgaattaatgtgcttatacgttttagcattttagtgcagctaccttctgtgttctgatggcctaggtgatatagtacacacataaccaagggtgtgaaactgccacgaacccggtgttgagttgttgagttagtccctccttagaattgctccagggagaatgtgttcttccttaagaaaagagtaagctatgaactaaaactcaaaataacactggaatcatagcaaaatgcatttcagtctcataaaaccttgaaacaagatgatatgcattatttgaatgactttaggttaactagacattctttcttgcaggaaatgacttttgtttagaaacattggctgcttttaaagtatataagttttggccgggcgtgnnnnnnnnnnnnnnnnnnnnnnnnnnnnnnnnnnnnnnnnnnnnnnnnnnnnnnnnnnnnnnnnnnnnnnnnnnnnnnnnnnnnnnnnnnnnnnnnnnnnnnnnnnnnnnnnnnnnnnnnnnnnnnnnnnnnnnnnnnnnnnnnnnnnnnnnnnnnnnnnnnnnnnnnnnnnnnnnnnnnnnnnnnnnnnnnnnnnnnnnnnnnnnnnnnnnnnnnnnnnnnnnnnnnnnnnnnnnnnnnnnnnnnnnnnnnnnnnnnnnnnnnnnngtctcaaacaaacaaaaaagtacctatgttttatataacctgccatgagaaaactgatcagataacagattttgtgtaccaattttatggcagcatttggacagcagtatttacaaaagcctgtttcaagaattgccaaaacaaagatggcaatttattttttaggagttttgggtaggttttccttttttttttttgaggtggagtcttgctctgttgcccaggctggaatgcnnnnnnnnnnnnnnnnnnnnnnnnnnnnnnnnnnnnnnnnnnnnnnnnnnnntctaccttgagcccaggagtttgagattagcctgggcaaaatgatgagacctttccccccatctctataaaaaaattaacaattggctagatgtggtggtgtgcacctatagtccccagctgcttgggaggcagagggaagaggatcacctgagcccaggagtttgaggctatagtgagttgggattgtgacaccggccttcagcctgggcaacagagcaagacactgtctctaaaacaaatgaacaaaaaatgataatcatagccctgggtaggaatttccttgacattttcatccataaatagggttggtatctgagctgcttagttgttggtcagtgagaatgggatgcacattcactcttgaaggtatgagaaaagtttacagttacctgttgataatgttgattatctttattttattttatatggtcttatgaatctcatagtttttttagaagttgaattagtgctgcaagtattcagaatgaaacattaatcccatgtggaaaagtgaatgcagcagtgcttttaattagcactgagctcaggccaggcgcgnnnnnnnnnnnnnnnnnnnnnnnnnnnnnnnnnnnnnnnnnnnnnnnnnnnnnnnnnnnnnnnnnnnnnnnnnnnnnnnnnnnnnnnnnnnnnnnnnnnnnnnnnnnnnnnnnnnnnnnnnnnnnnnnnnnnnnnnnnnnnnnnnnnnnnnnnnnnnnnnnnnnnnnnnnnnnnnnnnnnnnnnnnnnnnnnnnnnnnnnnnnnnnnnnnnnnnnnnnnnnnnnnnnnnnnnnnnnnnnnnnnnnnnnnnnnnnnnnnnnnnnnnnnnnnnnncaaaaaaaaaaaaaaaaaaaaaaaaaaaaaaaaaaaaaa

SEQ ID NO: 7036 - DNA, 669 bp, Macaca Fascicularis
ctgcctttctgagggaatataagcattcatgttcgtaggatatgtaaagatatacataaaatgtctagttctcaaacaattccacttacctataaaagttttggttgcttatgtgtagatagatagatagaaattgttaggaaaggaggaaagaagaaaggaaatattggaatccagctttaaaaattatatcaagattttgcaggccctttctgtgtaccagctccttttgtagtttaattgtaacacaaatccaatgctgcaatagtaaaacaaatcagatactaaagttaagaatgaaaaagaagttgtaacaacttggatagggattaattttacttcttttaaaatacttatatacttttattgtcaaccatttatgttatcaatatgttttaaatttcttttaatttttaaagcaatatattttaaatgcagcttatagtgtccagttgatcctagaaactgttcgtgtttatttttcaaatgccatactagatttctgtttctttttaatagagcgaaaatattgaagaaaaatttaatgcggtgtttcttaaaagattgagattattcagttcagttgtaattctccagtgctctaaagaacctcagactttcatcagcagctttgcaagtcatccccaggagcttcttttggtagtgata

SEQ ID NO: 7037 - DNA, 669 bp, Macaca Fascicularis
  misc_feature (1)...(669): n = A,T,C or G
tcacagaataacattgatgttttgaacttgactttttaatggttggctttgttcgtcactaaatttttgttttgtttttccttctagtttcagaaaatnnnnnnnnnnnnnnnnnnnnnnnnnnnnctcgactccttccctgtcccagtttctactcnnnnnnnnnnnnnnnnttccaacgacaacctgggagtcccagccgctgagcagcggcaggagtcttttgagggattcattgctagaatgtgttctcctttaccagatgcgactnnnnnnnnnnnnnnnnnnnnaaaagaagnnnnnnnnnnnnnnnnnnnnnnnnnnnnntcagagaaaaagaccaaaacaggtgaatataccaaaaaacactctggtaagaaacaccctggaaaggacctgcattcctgctctgactctcctgaaaaccggaaaagcaaaggaactggggaaactagttctttggttaatgaatcaattaaaagtaggtctttgaaaaaatctgtttctgtcaagaaagaaaatagaatagtgactgtttcatccaagacaaataaaagtaaatccagtccactagaacattctgaaagtgatactcttggatctgattttgaatttcaagaaagcatccattctctatcacgcctttcatacgactaaatatttgaaatt

SEQ ID NO: 7038 - DNA, 755 bp, Macaca Fascicularis
  misc_feature (1)...(755): n = A,T,C or G
tgtgaaccannnnnnnnnnnnnnnnnnnnaatgtttcacagggcagatatgcagatgggatgttataatctaaaagataattcaaaagtagtcttcttctgtcaataatcttccaaattctgtattcttgaagagagacatcttatgtctctgannnnnnnnnnnnnnnnnnnnnnnnnntgatatattggaacagttaatatattgattgagaagcnnnnnnnnnnnnnnnnnnnnnnnggannnnnnnnnnnnnnnnagctggccagctcctatagtactcgtgcagtggattatttcagaattcttctgtggtgtannnnnnnnnnnnnnnnnnnnnnnnnnnnnnnnnnnatcatgtaatagtactatgtcctccctcccaatcccaaactaaatctagacacaatatacnnnnnnnnnnagaggattagaaaaaaaggtggagttgacaagnnnnnnnnnnnnnnnnnnnnnnnnnntggcnnnnnnnnnnnnnnnnnnnnnnnnnnnnnnnnnnnnngggaggatcatttgagcccaggagtttgagaccagcctgnnnnnnnnnncgaaactccatctctactaaaaatacannnnnnnnnnnnnnnnnnnnnnnnnnnnnnnnnnnnnnnnnnnnnnnnnnnnnnnnnnntggaaaggtaacttaagcctgggaggcagaggnnnnnnnnnnnnnagattgtgccactgtactccagcgtgggcnnnnnnnnnnnnccctttctcaa

SEQ ID NO: 7039 - DNA, 2144 bp, Macaca Fascicularis
attaatcctcaagacaagtctatgcagtaaggtgtagttgctgtctcttttttacgagtgagctaactgaggcacagagaggtgacttacccaaggctggagtcagtcagacccaactcgaatcctgccaggcactggtgctgggccaacctcacttctgtgtgcctcagtttccttatccatagaatggggtcaatgctgactttgcagtgctgctggaaagtggagaagtcaggatttgaatcagcatctgtgcacctcaccactggcctacagtgcctgcctctgatatttcagttagggcactgggatggtttttcttttggaagttacaagcatacgtatgttgagacaaggttaagcaccactggtggagagcccgtgagagctgggctgggagggagtggaagtctggtcacccaagctccctgggcaccagggaccatcctctggggccagttctggcatcacgtggcatctggggctggccccgccctgcaaggctgaactatggggggcactgccagctgggggtctgggcatgggagggcagcccagctcccacctggtctctggggctgtgagcttgttcagagggaggcctgggtggggggctcctttgggcagggtggggtccgtccggctgcggagatcccctgcccctgtcctgtggccggtccgggccagggcggcactgggcgctgagggctggggtccctggcggccggcggggctagcgggtattgattgttggttcttatttatagagcaccgggggtggacgcggcgctttgcaaaaccaaaaagacacagtgctgccgcgacgcgctattgagagggaggagggccagctgcagctgtgttcccgtcatagggagagctgagactccccgcccgccctcctctgccccctcccccgcagacagacagacagacggacgggacagcggcccggcccacgcagagccccggagcaccacggggtcgggggaggagcacccccagcctcccccaggctgcgcctgcccgcccgccggttggccggctggccggtccaccccgtcccggccccgcgcgtgcccccagcgtggggctaacgggcgccttgtctgtgtatttctattttgcagcagtaccatcccactgatatcacgggcccgctcaacctctcagatccctcggtcagcaccgtggtgtgaggcccccggaggcgcccacctgcccagttagcccggccaaggacactgatgggtcctgctgctcgggaaggcctgagggaagcccacccgccccagagactgcccagcctgggcctcccgtccgtccgcccgcccgccctgctgcctggcgggcagcccctgctggaccaaggtgcggaccggagcggctgaggacggggcagagctgagtcggctgggcagggccgcagggcgctccggcagaggcagggccctggggtctctgagcagtggggagcgggggctaactggcctcaggcggaggcgcttggagcagagacggcagccccatccttcccgcagcactagccagagccacagtggggcccatggccccagctggctgggtcgcccttcctcgggcgcctgcgctcctctgcagcctgagctccaccctcccctcttcttgcggcaccgcccacccacaccccgtctgccccttgaccccacacgccggggctggccctgccctcccccatggccgtccctgacttcccagctggcagcgcctcccagaggcgttcgggctcccgccgcctcgggccgcctcctccagactcgagagggctgagcccctcctctcctcgtccggcctgcagcccagaacgggccttcccggacgctggctcgggactgtcttcaaccccgccctgcaccttgggcacgggagagcgccacccgcccgcccccgccctcgctccgggtgcgtgaccggcccgccaccttgtacaggaccagcactcccagggcccgagcgcgtgccttccccgtgcggcccgtgcgcagccgcgctctgcccctcagtccccagggtgcaggcgcacatcgcccaccccccacctcccggtgtatgcagtggtgatgcctaaaggaatgtcacgcaaaaaaaaaaaaaaaaaaaaaaaa

SEQ ID NO: 7040 - DNA, 689 bp, Macaca Fascicularis
  misc_feature (1)...(689): n = A,T,C or G
cctaggcatatgcannnntgacttgtatttttggtgtgcattagcacaacctctactggggactacataacagtatccaaactacatctttagtaatccaaaattctgcttctgggaattgatttggtagataaacttgcatttgtgtgagatgatccaggtaaaaagttattttttatagcactgattataactgcacaaggttggaaactatgcagatgttcactgcatgcaatggataccactcaagtgtgaaagaaaaaagagagaattctctctatactgaagaagaaaaacctccaagattaactttgcacagaaagagcaaaatgcagagtggtgtgtacggaatgctatctttagtgcaaatgagaggaaaaacaagcatatatttttattcacaattttaagttaacaagcagtgtcataacacccactaggtgtcaggcactttataagttttaatttaatccttctcacttcaggagaagggcagtaggaacagagaggttaagtaattagtctaaagtcacactgcaagtcacctaaaggagccagcattgacatccagggcctccagctccaaagttcctgttcttaagcatcatattaagtagactaatttgaagtcaaaaaagggagggtgggagggaggactgggtggatgggagacttgtgtgactttttat

SEQ ID NO: 7041 - DNA, 713 bp, Macaca Fascicularis
  misc_feature (1)...(713): n = A,T,C or G
acaaaaatggactgagagaactagagtagctgatacaattttaaaaagaagagtaaagttggaggaactacactacttgattttaaagctacagtattcaggacagtgtggtattggtgaagggacagacatgtaagtcaatggaatggagaagaagaatagannnnnnnnnnnnnnnnnnnnngattttttaacaaagggacaaaaatcaatttaatggagaannnnnnnnnnnnnnnnnnnttactggaatagttgtcatccatatgtaaaaaacaatacctcaacctcacaccctatccagagctgaacttaaaattgatcatagatctaagtgtgtaaaatataaaactataaagcttcttgaaaaaatcatagaaaatcttcatcacctagacttgggcaaagagtttttagatgcgactctaaaagcatgatccataacagaaaacgttgataaattgaatttcatcaaaactaaaaacgaccgctctacaaagggatgatactaagagaataaaaaagacaagctaagattaggagaaaatatcgcaaagaatatatccagtgtatgttctgaatatacagagaaatctcaaaacaggaagaaaacaagccaattgaaaatgggcaaaagaacagacactttgccaaagtggatatacagatatcagatacacacatgaaaagatgttcaacattgttagccatca

SEQ ID NO: 7042 - DNA, 747 bp, Macaca Fascicularis
  misc_feature (1)...(747): n = A,T,C or G
ttatgacattttacaatgtaacnnnnnaaactaactgttggtaggagaaagnttnttatggaacgaatacnnngctcaacatttaatcaatctttgtgcctcaacatactgttgatgtctaagtatgcctcagtgggttgagaaattccccactgaagatgtcctgtccacctannnnnnnnnnnnnnnnnnnnnnnnnnnnnnnnnnnnnnnnnnnnnnnnnngaatcagaaatgtaaggcattggtgatgtttgcatttaccctcctgtaagcaacactttaatgtcttacattttctctgatgatgtcacacaaaattatcatgacaaatattaccannnnnnnnnnnnnnggccaacactttgttcgctcattttacactgtcnnnnnnnnnnnnnnnnnnnnnatagcttggaaaagtaacatctcctggccatcccttcatttaaccaagctattcnnnnnnnnnnnnnnnnnnnnagtgccaactcttggaggtcccagggtgcannnnnnnnnnnnnnnnnnnnnnnnnnnnttttnnnnnnnnnnnnnnnnnnnnnnnnnnnnnnnnnnnnnnnacagcaaaaactaaagaacaacaacaaaataaagctgtcgttaaattttaaacaacaatattactaattgcccaaaatgtcaatttgatgtagttcttttcatgcaagtataaattcaattgttagttataattgttggacctccttgagatagtaacaacaaa

SEQ ID NO: 7043 - DNA, 720 bp, Macaca Fascicularis
  misc_feature (1)...(720): n = A,T,C or G
gccctgctatatgccttgacccttcttctgactcaacaattaacaaacaggcaagaatccctgccctatgggtttatattctttttggtttttttctgacagagtttcactctgtcgccaggctggagtgtagtggcgtgattgtggctcactgtaacctctgcctaccaggttcaagcgattctcgtgcctcagcctcccaagtagctgnnnnnnnnnnnnnnnnnnnnnnnnnnnnnnnnnnnnnnnnnnnnnnnnnnnnnnnnnnnnnnnnnnnnnnnnnnnnnnnnnnnnnnnnnnnnnnnnnnnnnnnnnnnnnnnnnnnnnnnnnnnnnnnnnnnnnnnnnnnnnnnnnnnnnnnnnnnnnntatccccggcctgtgggtttatattctgatgggagagaaacaataaacataataagtgaatgaggtgtaaagcacactagaaataatagattctgagaatgggctggggagtaaagccaagtaagcaaagtgggggatgctgagggttcctgtgtttaagaatgtggtcaggggaggactctctgaggtgatgcggcttctaaaaacttaatggaggcaaaggtgtgagccctgcagatacctgggggaagaaccttccagacagagggagcagccaatgcatgactctaagagggacagcactccgcatgttcaaagaacagaggggaggctattgtggttggactgnggc

SEQ ID NO: 7044 - DNA, 527 bp, Macaca Fascicularis
  misc_feature (1)...(527): n = A,T,C or G
ctgctgccctacctagccgaggacgagctgcgcgccgcttgtgctcccggcccgctctgctggggggcgctggcggcgcagcttgcgttgctgggccttgggctgctgcacgcgttgctgctggtgctgctgctgtgccgcctgcggaggctgcgcgcccgcgcccgcgctcgcgcccgcgcggcactccggnnnnnnnnnnnnnnnnnnnnnnnnnnnnnnnnnnnnnnnnnnnnnnnnnnnnnnnnnnnnnnnnnnnntgtcctgannnnnnnnnnnnnnnnnnnnnnnnnnnnnnnncaaacttgacaggacgctacccgaggggccctcgnnnnnnnnnnnnccggtctccgcctcctccgctgtccaatctctaatacccaccccacctgcaggcccagaccacgtgggacagaactcctgcccaccctaccccgagggaggcgaacccacacctccaggcttgggaggaccatggggcacaatgcggtccagaccctgcctgcgtctccccttcaaactct

SEQ ID NO: 7045 - DNA, 803 bp, Macaca Fascicularis
  misc_feature (1)...(803): n = A,T,C or G
tactgggactagactgtgtgtttaccacacagcgttcatgtctgtgtggtgcagagttgaactgagaaatacaggaaagtgatgtaagataaggtccacctgtcagtaaaacaaccagaactgtctgtggaatggtgcaccatggaaaccagagaacgcaaaacagaatcctaccgtgagtgctatttaaaggtgcgaggcgctggactggcagcatgaggggctgcacgcccaccctgtgggctccttctcaccctgacgcagtgccctctcgtcttctacacaaggatgccacagacatgcatctcctcactgtccctttgactgtttgggaccgtgctgtccaaaatttaacacacaattgagctattttcctgtctcctcgactctgcatcctggatctggccagcatttctctctcctgcagggtacagctcctttgggcgtggtctcaggatccccacacaggaggactgaccttgccgaaggcctggcaaggtgttcctgggcctctgcccacaggcatgttatacctggtgccttcctctaggtccactcagaggtcaggttgtagagctagacatgcctttcacaagctacttttgcctctccctctaaatacaagctgagatgcctggtggtttcaaacaatagagatgatttcgtgtacatgaaaacctgataaaatcattagaagatgtcattcaaagttaatgggcaatttttctctctagggtaggtaattattttggtgggcatatttttgaaaaataaaancttaaagtttaaaaaaaaaaaaaaaa

SEQ ID NO: 7046 - DNA, 655 bp, Macaca Fascicularis
ggaatggatgcaaatgttctaaaatataagagtctcaaagctgaagaaactaaccagcaaagctctaagcatacagctctccatctaactaaaaataaggatgagcaggccaataagaatgatggacaacccaccttatatctgaagttccaaagggagagttaatctagttttatactgctccgagaactgtgaatgaaggataacatatgcttatgtggtaaaaagaaaaaaaggaaagccctccccttcccctttccctatctctccccctacacgtgcatatgcacaaactacaaattttagatatcccatcttctgtagtgggaacatctttcagagatttaaaaagaaatccagagaaaatacggaaaaatatcaaagtagatatttatatttagtttttaccagcatggaaaaaaatctctgaagttttgatttcttccaaaactacttatgcgtttaacaccaaaaaacttaagaactcaacgtaggaatgacatgtaatatgtcactgatttttaacctccctactagacactttaatgaatcagtcaacaaacatcatttcctgattttctgttatatcattggtgtgctaggaaccatttctctctactaggagattaccacataatgtacggataaaacatac

SEQ ID NO: 7047 - DNA, 638 bp, Macaca Fascicularis
cagttatgcagatcacctacaatagaaacaggatgctcaacaagagagaaaaacttttggggaaccacattgatattctactggccacgaggccactgaacagatatgaacgaggccagtggggaacccttacctaagtatgtgattgacaaatcatgatctttacctaagctcagtatgcaaaagcccacaactagtgcagaaattgtaaaccgtgcctttcaaagagctggcctaggtgaacaggaagacagtgaagtttgcatgactaaattgcagaagcataattttatttttttggggcactttttcagcaatattagcgggtgaggggctcagaatctattttaatatttgaattattcttccatttcatatagtgatcacaagcgggggttttacaattccgttcagattttttgtcactggctataaaatcagtatctgcctcttttaggtcagaatatgctatgagtagcattacatacatatatttttaaaagttgatacttctttatgacccacagttggcctttattttcttaaacacctgggcaattgtggctcattgtgcattttactgttggcccattcatttcgtttttggaaattatggttttgtattttcatttttattt

SEQ ID NO: 7048 - DNA, 735 bp, Macaca Fascicularis
  misc_feature (1)...(735): n = A,T,C or G
aggagcaacccaccnnntagtcgaggttccnnnacccctnggtcctgggctgaagccatttcctacccagaagcgttcccacccactnncaggcacaaaagccggtcaggggctcagggcctgtacctggggttgcaggggctcctgccccgctgtatcccaccgggagggggccccactgcccttccggtccttaaaacggctaggagagaagatggggaagtgtgtgagacaaaacaaaactggcttgtttcctccccttggcaggcaggctaagctctcctggcagcccaggctctggggtgggagaacagtgtcatctcttcctttgttgacaaaattgccaaagagtgggagcaggtagggtcaggggctggagtgcaggggagggggcaagggtggaggtgactggtggggggaagcagagggaggtgggctgaggccagggtggggccagtgtgatgctggcttaaggagctggagggttcctaatacacattgcattcagtttatcttcctaagaggctgttggagttggggcctcctccagcagggaccctctgacccctgcagggcctggacttggagtgaacagggcttcaggcagcccaagtattctatttgcatttggtaatttttcatgtcacctatttatgaacatataaatctttataccaaatctattttttaaaacatggaaaagttgcctttatggaaacttggcagagccagtgt

SEQ ID NO: 7049 - DNA, 723 bp, Macaca Fascicularis
  misc_feature (1)...(723): n = A,T,C or G
gatgttctgtgcaacagnnnnngggtcntgtgactggagatnnncagcaggccctggagcccggactggagtcttggcagctgatgagcagcaccttgccggccaggaggnnnnnnnnnnnnnnnntctccccaacatttgaaggcttaaagaacattgtcattcttcagccctccttgcttctctcaatacaataagacattgcagaagcaaaagggtggcctctgctccaggcaaggcagctgactgtctggggcattggcctggggcttgggtgccacgtgctgagattgcatagtcaaannnnnnnnnnnnnnnnnnaatagcttgtggctccccacattttcctaccctgcacttaaaggccagaccactctctgnnnnnnnnnnnnnnnnttcccaaacccatggtgctttttccccaactcaacctagactccaaagtggggagggatgggtcagaggccatagtggcccctggataatcctgacatgaggtggagtggggtgaggcagagggagcagccccaacacctgcactgggccatctatgggaaagaacacgggtcgagtgcagtcgagttatctggaagtctgtatttgtatctataactgtactttgcctggcgctgtgcgcaaggtcggaacacttactgctagtacctagaaacacacaaggctgcccagccaaatcttaatgtaaagtagctagagccatggaag

SEQ ID NO: 7050 - DNA, 694 bp, Macaca Fascicularis
  misc_feature (1)...(694): n = A,T,C or G
gagattttttattnnnnnnngcaaggcaaagaaatcaaacccctttgccactgatcaagccatattcaggtcctaggttgccanctgatagataatgcttaacagctccaaactataggctgaaatctttacagaaaaaggcatcaacttctgcgggaagaataacagtcccgcggttaagtgttggttcagttactagcagaccaagtactcccacactaggcacaccaaccccacagaccatgtctgtttcaactaaagtagggactcccatgtccctcacaggtcaaaggtttacagtacagatgcctacttcgcagtctccagctgtaaaagcttcaattcctgcaacctcagcagttcagaatgttctgattaatccatcattaattgggtccaaaaacattcttattaccactaatatggtgtcatcacaaaatgctgccaatgaatcatcaaatgcattgaaaagaaannnnnnnnnnnnnnnnnnnnnnnnnnnnnnnnnnnnnnnnnatgataatttgtaatctagctttgctgcatgtaacatgtatacttggtcttgaattcattgtactgatattaaacatgcatgctggatgttttcaagttgtgttttagaaaactttaataataattaatgagtaaatacagttaccatacttttcaattgaaatgaaggtttttcatc

SEQ ID NO: 7051 - DNA, 793 bp, Macaca Fascicularis
  misc_feature (1)...(793): n = A,T,C or G
gatgtagatgaacaannnnnnnnnnnnnnnnnnnnnnnnnnnnnnnnnnnnnngtctgtgagaagaagcaaggtggctgaaaactcgtgaatgactcagcaggacttagtagaaaaaaatgcttcttnnnnnnnnnnnnnnnnnnacacaaagaaagcccctnnnnnnnnnnnnnnggagctgatggccatcaccagaaaaatggcagccacannnnnnnnnnnnnnnnnnnnnnnnnnnnnnnnnnnnnnnnnnnnnnnnnnnggagcggctgacattattattggacacttatgtatcagacatnnnnnnnnnnnnnnnnnnnnnnnnnnnnnnnnnnnnnnnnnnnnnnnnnnnnnnaacaggagnnnnnnnnnnnnnnnnnnnntggtggatgaaacatatgtccctcctgcattctcagatgacaagttcattttccataaggatctgtgtcaagctcagggnnnnnnnnnnnnnnngatgannnnnnnnnnnnnnnnnnnnnnnnnnnnnnaaaagccacaaataacagaggaacaacttgaggctgtcattgcagatttctcaggcctgttggagnnnnnnnnnnnnnnnnaggaacannnnnnnnnnnnnnnnnnnnnnngacaaaaactgatttcannnnnnnnnnnnnnnnnnnnnnnnnnnnnnacttcaggggaggagaagacaaaaggagtctttcatttggtgtgaacttttctctttaattttaactgatttgacactttttgtgaattaatgaaatgatacttttatgtgagatttc

SEQ ID NO: 7052 - DNA, 728 bp, Macaca Fascicularis
  misc_feature (1)...(728): n = A,T,C or G
gatgagaggaggtggcacagtggtgagtgcagggcacagtcctannnnnctgtgggtgtacttttggagttgtgacttggctgtgagggcagannnngnnnnnnnnnnnnnnnnnnnnnngcacatagaaaaatgcagattgcaggcataattcatctctgacattagagaaaaannnnnnnnnnnnnaatttaaattttgagagtttgctgtgttttttttttaacataaaagaggctgattattctttttagtttaattttatatcccatannnnnnnnnnnnnnnncaagattcagaaaaaattcagtaaatgcaccccgtaaattgctaccctttcctttattnnnnnnnnnnnnnnnnnnnnnnnnnnnnnatatatataatttttaaaatgcagaaagaaaataatttccctaaatataaatgcaaactgatttcttttacttttttgtgtgtaggggtgnnnnnnnnnnnnnnntaagtggcattcagattagggtcctgaaaagcccagaatctttaaaannnnnnnnnnnnnnnnnnnnnnnnnnnnnaacatttaaatttaagctagaaatgtaaatattcaattaatttgttaaaagtacttttataaagttaaaaagaaattccaaccaaaattgtagaaagtcaggctcttttagaaagaaagctacacccatttcctcaaataactgttccgaaaatttatatggtggaatgca

SEQ ID NO: 7053 - DNA, 717 bp, Macaca Fascicularis
  misc_feature (1)...(717): n = A,T,C or G
gaaatagagtctagttctggtnnncaaaatccatcaacggcannngagtttgnnngaaaatcattagttggggagttggacgggcagtttggtatgttgccaaaacactctctcacttgaaatgtttctttatgtctttcatcattcacacgtgtactcacttctaaacttgnnnnnnnnnntgtacttaaactgtgcttcggaagatgagaggtagctttaaacacctctgtaagtttgatatcaggtgtagattcgcttttctctgactgtggcacagtggttatagcatatttctttggtggcaaagggggnnnnnnnnnntggcaaaaaagttttggcatctgacacccatcagatctaccggctgactgaattatacattctgtggatagagagttctcaaagtaacattgatccatgatattttgctgcaggatgagaggnnnnnnnnnnnnnnntaacccaacagttcttaggtgtgaagaccataatgaagatgtttcattactgttcactctcttcccagaagcagagttatcaacgcgaaacggcaaacctgttctctcagaattttctatattaagcnnnnnnnnnnnnnnnnactcatttggtttttcaagtnnnnnnnnnnnnnnnnnnnnnnnnnnnnnnnnnnnnnnnnnnnnnnnnnnnnnnnntagactggatgaaggaaataactttccattgttttca

SEQ ID NO: 7054 - DNA, 743 bp, Macaca Fascicularis
  misc_feature (1)...(743): n = A,T,C or G
aaannnnnnnnnnnnnnnnntannngnatgtcagaagcagtcataaagattggnnnnnnnnagtggtggccagctgttttataaagaataaattgtgtttatacttgcagaaagattcnnnnnnnnnnnnnnnnnnnnnnnnngacaaagtagttggggtgtctgtgttacacaggaacccggggcctagaaggccagtcactatgactttgcacatattacaactgctctaggcctcagtttcatcccccatataaatcaagggggttgaccagaagacctttaaaatcccagctttaaaattcttctgaaatttattgtgattgctattagaaactccgttcccaccaaccttatcatcaggggttatggataaaataggaggcttttttgggcagcctggtcttctaaaccaaaggacaaaatgctcttcccaaaatcatgatttttctaccttgtcttctgcctttagtttctaatcttgtctggccactttgtttgatagatgagaaccaagccagagatggcaagtgactggcctgaggtaccagagctagtaaatgacaaagccagaactagaatccaggtctgctattcgttaagcccactggtctttcccttaagtgataccactcacttgtctttcatccctgagaaaaagcagaacataaaactgtgagaagcatctgtttagatgataccagtgagaagtataaattatttcaannnntttaaatatggat

SEQ ID NO: 7055 - DNA, 533 bp, Macaca Fascicularis
  misc_feature (1)...(533): n = A,T,C or G
atccgcccgtctcggcctcccaaattgctgggattacaggcttgagccaccgcgcccggcctcattctttattaataataaatgggtctatagatatggaatgaatatattcattttttagctacatagtaattttaattttaatttttaaaaaaatatgtatatatgtatgtaagtattttnnnnnnnnnnnnnnnnnnnnnnnnnnnnnnnnnnnnnnnnnnnnnnnnnnnnnnnnnnnnnnnnnnnnnnnnnnnnnnnnnnnnnnnnnnnnnnnnnnnnnnnnnnnnnnnnnnnnnnnnnnnnnnnnnnnnnnnnnnnnnnnnnnnnnnnnnnnnnnnnnnnnnnnnnnnnnnnnnnnnnnnnnnnnnnnnnnnnnnnnnnnnnnnnnnnnnnnnnnnnnnnnnnnnnnnnnnnnnnnnnnnnnnnnnnnnnnnnnnnnnnnnnnnnnnncatgccggccagtgacataatgtttcatagagatgtatatactacacctattcaaccattcccctattaatgggcagcag

SEQ ID NO: 7056 - DNA, 770 bp, Macaca Fascicularis
  misc_feature (1)...(770): n = A,T,C or G
taaaaaggaatgagatcannnnnnnntcagggacgtggatggagctgcaagctattntcctcagaaaactaattcaggaacagaaaccaaccaccacatgttctcacttgtaagtgggagctgaacaatgagaacacatgggcacagggaggggaataatacacactggggccagtcagagggttggggggcaagctgaaggagagcattaggaaaaatagctaatgcattctgggcttaacccatttatgcctagtgttccgtttctgggatgctaagcatgtggaagttatttatatcctgctcaaggtcatcaccaaggtctgatttttcacattcaacaaattgcaacctctggcataaatgggttaatacctaggtgatgagttgataggtgcaggaaaccaccatggcacatgtttacctatgtaagaaacctgcacatcctacacatgtaccctggaacttaaaacatttaaaatatatatgtatatatatttaatatggaattttaaaaattactaatgagttattttatctgagtaattttgcatcaatatgcttttattatggaagagaagattcaatgagtacaaaaccgcagatagatgtgtcagaagatccctcaatataataaggcttagcgttctgtgtcataattgcctgtttgtattcctctctggtctttaaaattcattagggaaaggatcaactccgtcttactaaacatttgattccnntatgtattacactatatatgacaaataata

SEQ ID NO: 7057 - DNA, 370 bp, Macaca Fascicularis
  misc_feature (1)...(370): n = A,T,C or G
gnnnnaggcnnnnctctggagnncagcntgtgccccccagtggaatcgcaagagggtgccgcgggcgagaagggcgcaggaaccgaggactccaggggctggggacttcgggggccgctctgggaagcggaaagcagtcagcggggaggaccccattctggaactgctcagacttcccaagacttgacgcagccccccacgcttctggaggtggggagggcctctggacagatgggtgtcccctggtgcccctccactcttctcttcctctcttttttggggggagaaaccttggaatttatatgagacccccccagggagggggtcagttgggcccccatccctccccttgccacatctcagcccctgt

SEQ ID NO: 7058 - DNA, 734 bp, Macaca Fascicularis
  misc_feature (1)...(734): n = A,T,C or G
gaggaggggctnnncagtnnngagccgtcctcccatccaggggagtggctggcttgagcgtgggtccccgggccgagccctggattgggtatcatggagcaggtcaccctggccaggatgcccccagcacacccaggcccccttcattagtgccttgctttgggccctgcagggggaggggtgacaggatgagcccccatcccagcagcagcaatacccccaccctcctgggctcctttgtgtagcattatcagccttggtctggcctctggcacctcaaccctgccatggctgaccccacgcattccaaggcggggtcacagtaccagtggcacttggggtgaggtctctaaagcttcctcagaattgtggctgtgccacactgggccacagggtccctgcccctcaagcaccttggggccctcttctcgctgagcatctggaggactggacccaggcttgtgccagggcctgacttaggcctaggggccccagaatgctgctcctcctgagcctactgccaaatgtcctcagtgttgtctgcacctgctccgactcactcagccgccccattcagcgcccgctccgtccagcgcccgccctgaggggccaaggcggccgtgccttactattccgtgtcttctgcctcctctgaggaatctgaccctgtctcacggtcccagaccccccattctctcctcttagttgcatgagtttttctttgttcatggaat

SEQ ID NO: 7059 - DNA, 681 bp, Macaca Fascicularis
  misc_feature (1)...(681): n = A,T,C or G
tattggatgtacagttccacananntnnnggggggttgggctcacagtcatnncnnnngnnaggaggagcaagtaatgtcttgnnnnnnnnnnnnnnnncaaagatagaaagcttgtgnnnnnnnnnnnnnnnnnnnnnnnnnnnnnnntctcctgagacnnnnnnnnnnnnnnnnnnnnnnnnnnnnnnngacctgtccccatgattcaaacaccttccaccaggtccctcccacaacacttgggaattgtggaagttacaattcaaggtaagatttgggtggagacacagccaaactatatcacgtactcctacctaaaactnnnnnnnnnnnnnnnnnnnnnggcttccttagtcttccatcttctctctctagtgaacatgaagcagagccacaacacaccaattatggaaagtgctgtcagaattactttctgacagtactttcagnnnnnnnnnnnnnnnnnnnnnnnnnnnnnnnnnnnnnnnnnngcaggtgactgccctgnnnnnnnnnnnnnnnnnnnngaatcttaactcacttttctgctacagaaggttggctttggtgtttctacagaaaacagggatctagcannnnnnnnnnnnnnnnnncattcccaaacactaatctaaactactgccagttttcactggtctcctgtaaaatgagaaaaata

SEQ ID NO: 7060 - DNA, 770 bp, Macaca Fascicularis
  misc_feature (1)...(770): n = A,T,C or G
tgtagactnnnnnacgtctcagatgctgtggcacggcgggccctggaagtatcacaggcanntgtgannnnnnnnnnnnnnnnnnnnnnnnnnnnnnnnnnnagtgctcggaatgntnnngatgacatnnngcannnnnngaagaacaacgnnnnnnnnnnnnnnnnnnctctgtcnnnnnnnnnnnnnnnnnnnnnnnnnnnnnnnnnnnnnnnnnnnnnnnnnnnnnnnntcgaccacatcaaggcagtcatcggatccaagttcattgggattggcggagattatgatgggnnnnnnnnnnnccctcaggggctggaggacgtttccacatacccggtcttgatagaggagttgctgagtcgtggctggagtaaggannnnnnnnnnnnnnnccttcgcggaaacctgctgcgggtcttcagtcgagtggaaaaggtacaggaagaaaacgaatggcaaagcccgttggaagacaagttcccagatgannnnnnnnnnnnnnnnnnnnnnnnnnnnnnnnnnnnnnnnnnnnnnnnnnnnnnnnnnncttcagaccnnnnnnnnnnnnnnnnncccacacactggacacccaagttatcagccaagttgccactctcagagtcctcccccaacatggccccagtcttcgcagttgtggtcaccttctcagtccttattctgtggctctgatgacccagttagtcctgccagatgtcactgtagcaagccacagacaccccacaaatttcccctgtnnnnnnnnnnaa

SEQ ID NO: 7061 - DNA, 1702 bp, Macaca Fascicularis
gctctccgcgggccgagtggacgaggccgaacgcgaggaggcggccgctgccccctgcgaggcctagcttcggcctgcggctcttctccgttccgagcggaacggtttttgtggcctttcctcagtgggcagaggtttcctgaggacggttggggccgtagtgggcccgaaagagcccggcgccgctctcggactctgccaggccccaggggcatccgcagcggcccggggatgctgccgtgacccgagcccggactctggcgccgggcggggcctgcacatccggccccacccactcggggcctcgcctctcggagcccgaccctggagtagcggacacaccccctcctggcccggctgtccgcctccgcccagcctttcctcaaccagcttcatttttctaccagtcctccagcctcccggtttccgactttgcactaagagggatgcaccctggaaaaccacattgcggggtcacatcttgtttggagaagaggccgggcttttgcatcttagggtatacattcaccttttcaagggcctggcatagatttgattaatcagcctggaataccctgttcctgctgacctggccgtttttacctctctaccttaccacactcccaggaagattaagcagggagcgcttggcgtcttctttgggtccccaccttgagctagacgtgaaattgacccctgggctgcagcatggctgtagccctcgactctcagatcgactcgcccctggaggttgaggaatgcctaataatgaagatggaaaaggaccccgagtgggcatcagagcccattctggaaggatcggatggctgtgagaccttccgcaaatgcttcaggcaattctgttacgaggatgtgaccggaccccatgaagctttcagtaaactctgggaactttgctgccggtggctgaagccagaaatgcgttccaaggagcaaatacttgagctgctggtgattgagcagtttctcaccattttacccgagaagattcaggcttgggcacagaagcagtgtccgcaaagtggagaggaagcggtggccctggtagtgcatttggaaaaagagactggaagactaaggcagcaggtcagcagtcccgtgcacccggagaagcatgccctacttggagcagcgtgggaggtagcagacttccagccagagcaggtggagacccaacccagggtggtgtctcgggaggaagctggaagcctccactcagtacaccaggaacagctgaaccgaaagcgagaacgtcggcccttaccgaagaatgctcggccttctccctgggttcctgcccttgctgatgaatggaataccctagatcaggaagtgacaaccacacggcttcctgctgggtcccaggaaccagtgaaagatgtccacgtggccagaggcttttcctacaaaaagagtgtgcatcagattcctgcccacagggacctctaccaggatttcaggaaggagaatgttgggaacatggtctccctgggtaaggattccttccctttccaaatataagacttggggctttctaatgtattcatttctactgattggaagatagtcagatataaatgttaacacttaaaggatctctaaggattgtgcagtgtaattacttagccaggttctcttccctcacccattccttcttccagtaaaaaaaaaaaaaaaaaaa

SEQ ID NO: 7062 - DNA, 757 bp, Macaca Fascicularis
  misc_feature (1)...(757): n = A,T,C or G
aaattcatgatgtgtgtgctggagatctggcactcatggccagtgcnnnccnnnnnnnnnnnnnnnnnnngggtcctgttgacccctatttcgtgacctacctccgtgactgctctttnnnnnnnnnnnnnnnnnnnnngtggttttccagagtccaatcctcaggactttcctatccacacagaggcctggtagtcaggcgactctaaaccattagatggattgtagacctctctcaagctgccacctccttgctgtccccagatcgtatttcagtctgtcagtggatatctgtatctggaggttccactgttgcttctatctcagttacttagaatggaacacagagtcctgcccctttccacctacatgcccttacttgaaagcacctgagacttattgggtccctgnnnnnnnnnnnnnntgtatctgcggagtagttgtatgtcaagtggcctgttttctaaacaatcccacatcatgtcctccctgcacttacnnnnnnnnnnnnnnnnnnnnnnnnnnnntggcggagggggatgggggagacaatgcctctgtcccaattctgagtaccagctctggtnnnnnnnnnnnnnnnnnnnnnnnnnnnnnnnnnnnnnnnnnnnnnnnngaaaaattctgaatggcttcctgatgcctaactttatgggatnnnnnnnnnnttgcacnnnnnnnnnnnntnnnnnnnnnnnntcatctgccaagaccagggcctgctcaccacagccgcaaa

SEQ ID NO: 7063 - DNA, 725 bp, Macaca Fascicularis
cccatgtaggacatcagaattctcacacaagcatcacggtttatgtgagtaagcaggggttagaaattcactttcttgacactcagtcttgccttctaaatactccttgatcttgcctacctcttcccttttccacatgtcttttcctctaggaacactttctccgtttatttctgcctatccagttcttccctatattttctgtatcagctaaagtccagtgtttccagagacttttgaaagtcaacttatactttttccttcttcattcacaaagcacttcttgcgtgggccctggtatgtgcccctttctctcctactgtctaacagcaatagaagagaattgccctcttgaattgtcagtgacaactgacaactcttgaattgtcagtgaacttttctagggggttttcttgaattcccaactagattgtgagcttctagaagacaaggctatgtctttgattgctgtctcccctaccaaaacccagtactttagttacagaaaataataaacatttaccgattgactgattttcctctagtccactagctttgggttcaggctttggggccaaattgtactctggattttgaaaaaaaaaaaactgtgaacaccgcaatgttacagagcatatgaggtagtagccagcatgaaggatttttttattcctgagaaacagtgtcaagggctgagggaagaaggcaaaatagcagactcagag

SEQ ID NO: 7064 - DNA, 1399 bp, Macaca Fascicularis
ccactgaggcgcttggaaccgaaaagtcccggtgctcctggctacctcgcaccgcggtgcccggccggccgtcagtaccatggacagcagcgctgtccccacgaacgccagcaattgcactgatgccttggcgcactcaagttgctccccagcacccagccccggttcctgggtcaacttgtcccacttagatggcaacctgtccgacccatgcggtccgaaccgcaccgacctgggcgggagagacagcctgtgccctccgaccggcagtccctccatgatcacggccatcaccatcatggccctctactccattgtgtgcgtggttgggctcttcggaaacttcctggtcatgtatgtgattgtcagatacaccaaaatgaagactgccaccaacatctacattttcaaccttgctctggcagatgccttagtcaccagtaccctccccttccagagtgtgaattacctaatgggaacatggccatttggaaccatcctttgcaagatcgtgatctccatagattactataatatgttcaccagcatattcaccctctgcaccatgagtgttgatcgatacattgcagtctgccaccctgtcaaggccttagatttccgtactccccgaaatgccaaaattatcaatgtctgcaactggatcctctcttcagccattggtcttcctgtaatgttcatggctacaacaaaatacaggcaaggttccatcgattgtacactaacattctctcatccaagctggtactgggaaaacctgctgaagatctgtgttttcatctttgccttcatcatgcctgtgctcatcattaccgtgtgctatggactgatgatcttgcgcctcaagagcgtccgcatgctctctggctccaaagaaaaggacaggaatcttcgaaggatcaccaggatggtgctggtggtggtggctgtgttcatcatctgctggactcccattcacatttacgtcatcattaaagccttagttacaatcccggaaactacgctccagactgtttcttggcacttctgcattgctctaggttacacaaacagctgcctcaacccagtcctttatgcatttctggatgaaaacttcaaacgatgcttcagagagttctgtatcccaacctcttccaacatcgagcaacaaaactccactcgaattcgtcagaacactagagaccacccctccacggccaatacagtggatagaactaatcatcagctagaaaatctggaagcagaaactgctccattgccctaacaggatctcatgccattccgaccttcaccaagcttagaagccaccatgtatgtggaagcaggttgcttcaagaatgtgtaggaggctctaattctctaagaaagtgcctgcttttag

SEQ ID NO: 7065 - DNA, 723 bp, Macaca Fascicularis
  misc_feature (1)...(723): n = A,T,C or G
ttaacagctgccaacatcnccnacaataactgtatgaagaaggaattttttaattacttaacctatgtgaaaagaaaagggctaaaagtgatgcctacaaatacattactttctggggaaagaaaagaattccaagaatgtttgcaataatggcctccaatactgaaacatccaaaagcgggtgaaatgaggctgaaataaaggctgtttcattttagctgaagacctgcaaagctgcttgaatttctagcagtcgaaaacctaacctgcaattgatgcttaatcatccagatgaacatgcagtcagctatacacatcaagactcatttacaaaaaccattgatttttcagtatgtgggataagggtttgggttttttttggtttgttttttggtctgtataaggaattatgtgtgtgtgagttgggatgtgtggatatgtgatattttcaaggtatggatgtttggttataacgtctcagagcatgcctaaaagagcactgcaagattatttttgaagaaatgttattttattagatctaactcttcatagtatgtaaatgttagaacattttaataatattttaaaacatgggctttcccagtatttcaaaaagaaataatatatctgttaacgttattggaatgctgctcagttctctgatcagtgcttatgttacgattgttgataactaaccaaagtagatgcctgcagagacttcca

SEQ ID NO: 7066 - DNA, 673 bp, Macaca Fascicularis
aggggaggaatggggttctgtttgaaaaaatgaggggatctatcttagatccttcagcggaacagtctccaggtgttttgaggggctcactcctccccaccccatctcactctccgtggtaacttggccgacttgacccctctcatctcactccctgtggcccaggcacaggagggcagggccatagggagggagattctctaaggatccaggccattcctgggtgagcccttgggcaggcaggtttgcagatgggagaggcttcgagagggtggttactgggcccacaggggtgcagggccagctcaggcactggagtgggagccctgggagaccccttcccccactctccaccaagcacacccgtttctgtctcatagcacatgtgacaatcatctggacaatagccacaagggggcgctcggaccaggcagccactttcctggtgctctctgggcccagctggtgctgtagggccaggcaggcaggggcgtcggggtttctctgcccaaggaagacagaacatggagaaccgtgagggcaggaaccccacagaccgtcccttccagcccacactctgccacctcctggccctctcccatttctgagccaaggcctccccgaggcagaagttgcctggtcgtctgtccccacagtgacctgactgggggtg

SEQ ID NO: 7067 - DNA, 951 bp, Macaca Fascicularis
  misc_feature (1)...(951): n = A,T,C or G
annnnnnnnnnnnnnnnnncannnnnnnnnnnnnnnnnnnnnnnnnnnnnnnnnnnnnnnnnnnnnnnnnnnnnnnnnnnnnnnnnntagagcgnnnnnnnnnnncatgctatgtgtgcttagacgtcttttcttacccttttagnnnnnnnntttgtatgagacaccattgcaagaaaatttatccctccagaagtattttattactaaaaaacaaaagcaaaaaaagcttagagtaaannnnnctggttaaagtacnnnnnnnnnnnnnnntacttctttagtactctaatcgccactccactgcgagtgaaagtcaccattgtgtgtacacaggtggtcccaatcaaaactcnnnnnnnnnnnnnnnnnnnnnnnnnnnnnnnnnnnnnnnnnnnnnnnggtttgttctaaaagaacaatacatgttttaccatttcctttaactagaaggacaactagtaatgcattaacataatttctctattaaccatcatgcgcacaagaaatacatagtaaataaggaacctgaaaactcctggcattggatcttaagaagctagatgattagaatgtgaaaaagattttacaaatgtaaaacttctatttctctgtagaaactttcttcactttgctgtgcaagaagacactgctttgctatatttaaaatggcttttttaaagagatttatgtatttggtaaatgtttgtagtcaacagttcacacaagaagctgtacacggtttgatcatgtaaaaccgtttggcggcacaagctnnnnnnnnnnnnnnnccttgannnnnaccttttaagaaaaataagttaatctcaatttttccctgaatgtgttgtttttcttcattatacaataaatataatagtgaactttttatcaaatggtgaagacaatgctaaaggttgttgtaaactgtttgtctcccgcactcactcc

SEQ ID NO: 7068 - DNA, 1001 bp, Macaca Fascicularis
  misc_feature (1)...(1001): n = A,T,C or G
atgcatatcgtttgtgataatttctcattaatatcctgaatcattcattnntgctnnnnnnnnnnnnnnnnnnnnnnnnnnnnnnnnnnnnnnnnnnnnnnnnnnnnnnnnnnnnntgccatagttagtaaggctttactttaagtgtgaaatatttagacgaaattttctctttaaagttctttatagggttaggatatgggaaaatgctatattaataaatctgtagtgttttgtgtttatatgttcaaaaccagagtagactggattgaaagatggactgatagaaattatcagtctaatttatcatgactgatagatctggttaagtcgtgtagtaaagcatcaggagagccattcctatcacaaaagtgccactaaaacagcctaaggagaataaatgactcgcttttctaaacttcagatttatctgggctctaatcatctagacagtcttctgacagattgcaactgtaagcagaaacctacatatagttaaaatcctggtctttcttggtaaacagatttaaaatgtctaatgtaaaacatgccacagaagaattcagggatttgagtttccctgaatagcatatatatgatgcatcaggattgatattattactattttttaccatttctacttacataatgaaaaacaattcattttaaatatcaaattattattttgtaagttgtggaaaagggcaattgaagttttcattatgaagttttcccaataaaccaggaattctaaacttgaaaagaaaaatagaattagccagatgtggctgcacagnnnnnnnnnnnnnnnnnnnnnnnnnnnnnnnnnnnnnnnnnnnnnnnnnnnnnnnnnnnnnnnnnnnnnnnnnnnnnnnnnnnnnnnnnnnnnnnnnnnnnnnnnnnnnnnagactctgtctcaaaaaaaaataataatgaaaataatatggggattatactgtacgctcaggtatacattctttcttacatgtattgtgaatat

SEQ ID NO: 7069 - DNA, 677 bp, Macaca Fascicularis
  misc_feature (1)...(677): n = A,T,C or G
attacagggatgaactccatnnnnnnncaggtgatacttgttttggaagcttattnncactcctgcagtggattcagtagctgtacctgggtcggcacccctgaannnnnnnnnnnnnnnnnnnnnnnnnnnnnnnnnncaataagaaagctgtccccagggaaggtgcagagcagggacctctgtgtttgggaacctgcggctgtacagggaggtcaggagtgtgacccatttccttctcctccccctgctgcctgcaccgggagcnnnnnnnnnnnnnnnnnnnaaaataggtgatagttatagggaaatgcaatacaaagaggaaggaatgaggaaaccgacatgaaattaaaataaatctaatacattaaataaatgtaaaacactataagagannnnnnnnnnnnnnnnnnnnaacaaatattaaaaacctatgtgtgtatgtgtgtgaggtaatattcttgtaaactgaatcataatttatgtataaagttattcaaattgatacagaatattcgcatttgattcccaaaaagatggagaaggatctggcaccaggactccagggacatgctagtgatttcccctcctataccctgaggacacggtgcttccaactctgaggatcaggctgctgaaattgactgtgtgagaagagaaagtgggattttctg

SEQ ID NO: 7070 - DNA, 1344 bp, Macaca Fascicularis
  misc_feature (1)...(1344): n = A,T,C or G
atgagacgagcannnnacgnnnnnnnnnngaaggagactnnctggcggttgnnnctgntcagcaaatttggaagttttgacccgcagggtgcactgagaaacttggctgtgggaaaacacaacttgaacatcctgattaaacactccaactctaccgctgctannnnntgaggttcccgagtcacagtgttttccaagtctcccgtgacactgggtcaccccaacaccctcatctgtcttgtggacaacatctttcctcctgtggtgaacatcacatggttgagcaatgggcgctcagtcacagaaggggtttctgagaccagcttcctctccaagagtgatcattccttcttcaagatcagttacctcaccttcctcccttctgctgatgagatttatgactgcagggtggagcactggggcctnnnnnnnnnnnnnnnnaaacactgggagcnggagattccagcgcccatgtcagagctcacagagactgtggtctgcgccctggggttgtctgtgggcctcgtgggcattgtggtgggcactgtcttcatcattcaaggcctgcgttcagttggtgcttccagacaccaagggcccttgtgaatcccatcctggaaatgannnnnnnnnnnnnnnnnnnnnnnnngaagagtggacttgctacatgacttaggactattctctggcccgatttatcatatcccttttctcctctaaatgtttctcctctcaccttttctctgggacttaaggttctcctctcacctttctctgggacctcagagctcacaaatacatttacattctttccctgacctcctgattttttttccttttctcaaacgttacctactaagacgtgcctggagtaagccactcagctacccaattcctcagtaacctctatctaaaatctccatgaaacnaataaattcctttttatgagatctatgtcaaatttttccatcnnnnnnnnnnngctgactgaaactacggctaagaattgggggactcttatctttcaatcctgtttaannnnnnnnnnnnnnnnnnnnnnnatgtccagtaacacagaagccaccaagtacagtatagnnnnnnnnnntgttgatttcttagctgacattagtatttcttgcttccttgtgttcccacccttggcactgccatccacccctcaattcaggcaacagtgnnnnnnnnnnnnnnnnnnnnnnnnnnnnnnnnnattgctatagcaaacattttaaaaccaaaaaataagtctgtactaatttcaatgtgacttttaaaagtatgacagagaaaaaagttaggataaaggaacttgaatctcaaaaa

SEQ ID NO: 7071 - DNA, 703 bp, Macaca Fascicularis
  misc_feature (1)...(703): n = A,T,C or G
atcatgatatattaggaccagtgaatatagcttatagtgataataaggattctagggtatttttcnnnnttttagaaaaagatcctggaagtttatttgatctgacatgttttcgtaatttttagaaatagctcttgtaccatgaaaaatgcccagtatggtaagacacacaagatgtatttttttctctttggtgaaaatcatgcctatcactagtatgtgtttgacatttgtaatatacttaaaatagtattgggtgtgaggcatggtggtgatgaaaagtagccttatggctacttgttagtcattagagagaacatggagaaggggttaaagttggtatcattaacagggcaatgacttgaccctctttcactgatcttaatggaagttgtctctagtttttaagtaaattaatgatggaccatccctcaaacagagaactttgggagtatgaaacaagactgagggcttttaaccatgggagaaaaaaggttttggtattattcatatagcataacctgaggttggagaggaccacttgggagcctgtaaccaaaannnnnnnnnnnnnnnnnnnnnnnnnnnnggttcccttgaagcagtgccaacctaaatctacctcaggtaagtagttagattaactttttcaagatttcagaccaaacaagacaacttgtattcggttgatgtattcctatgc

SEQ ID NO: 7072 - DNA, 698 bp, Macaca Fascicularis
  misc_feature (1)...(698): n = A,T,C or G
tcatttttttacaaaatatacattaaatctcagatttacaaaatatagaaataatttatccaaagaaatttgcattttaaaattgttagtattgcacccaacagtatgtctttgacacatttgcattgtcaatctttctnnnnnnnnnnnnnnnnnnnagagaaatctgaaactaacagaattacacaagctaacttttctgtaaaaaaaaaaaaaaaacttacaattttttatttacaaggaaaagttgtaaacgttcagcattttacttccacagaataaaaagccatacattcttttatcaaacctagaaaatgaactatatacacattgtgattacctcataggaattcaacgggactgatattgtgaacattcacagcccgatggtaaaaaacagaattattgaactatggaaactagtgtgtgaaagacacagaatgagaaaaatgtctggaaaaaaattacttttacctctttgaggagtttccgtaattacctaaagttatcttcaaatttaaaaggacacaccattccccagtcttaggaatgtggctgccaatagccttttctctcaagacataagacaagtgaaaaagagtgaggtctctgttcaagtcccttataaaatactttacatataggcaggcacaaaagtttgctttccaaangnnngctttacaaaatattctgcaatt

SEQ ID NO: 7073 - DNA, 766 bp, Macaca Fascicularis
  misc_feature (1)...(766): n = A,T,C or G
aagattgtcagttggaataatgaaggctgagactcatnnnannnnnntccataaccatcaccagaaaagcagccactgtgttgtgtgatgtgagctaatgcctcccagatagaggtaaataaagtcacaagggctgttagaattccggtggattgtggaactggttttggattatccttatattttcattctgattactgaggcagttctgaaaacgcctaccattgaaatagtggtgtgtcttttccttgtttaaggattttacatcatttttatgcacttgaattccaaaatcagaatctctcttttacctatcaacctttattggctattgnnnnnnnnnnnnnnnnnnnntgttcaaatgtagtcctgtctctttgtttctttagggagtagaacctgtcctttttttgatctttcatttttttgatgnnnnnnnnnnnnnnnnnnnntctctgctgcctgttctgggtgataagtgatattttcatctaatcattatggggttgggatgatcatggtgaaatactaggaagacatattctgttgatggactttttctccccaaataatcccaaatagattattttctagtgaatgatttatatctttctcgtcacaaaaatgttcctttgatttctagcacgannnnnnnnnnnnnnnnnnnnnnnnncagataaaatgatgttgacagtatttccttaacaatttatgtaaaactatgcataattttcattatcctaacttctgacatttttctccataa

SEQ ID NO: 7074 - DNA, 555 bp, Macaca Fascicularis
  misc_feature (1)...(555): n = A,T,C or G
aaatcaaggagatnnnnncagtgaactnnnaaaatacaaaagcnnnnnnnnnnnnnnnnnnnnnnnnnnnnnnnnnnnnnnnnnnnnnnnnnnnnnagtgtgnnnnnnnnnnnnnnnnnatgaaggnnacgaagtttttggatatggagggtgaaanntccttcacaccccttccaaaagtcagtcacggaccactgcaacatgccttcttgatggnnnnnnnnnnnnnnnnnnnnnnnnnnnnnnnnnnnnnnnnnnnnnnnnnnnntattgttttatgttcttataaagatgttaatcttaccctgcagttattgactttatattcaattatttacatcaaataatgaaattactgaaatgtacaaatgtcaaattttggaagtatattcaataccaatgctgtgtgagtgggctgaatatagttcattggttttgttttttttttttggtaagaaaagagactacagttccagatacacacatgtcttttcttgtcatccttccannnnnnnnnnnnnnnnngaaagatacacagctaacatgtatgaatca

SEQ ID NO: 7075 - DNA, 2034 bp, Macaca Fascicularis
cagacccacggggctgccctcccctgcgcactcccctcgctgcccgggcccggagcgcagcgcggccgcgcagattcacaatgttgaaagcccttttcctaactatgctgactctggcgctcgtcaagtcacaggacaccgaagaaaccatcacgtacacgcaatgcactgacggatatgagtgggatcctgtgagacagcaatgcaaagatattgatgaatgtgacattgtcccagacgcttgtaaaggtggaatgaaatgcgtcaaccactatggaggatacctctgccttccgaaaacagcccagattattgtcaataatgaacagcctcagcaggaaacaccaccagcagaaggaacctcaggggcaaccaccggggttgtagctgccagcagcatggcaaccagtggagtgttgcccgggggtggttttgtggccagtgctgctgcagtcgcaggccctgaagtgcaggctggccgaaataactttgtcatccggcggaacccagctgaccctcagcgcattccctccaacccttcccaccgtatccaatgtgcagcaggctacgagcaaagcgaacacaacgtgtgccaagacatagacgagtgcactgcagggacgcacaactgtagagcagaccaagtgtgcatcaatttacggggatcctttgcatgtcagtgccctcctggatatcagaagcgaggggagcagtgcgtagacatagatgaatgtaccatccctccatattgccaccaaagatgtgtgaatacaccaggctcattttattgccagtgcagtcctgggtttcagttggcagcaaacaactatacctgcgtagatataaatgaatgtgatgccagcaatcaatgtgctcagcagtgctacaacattcttggttcattcatctgtcagtgcaatcaaggatatgaactaagcagtgacaggctcaactgtgaagacattgatgaatgcagaacctcaagctacctgtgtcaatatcagtgtgtcaatgaacctgggaaattctcatgtatgtgcccccagggataccaagtggtgagaagtagaacatgtcaagatataaatgagtgtgagaccacaaatgaatgccgggaggatgaaatgtgttggaattatcatggcggcttccgttgttatccacgaaatccttgtcaagatccctacattctaacaccagagaaccgatgtgtttgtccagtctcaaatgccatgtgccgagaactgccccagtcaatagtctacaaatacatgagcatccgatctgataggtctgtgccatcggacatcttccagatacaggccacaactatttatgccaacactatcaatacttttcggattaaatctggaaatgaaaatggagagttctacctacgacaaacaagtcctgtaagtgcaatgcttgtgctcgtgaagtcattatcaggaccaagagaacatatcgtggacctggagatgctgacagtcagcagtatagggaccttccgcacaagctctgtgttaagattgacaataatagtggggccattttcattttagtcttttataagagtcaaccacaggcatttaagtcagccaaagaatattgttaccttaaagcactattttatttatagatatatctagtgcatctacatctctatactgtacactcacccataattcaaacaattacaccatggtataaagtgggcatttaatctgtaaagattcaaagtttgtctttattactgtatgtaaattagacattaatccactaaactggtcttcttcaagagagctaagtatacactgtctggtgaaacttggattctttcctgtaaaagtaggaccaagcaatgatgatcttctgtggtgcttaaggaaacttactagagctccactaacagtctcataaggaggcagccatcataaccattgaatagcatgcaagggtaagaatgagtttttaactgctttgtaagaaaatggaaaaggtcaataaagatatatttctttagaaaatggggat

SEQ ID NO: 7076 - DNA, 621 bp, Macaca Fascicularis
gcatttccatttaatacatgagaacaatacagtgggaatcctcatgccatctctcttttttcagcatatactctaccccttatctgactgtcctcttcttgtgctatggactgaattatattcccatcaaaattcctgtgttgaaaccctagcccccgacaagatggcatttggagattgcgtctgtggaaataattaggcttggatgagcctttcatgatgcagccagtgcccttataagagatatgagagagtttttggtctctttctttctgccatgtgagtgtgtccggaattggggggttcttcctctcactgacttcaagaatgaagctgcagaccctcgtggtgcgtgttacagttcttaaaaatggtgtgtctggagtttgttccttcagacattcagatgtgtctggaacttctttcttctgttgggttcatggtctcactgtcaggagtgaaactgcaaaccttggtgatgagtgttatagctcttataggcagcgcgtccagggttgttcattctacccggtgggttcgtggtttctttgccttcaggagcgaagcacagacctccatggtgagtgttatggctcataaaggccagtgtaggcccaaaca

SEQ ID NO: 7077 - DNA, 653 bp, Macaca Fascicularis
gtgctgtaagtatgggactttgtacaaatgccctttttgagggccaaaaatttcaatacactttgttctactttgtgaaccaggtctggatctgcacagagaaagtaatgctgagctgtcgagtccgctcaggtctccctcctaaccctcctctgccttcccctagtttgtttatcctcaggtctgacactgaggagtgcgtagtcttcaactgaaatggcactatagttagttctcattggaaacaaacaagtgtatttctggaacctgcttgtctaaaatagtcaatgcctttgtaaagacagcatattcaatatctattgtatggtagctagctatatacatagattgactatttttagtcctggtttgtgtattgttgagctatagtagtttgctttatccatttgtgggattaaacaatactgtttattggttgtaaacttttataaaacctctttgggttttttgtttgacccaaatataatgtaagtctcaatgacaaaatacacaaagttaaccagaggtgagtgaaaatatagcccttccccagttttgtctgcccctataatgcacgtgcattgctttgtaatatgctctcactagcatgaatgtgctatgactacttcatgaggttttaatttgtttcacct

SEQ ID NO: 7078 - DNA, 1705 bp, Macaca Fascicularis
tatgcaaaaattatgttgttacaaagtttttgtaatccttttcctaaaaagaatagtagaattaagagtgtccgttataatttatagcactacactttataggtcttttgcatcatctcttcattctacaggagatgagagatctagaatcagtgacttttccaaggtgggtgagatgggcagtagatagtggcagggtttggagtggaacctgggagtcagttttcctcagccctagtcactgctatattttttcaataaatgtttttaaagtacgttctttgcgccaggcactgttcgacatttaggatgcaatggtggtgaatgaagtagacatgttttgtgacatttgaaacttgtagtcccactccagtgctttgttcatcacttacaagaacattccttaaaaatgatagaactgacatttcttaagcacatagcatgtgctagacactgttctcagccctttatgcatagtcttcacaatagccctgtgaattaggcactgttggaattaccatttacagctgaaaaaagtaaggcacagggaggttaagtcactcgccagaaaccacccaatcagtctacctcaaaggcaaatgctcagcctgtgctctacaaggaaattcacaaaatcatctgttttacaggtaagaaagcaggagttgataatggtgagaaattcctggccactcatgtgaaatgtgtaggggaaaaaaacatagtacacatagggttcagtactacctacaatttcaggcacgcaatagaggtcttgcaattcatcctctgtggataagggacagctatttcattgcctgtaacactcttgctggaaacaacccagctggtatctgtagacacatctagcaactatgtcctggaaagcacagcagataggaagtggaggtagtctctgtagaaatggagttacttatcacttacaggtgacttggcattttgaaaagcttttagtggttttcaaccagagattcccacctctacttccagggacatttggcaatgtctgagacatttttggctgtcacaactgttgcgcagtggggtggtgctcctggcatctagtaggtagaggccagaggtgctgctaaacattctgtggtataccagacagcccccatggcaaacagttatccaacctaaaatgtcagtagtgcctggattgagaaactgatctgtgggaattgaactcagcaaaccaggcttgggactgggtctcttgaagctttctaagttaacccatgttcatccatctgtgcaataaaaaggaggagatgggaaagggaaataataataaaatcacctgccctatcagcttcagtgagttataatgaggatttcagcacaattagataatttgagggaaagtgctttctaaactactatgcagattttattataggattcgtggacttgcctccagagtttgtacatggaatgagtttttaatgcattttggatccataggagacatgaatgatcctatactttaaaagttcattttgtttttattcagaaaattggaaaggtcattctgctacataaagcatctgcatcagactccatattacaaatgaaccaaaaagcctagaagctcctcaatgcaaatatttgagttttggccagttctcatgataaggtcacattgttagcccttgagattatttaaaaaaaaaaaaaaaaa

SEQ ID NO: 7079 - DNA, 966 bp, Macaca Fascicularis
  misc_feature (1)...(966): n = A,T,C or G
aggatgtctacaaaattggtggtattggtactgttccattggagactggtgtnnnnaaannnnntnnaanggtcacctttgctcannnntgnnnnnnnnnnnncgcgtaatctgtcgaaatgtgtcgaaatgcaccatgaagcttgagtgagagctctctggggacaatgtgggcttcaatgtcaagaatgtgtgtgtcaaggatgttcgtcgtggcaacgttgctggtgacagcaaaaacgacccaccaatggaagcagctggcttcactgctcaggtgattatcttgaaccatccaggccaaataagtgctggctatgcccctgtgttggattgccacacagctcacattgcatgcaagtttgctgagctgaaggaaaagattgatcgccgttctggtaaaaaactggaagatggccctaaattcttgaagtttggtgatgctgccattgttgatatggttcctggcaagcctatgtgtgttgagagcttctcagactatccacctttgggtcgctttgctgttcgtgatatgaggcagacagttgcggtgggtgtcatcaaagcagtggacaagaaggctgctggagctggcaaggtcaccaagtctgcccagaaagctcagaaggctaaatgaatattatccctaatacctgccaccccactcttaatcagtggtggaagaacggtctcagaactgtttgtttcaattggccatttaagtttagtagtaaaagactggttaatgataacaatgcatcgtaaaaccttcagaaggaaaggagaatgttttgtggaccacctttggttttcttttttgcgtgtggcagttttaagttattagtttttaaaatcagtactttttaatggaaacaacttgaccaaaaatttgtcacagaatttgagacccattaaaaaagtttaatgagaaaaaaaaaaaaaaaaaaaaaaaaaaaaaaaaaaagg

SEQ ID NO: 7080 - DNA, 731 bp, Macaca Fascicularis
  misc_feature (1)...(731): n = A,T,C or G
agcagtcacnnnctnnnnnngnacannnnntcttgggataaggttctttgatcagtagctatgcctgccctgtagggttgaacagaggcttcgaggctgagaggtctccccaaagaacaatgtgggaaggagggaaaggccttcagagtagggtgcctgagggtgggacatnnnnnnnnnnnnnnnnnnnnnnnnnnnnnnnntttaggtaacattttttttcccccttccgatccttctgcaccaactccaacttcccctcccgggatctaagccacagtggggactggagcctccctttccccctagcagacctaaatcaatcagtttatcacaatagtgcatgctgagtagattagttccaaggaagggagactggaatggtggtgtcaaggaaaagcctccctcatcatctagtctaggaccataacgggcagaagcagaagaggttccagggtcacaggcaggggaatgagaagtacggcatatatagggaggaaagaaaagtgaagaagggggaaatctctgaagccacacgttactgctgggaaaagggtactacatgaaggattgtnnnnnnnnnnnnnnnnnnnnnacctcttaccccccaagtctagccatccccagaagccatacaaaccaagtgactcctgtagttcccatttgccccactatggagtcaggggaaaagtggaatagccactccatgtgattttagcatgtttaataat

SEQ ID NO: 7081 - DNA, 3906 bp, Macaca Fascicularis
agagctgtggacctgaatgcagtgtagccggctggcggtgacttacaccgggactccagagggagaaaggaaacgctgcaggccacttgcattgcgtcttccgctggcggtgtagacgccgacgaggaggggctgggaaaatgtgcgcagagtccgcccgggtcgtgcccgccgtagacggatgaaggagcgcggtgcgccccggcgctgaggccccgaggatcgacacgactcggacactgtcatccccacgcctcgcgctgagccgcccgttcccacgaaggctggctcgctgtctctctccgagggggagggaccatcctaaaaatatgtaaatatccaagcgctggctccagcctggggcagcagccaaggtccctgcgccgccgccgggtgttttacatgaaaatgagaagcctgatgggaaccacgctctaacttaaggcagcctggtgattagcatgagactgggcggctgtcctgcttcctgcccttcaatagccgttccgcgcgctcgcgccggagcagctctgccaccgcgcgggggtcgatcgcaggctcggcgtccttggcaaccatggctccgtcgccgcctcggccagtaagtaggagcatgcatgtgtagggggcacatgcgtgtcggcgcccccacccagccacccacccgcgcgcacgcacgcacagcgcccggaacctcggcaaggggaagattgacgaggcgctgcagtcgtggggacgacgcgggctcttcctggattccgcaggagcccgcccgccgcagctgctgtctgcagagcctgctcggatcctgtgcacacgcgcccccggctcgagcctctgtgatgaagactgcctcccggggactgcagcggaggcagagccagccagcgccagggactgcgggccgtgcggctgataggcccgcggggacacgactcggacactgtcatccccaccatgaagaagacccggagcacaaccttgcggcgagcctggcctagctcggatttctcggaccgggcctcggaccgcatgaggtcccgcagcgagaaggactaccgcctgcacaagcgcttccccgcggccttcgcgccccaggcttcgcggggctacatgacatcaggtgatgtatcaccaatcagtatgtctcccatcagtcagtctcagtttattccactcggggaaatcctctgcttggccatctcagccatgaactcggcaagaaaacctgtcacccaagaagcactgatggaacacctgaccacgtgtttcccaggtgttccaaccccaagccaagaaattctgcggcacacgctgaacacactggtacgggagaggaaaatctacccaactccagatggctacttcatcgtgaccccgcagacctatttcataactccttccctcataagaactaacagtaaatggtaccatttggacgagaggatacctgaccggtctcagtgcacctctccgcaacccgggaccatcacgccctctgcctcaggctgtgtcagggaaaggacattgccccgaaaccactgcgactcttgccactgctgcagggaagacgtgcacagcacgcatgcacccaccctgcagaggaagtctgccaaggactgcaaagacccttactgccccccttctctgtgccaggtgccacccactgaaaagagcaaaagtactgtaaatttttcctacaagacagaaactctctcaaaacctaaagacagtgaaaagcagtcaaaaaaattcgggctaaagttattccggctaagttttaaaaaagacaagaccaaacagctggccaatttttctgcccagtttcctcctgaagagtggcccctgcgagacgaggacacgccagctacgatcccccgggaagtggagatggaaatcattaggcgcattaacccagacctgaccgtggaaaatgtcatgcggcacaccgccctcatgaagaaactggaagaagaaaaggcccagaggagtaaagccgggtcctctgcccatcacagcggacggagtaaaaagagtaggactcatcggaagtcccatggaaagtctcggtctcacagcaagacacgagtgtctaaaggagacccctccgacggttcacatctggatatcccaggtggaagagagtatgacttctgtgaccctctttccagggtgcccagggagggctgcttcctcattgaacacaaaggagataacttcatcatgcacagcaacaccaacgtgctcgagtcccacttccccatgacaccagaatgggatgtgtccggtgaattggccaaaaggagaactgagatgccttttcctgaaccttctaggggaagctcccactcaaaagtgcaccgaagccacagccatacccaggaccggaggtccaggaatgagagatccaacaaagccaaggagagatccaggtcgatggataactccaaaggccctctgggtgcttcttctctagggacgccggaagacctggctgaaggctgcagccaagacgaccagacccccagccaatcctacgttgacgacagtactttgaggcctgcacagactgttggtcaccaaagggctcacattgcgtccacaagctataaagaggtgtgtattccagagatagtcagtggcagcaaggaaccctccagcgcttgtagccttttggagccaggcaaaccacctgagagtttgccgtcctatggcgaactcaactcttgtccaacaaaaacagccacagatgactatttccagtgcaacacctctagtgagacagtgcttacggcaccatcacctctgggaaagaacaaggaggaccatgacactctgactttggcagagggggtgaaaaagctctccccatctgataggcaggtcccccactcctccagggagcctgtaggacacaaggaggagtcaccaaaagggccgggtgggggcccagctgcttcgggaggagtggctgaagggatcgccaacggacgcctcgtccagcaccatggtgccgagcccagcagcttggacaagaggaaagagatatttagcaaagacaccctgttcaaacctcttcacagcaccttgtctgtaaacagctatcacaaatccagcctgtccctcctcaaatctcacccgaagacacctgctgacacattgccaggccgatgtgagaaactggaaccgtccttggggacctcggcggcacaagccacgcctgcttcccaacgtcagcaggagtcaggagggaaccaggaaacctcttttgactattacaacgtctctgatgatgatgagtctgaggaaggggccaacaagaacacggaggaggagaaaaatagagaggacgtaggcaccatgcagtggctcctcgagagggagaaggaaagagacttgcagaggaaatttgaaaagaacctcacccttctcgccccaaaagaaaccgacagcagcagcaaccagagagccacccattcagcccggctggacagcatggacagcagcagcatcacagtggacagcggattcaactccccacgtactcgggagagcctggcttccaacacatcaagcattgttgaaagtaaccgtcgtcagaaccctgctttgagcccggcgcatggtggagctggtccagccttcaacttccgagcgagcgcggacccgccgacaaatgaagctgagaagctacagaaaccttccaactgcttgcaagcttctgttactagtgtgtgatagtccttctgcctcagatcttctgtctcattcgatacagcaaagtttacgacactgggactgatgtttacatctttggaaagacaagcatctcaaccacagtttttgtgtttacttaaactgtgctgctaagtagggctagggcaaaaaaaaaaaaaaaaaaaaaaa

SEQ ID NO: 7082 - DNA, 568 bp, Macaca Fascicularis
  misc_feature (1)...(568): n = A,T,C or G
gttcaagcgannatnnngtctcaggnncnngagtagctaggattgcaggtgcctgccaccatgcccagctaatttttgtatttttagtagagatgaggtttcactatgttggctaggctggtctcgaactcctgacctcaagtgatctgcccannntggtttcccaaagtgctgaaattacaggcgtgagccactgcatcaggctgagataggtctttcttaaaggggagagggaagtggtggagagagaggagagaaaatgacaaaggaggtggctgggaatctaacaggtgtgaccaattctgctaatcaatgagagcagaagcctgtgaacttccagtcaatagactacttaattgggggaacgctttacacgttataaaaaagcactggagtgtttgcaaagtgagaaacaacagctatgtagggtaggtagcagttagtgttgtatggaagacagatatttgtgcgtttatgcattttctaagtttgctgcaatgagcatatattacttttatagttataaaacacaatgcaaannntgcccttttaaaagtgaaaaantagt

SEQ ID NO: 7083 - DNA, 739 bp, Macaca Fascicularis
  misc_feature (1)...(739): n = A,T,C or G
gcctggcaactgtgtnnnnnngtgctatatttattccaccagcaagctgggcaaggcagggcccagcnnnnaaggagatctccttnnnngagccctggatcgggaaacggaggcttccatgtgcccaccttggtggcttaagcnnnnnnnnnnnnnnnngccacgggtgagccgagcagctgtgagttgggtggggcagggctgtagcccacgccgggtgctattccaggctccaggggctggtgctcatccccacccccagcgacttcagtcctacctggcacgctgcagccctctgccggctgcggggtcctctgnnnnnnnnnnnnnnnnnnnnnnntttggtgtgggggtgggattggggnnnnnnnnnnnnnnnnnnnngagctcatgtttgtgatcctctgtccggacagctctccagaatcctgtgttgcccctgctctgcctttctgggatgggagagaacgtgagggagccggnnnnnnnnnnctacccactctgctaagggcctagcannnnnnnnnnnnnnnnnnngatatgagcccctcacaaagaccaaccattcctctaacgtaggcattcacccnnnnnnnnnnnnnnnnnnnaggctaaaactggacaaagaccgcaaaaagatccttgaacggaaagccaaatctcgccaagtaggaaaggaaaagggcaaatacaaggaagaaacaattgagaagatgcaggaataaagtaatcttatata

SEQ ID NO: 7084 - DNA, 619 bp, Macaca Fascicularis
tccctctgggatccctaaaacctgtccctagtctccagccccatatcatatcccttctggatatcagaatcacatgggtgccaaggacacgggaggtggcgggaaagagagagaagtggagtcacttgccatctcccgtgacaacaggcatggcacaaagagaatatgcagttactcattcggagcgtgcctggcttcttgcctgtctcatccatgcggtgtgtgccgccctcgcctcttctcagaatcgtgcactcactgacttcaagactcccaactcaggggctctacggtggagtgggaagggggctggggagccacagagtggccctgacccgtatggtggaggcagatggtgaggaaaccacctggctgggggagtcactgctctaagattcccccgacagagccacccacactgctgtccggatgcaagcaacatttgctttttctgggcttttaagttgaagggacatacacttttggtctttatccatagagcgggggtggcagctccgggaatatggagtgatcaccacctccccagggtgcaccctcttttgggaccagttcttcccgtgagaagatgcacattaaatccaagctgtaatttggtgga

SEQ ID NO: 7085 - DNA, 1730 bp, Macaca Fascicularis
  misc_feature (1)...(1730): n = A,T,C or G
gaaaaaatcgattgagttgcaggttgtcctcaagatggttctgccctcatgacctgggcgcgaattcagggacagggtcgccctccagaaccggagtgacaaactgtagccatacttagggaagcagacgtcaaaggcaagtacatctgcactcagccggggaaagatgtgcctgcttccccttccatcaggacgatacctttcctgaggcctctccagccatgcagtactccatgtgaagacgtgcctgcctccctgtcaccttccactatgattgtaagtttcctgaggcctccccagccacgcctgctgtatagcctgcagaacaggaagacgtattctgaagaacacggagataaactgtgataagagctcatcagcccaggatttgggtgaggtagattctggcctccattgtgatgttaactggaatacacaacattatcttcatctgcatccacttttaacttctccannnnnnnnnnnnnnnnnnnnnnnnnnnnnnnnnnnnnnnnnnnnnnnnnnnnnnnnnnnnnnnnnnnnnnnnnnnnnnnnnnnnnnnnnnnnnnnnnnnnnnnnnnnnnnnnnnnnnnnnnnccgaggtggagaggacacgacacaccctggaaggaggacgtcttcacatttcaagtcactgtggccagttctggccccagaaccaccaggcactgggaggatcagagcagacgtcagagacgtctcatgcttccagaccctgccattcccatctccttctttgttgcaatagagcagacttctggaattggcagtaaactggcatttgcgctcctagtgaaaagaaaatctgcttcagagaacaagtagcaaattccccaaaacaaacacttataattaagtagtgtgtgtgtgtcttggttataggccaccagcaatgaaagggcatagcctggtgtgaatttgcatttgaattcttaccaaggaggcaggcccagcaaaccaattaaccaattaaatcaattaaccaaacatgtaattaaccttgagaacagaagtgtcaacaacagaagcacaacaaagaaagtagcttcctcttggaattgtctactaggtttaagccttttagttttctgtcttaaaggcgtagccgcagagggaaaacattgtctgggcataagaccagtggccacgcaatgtcatcctatggactggctggaatccaaccagaggcagtgtttcccacctgttccggcccatcgtctgtaagtaaatacacaggagttttggaggacgtggtccatgaaacactggcccattcatagtcattccttatggaaacacacacgtccactattaagaaaaggggactagccggaaatttccaagacagatcctcccttggagatgacaatacctggtaattcagacaattgattctaagacaaaagggaccgagaaaggaatggcagcgtctgctaaacacagttatgcgaggctgttgtttggactgagctccgactctgggccccagcaattagcctgagtaaccagtatggagtcactcaggctaattgccacgagatctgaatgaactctgaaacaggccagttttcccaaaacagaagatacacaacaaccagtcgaaaggagcctagtgtaccagagcctgagtgacgaggaagttcccctctgttttaaccatctgtagggaaagtaaattttaaatgatcgatccaaaaaaaaaaaaaaaa

SEQ ID NO: 7086 - DNA, 900 bp, Macaca Fascicularis
actttagatctccataacacatgtactgtagaatgtgatggagaagcattgatgagaatttatgggcagttcagactgtgttttcccaacttaggctctttataaattggttaaggttttctccttttaaagggcatttcaacaatgggaattatttaatgtaacagtgggcacagattacttatcttccttctctgctttgtgactcaccagcagtaacacacactctccacatcttgtgcacctcaaatgaacagacttggtttccttgctttcttgacatttccatgactgtttcacatacaaactattgagtgaggtttttcagctgttaccgacccacgtcctactgtctctgtgtggtcctgcaaaaactgtccattcccacccctttgctttgccatttgcaagtgtctggaattgtcaagtctgagctttgaaaagtcctggttccactgacaggacacattcgttagttggaattaagacctacgaagtctagtttgtatgtaggtatgaagggaatttttaaaataaattgaaaagctgtgaacagcagtagaactttgtctatttcttaattttaaaatatgctgatatgccttaaactgtagttgtagatccttgtcattttgctgtttgaaaataaccaatgtgttttctaaaactgttgtgtaatctactttcagtgttaatgcagaattgtcatatatgtaagctgcatgttagacatttgtctttttttaaaaactaaagtaattgtattgatgtgaagcatatcattttttcaaatatgaaagtaatcacttagcaacatgcttggtaatttggcatctgttaaggtaggagagtggtgaacaggtaatctatgcatatatcactagtgccaagacataaagc

SEQ ID NO: 7087 - DNA, 746 bp, Macaca Fascicularis
  misc_feature (1)...(746): n = A,T,C or G
tagattagggaaagacattgctannngctgtttgcttactggattatcacagtttnnnactgtgttttcatgttgaatctgcaatggagagcgctgaaaaatacgatttttattttctctcctgattttaccgtcaggagaaatcaggcctgtgtaatttagatacactgattctttagcaggacaaggttcagcatacgtggcagttttactgatagtttgagccaatgaaaaaggactctgccatggaaatgtgttctgtctttaaatttagcacttgtaagccctgttccaagtaccataaagaacaagttgaacttttacatgccttatcttcttgcatgcccttccaagttattatctgtactattatcttaacatttttattgtactaagagtttataaagtattttgtaacattttcagctgattttgatccttagggcaactccataaagaaggtaaaacaagtatatcattataaacattttaggccaggagtgnnnnnnnnnnnnnnnnnnnnnnnnnnnnnnnnnnnnnnnnnnnnnnnnnnnnnnnnnnnnnnnnnnnnnnnnnnnnnnnnnnnnnnnnnnnnnnnnnnnnnnnnnnnnnnnnnnnnnnnnnnnnnnnnnnnnnnnnnnnnnnnnnnnnnnnnnnncagctactcaggaggctgaggcaggaggatcacttgaatgtgggaggcannnggtggcnnnnnnnnnnnnnnnnnnnnnnnnnnntcc

SEQ ID NO: 7088 - DNA, 747 bp, Macaca Fascicularis
  misc_feature (1)...(747): n = A,T,C or G
cttttctggatccaccaggaaaggacacaggatgtnnctnnnnnnnnnnnnnnnnnnnntattttgggnnnannnnnnnnnnnnnnnnnnnnnnnnnnnnnnnnnctggctgtagcccggctcatcggccgtccctgggcttcgtctccctcttctgagtagttgctgcctttcttcagatcaggttaccacaatgcctccccgcnnnnnnnnnnnnntcccccacacctccagccccagttacctggagcttctcagnnnnnnnnnnnnnngtgctaaaacacaagagggggnnnnnnnnnnnnnnnnnnnnnnnnnnnnnncaaccaccagaggccagnnnnnnnnnnnnnnnnnnnnnnnnnnnnnnnnnnnnggccaaccatgtggcaggtcccaggccccacccactgctgccatccgcctctgagctccacggtggtccctctaatgggaacctcctctagggagagcgatactgcacctccacccgtaggactcatatttataacaatgtgtaatggctgtagcaaaaagcccttgtttctagatgtaaatggtcaaagaaacaagcgctctattgtattgaataaaatagttcaaatgagtcctgtatcattgtatctcctattctggattagnnnnnnnnnnnnnntagactgttctgtaattaaaatgtagtatactgcttttttgtacagttttgttttaataaaacttttttttaatttgtgtttattttagtat

SEQ ID NO: 7089 - DNA, 1979 bp, Macaca Fascicularis
agagagagaagctgacagtgctgcctttagatgaaaacctggatgatcttagaagttctcccaagggtgctttctcacctataacacagagagagctacaggcagtgaatttgtgaagagcttgctctgtcctggaaaccgagccaggctccagggacacggacacactaatcacactaatcctctcacggagtttatagaatctgtggaagacaaaccctcattgctcatccagcagatggcagaggtgatggggaagcatcctgggcctccgggagagagtagagaaagagacagtcaaggtccctgtctgcaggaagcttacttttttcgttggggaggacagaggataaatcagaaagcaaccaaaaccaaaatgaaaatgaaagcagaggtgccagatgacctggggtagtgataattgctatgaagataataaaagaggggacgagtgattgctgtgcggactggtggaaagagggtcaggaaaggtctctcccagaaggtgccctctaaactgagtcttgcttggtgcacctaagccagatggggaagatttagagaaagagcacttccgacagagaaaactgcatgtgcaaaggccctgaggaaggtctgggcttgcattctggaggaatagaaggaggttgctgtggctggagcccagcaagtgatcagaggagaggagagaaggagaggaggctgaggtggaggggcgagacccatcacgcagggctgtgcctggtggttggaatttttgtaagtgctccgggagggatatgatagccataacagtctaacatgtaagtgttgacaaaacaaggaaccgtactaatgaagtgctgcaagaggccatgaaggctaagtataagatgccatcctagtaattgtgtggccaagaggagaagcaacaggaccagatggactccttaaagggggcacactggaagggggtgagtgaggcagcagagacactagtgctgagtctggctgaagccagacttaaggaggtggcagggaggatgtgcaagtgtggacagatggcagagcttccttggatctggtagaacctgaaggcctggttggtcccaagaccatcctaagaaaaggagggccatgctgggagtcggaagaaacctgcagcaggttggaagttgaatggggtaccttcacaagttctgtctattgggacctcagaatatgaccttatttggaataaaggattttgcagatgcaactaaggtaaggatctcaaggtgagatcattctgcattaggctggtccctaaatccaagggcaagtgtcctcataagcaacagaaaagacactgaggcacagggaggaaggtgttatgaagacagaggcagagattggagggatgtagccacaagccaaggatctccaggagcccccagaagctggaagaggcaaggaaggttctcctttgaagcgttcagagggagcctggtgctcctgacactttgatttcagacttgtggcctccagggctgtgagaggttgcatttctgttgtgttaagccactaagtttgtggtaatttgctgtggcagccctaggaaacactacaatgccccgtgagaagccccagctcatactgctcctgtgattatgaccctctgcttgcatctgttgtgaagagctctgctctgttcctgttttgctacactctccccctcctctcactaacccccccaccatctatattagaataagattgaattttctagcttgggttactaagctttcagatctcgaaagtgtggccattaatcagctgtcatgggatgtcgtaaacaaggggctttaaaaaccatgtttgctttttaggctgataatacttggaggtgaagctgggagagttatacataatgcatgcattttaatgggccacgcactacagccctctttagtccgaatgattcgttttaatgttcaaaataaatatcagagacaatttgc

SEQ ID NO: 7090 - DNA, 1225 bp, Macaca Fascicularis
catagtattcacttcttcaaatttagctccatagaattggagtttagacagttaaaaacactggattaatcaggcaattcatttcatttagttaaatgctgctttgtggacatacacaaatgaaacaactgctaaatagaagttttacatcttcggattttatctacctgccaaccaaatgtaggtgatcattttcaaacagccttgccattaggaactagcctcagtttgggagaactgagattcagactgggcctcaggtgtcattcgccttcagagctgaaaccccctctccagtcccacttccatctgctgttggtaaaccaggaattaagcaattaacgtgacataattagtcacacatttaattcacctagaaatgcagatacctttccatcgttttgtgtttgtccacacgttttagttgaaattgaaaaatgtgtaattatcgcttagctccacctattttcctggcttttattttgaggagggaactaaccattggggcacaggctgcacagctcccaaagtggagggctgccccctcttttcacatgggctccaactgtcctccccacggccaccgcagccttcctctgcttgatttccatttagcctccagttggtcgaaattaggcgtttgctggggagctcagggctgcgccctctgctctcccactcagcagtttattgagggcttggcagtgtgcacagaactctcactggcctgttaggagcccactcagcagcagagcccagatggcactgtgtctttctaaggtccttgccgaccactggaagttatgagaaggggaaaattattcagcccaagctgcaagcatttgcaaccagtctggggatcagatgaaaagattctaaatttaaaaaggaaaacaaacttgttctttgcagcttatcaccttgtgaatgttggtaacttacttttccataatattgcaaataacataaaatgttaaaataattccaagctgagtcttctagattgagcagaaatggtgaaaggagtattgataacttggcatatgtgatgggcccctcttgtttattttctgtgtgagtcagattgacatgtggccagttttggaaatgtgatgaaaacaaagactagatgggtatgtgtgtttatgtgttgggtggggagttgaggattgccacttataaaataaaggattttataaaatgccaaaaaaaaaaaaaaaaaaaa

SEQ ID NO: 7091 - DNA, 713 bp, Macaca Fascicularis
  misc_feature (1)...(713): n = A,T,C or G
gtcgacgagtattgncnngaaactcccggctaattgannnncgttgcttatattaagcctttgtgtgtggtgtgtgtggtgtgtggcttcatacatttggggaccctatttccactctctcctcttggcatgagactgtatgcaggatccacccgaggacaatgattgcggagcctgctcacttttacctgtttggattaatatgtctctgttcaggtaaccccgcgtcttctttcttcacccttgatcctccctgttcccctctctccacttttcacaatcaaacccagaattgcattttggttacgcgtccctcccaaggcgggaggggctctattcctgcaagacttttaggcgaacatgttcctagttcgcatttggggttgtctctttttcccattccccaaaacctcccctccgcccctgaacctcctcaagactctttgcagatctcggccttttgccaagttcagggcacgcccagattactctgggcaaacgcacgtctaagcactggggtgggaggaggccgcggctggcggggagctggggcccccaggatgagccgaagtgagtatcagccactggccgcttccctggggagggaaatgtgcgccctgggagcttgtnnnnnnnnnnnnnnnnnngattcctgaacctagtcctcctctagcccctcctcttccgagcacaaggggttattagtagttgtt

SEQ ID NO: 7092 - DNA, 782 bp, Macaca Fascicularis
  misc_feature (1)...(782): n = A,T,C or G
agcagnnnnnnnnnnnnnnnnacgcactgcaggaaagggtnnnnaagtggccacgccaaggcgttcttggagatttattcnnnnnnnnnnnaaatgatgagaatannntcttggattattatgttgcctannnaagggacctacctgagtgcatctcattggttcatgttgtagtcctgaaagagggtgatgaagagattaaatctgacatctacacgttgttttttcacatagtccagcgcatccctgaatatctgatacatctgcagnnnnnnnnnnnnnnnnnnnnnnnnnnnnnccctgactattatctactactggtgtgtgtccagcgcctccgagtatttatctcacactacaccctgctgtttcagtgcaatgaagatttgcttattcagaaacggaaaaagctcaagaannnnnnnnnnnnnnnnnnnnnnagagggctggcttcccagnnnnnnnnnnnnnnnnnnnnngcttcccccactgcaggccctgaggttgtccgtgacaccgggatccactcannnnnnnnnnnnnnnncctacccttctgctcccagttctggccctgctgtcacgttcaaggtattctcctgcctcagcctatcnnnnnnnnnggattacaggcacgtgccaccatgcccggctaatttttgtagttttagtagagacggggttttaccannnnnnnnnnnnnnnnnnnnnnnnnnnnacctcaggtgatccgtctgcctcggcctcccaaagtctttgtgcatttttnnnntagaattaaaa

SEQ ID NO: 7093 - DNA, 580 bp, Macaca Fascicularis
ctgcaagaagggaggcagacgtcaaaggcaacccaaggaaagaacctaagaacctcgtttggagggatgtcagcttgggccagcccagccgcaccccgcagggctcaggtttggaactggtaagggtgtgtggtgggggtgtgcagaagggtaagaccgaggtagagggttggggaggggaaagagagaaagtctggggggagggggaaagcttggggagatgaagagatgtgtacatgtgagagagagcgtgggggccccagacagggcaggaggtggtggaaacggggtgaactccgtgggctgtgtgaggactgtccatagtgggtcccaaccccctctctctgatggagtttcctagcccttccccccgctccaagaatgaggcagcaggcaggagcccctaccttccctccctgtcctgtgccacacttctggggccaagcccagcccccttgaaccaggccccgccagactccaagcccaccctagaaccctcctcctgtgtggagactctgttgccccactttggacacagattggcaacctgcctcaccccgccccccttcgctggggcttc

SEQ ID NO: 7094 - DNA, 771 bp, Macaca Fascicularis
  misc_feature (1)...(771): n = A,T,C or G
ggatgnnnngantnnnaccngggtcagttacacgtccagtagggggatgagcatnnnagcactccagctgtagcagaaacctggatattaagtacacttttattgaggaaatcacatgtgtgatgtgggagagaattatgagggtgtaaacattaggggctgagcatgagtaaggtggaagctgcttttctattctgtggttggcatggatatgtatgtcctcaataacctcaaggaaaataaacttcaaaagttaagatccttggccaggnnnnnnnnnnnnnnnnnnnnnnnnnnnnnnnnnnnnnnnnnnnnnnnnnnnnnnnnnnnnnnnnnnnnnnnnnnnnnnnnnnnnnnnnnnnnnnnnnnnnnnnnnnnnnnnnnnnnnnnnnnnnnnnnnnnnnnnnnnnnnnnnnnnnnnnnnnnnnnnnnnnnnnnnnnnnnnnnnnnnnnnnnnnnnnnnnnnnnnnnnnnntgaggctgcagtgaactatgattgcactactgtgctccagcttgggcagtggagtgagaccttgtctccaaaagtccttgaaaggttttaggaagttgttaaaggcttgaaatgattttggggggcaagttagggttcttacatgtttaattcctctaataactgcttattcaagagaagcatttgtgactgggtgcagnnnnnnnnnnnnnnnccataaatcccagtactttgggaggatgaggcaggaacatcgcttgagcccaggacttcaagaccagcannnaacagagaga

SEQ ID NO: 7095 - DNA, 742 bp, Macaca Fascicularis
  misc_feature (1)...(742): n = A,T,C or G
catgatcagaganaaannnnnnnaaactcccatgagactccaaagttatgtcagaggtgaataagtcatgaacttttcatgctgatatcatttctaaggttgctgccttgttagaagaagcaaaccacaagataaaccatgcagaaaatcttttttttaaaaaacttcctgaaggatggatggttcgtttgttctaattgcttgtcactttacttactagtgagtcattttttttccttaaccagtaatttgttttaaatttggtcataagatggtatgttgactagtccagtgttacaaaataattggaaaaaatatgacagacaactgaataagggaaatctggttcttgaactttcagtgtatgaattggtgatggtaagcttagtctttatgatgtaagattagatttattggaacttctttatgtccagaagttgcagcacctttctttgtctctggaatgcccaaggtctttactgcatcctgtagacattgagggtttcaccccgtattctgggtctgataatttttaaagaaacactctccttcttacccattatggagacactactaaccttgtatatacttttattagagtgctgataacaccatattacagtagcatacttacatatctgttttcttaactgtgagctcctcgagagcagggactgtgtgtttttgcttttatttcaccagtactcagaactatccacagtatagaaaagcactcaataaa

SEQ ID NO: 7096 - DNA, 698 bp, Macaca Fascicularis
gacatacatcacaaaacttcctagaactctcctttaaatcgaaagaaatttgtaaaatgtgatatgaaatacaactctacaaacattcaaaatacatttctggtcataattaatcgtatttgacattttcctctaagtttaatgcaactttaaataatttaggtttttttcctaacatgatagatttttttcagtatcagaaatggacaagaggaaactccaataaagagaaaagcaatgaatttaaaagggtgcagaatctgaaaacaaactagccacaatgtacatttaattgtacttaaatgtatatttcatttaaatagtcattctcaggggtttaataatttagaatcaatagttcccttcaaaacataataaaatatttacactttataaaatattaaccgattaacaatacagccgtgttgtttataagagtgtaactgaagtcctgcaaatcatgttgttgacacaagcctgtgaggttagcgaagtgatccttagcaaaatgtaaatgaagatcttcagacagtggtgtttataaaatagctcattaatgacttaggattgaatcgctccaaccattcgcatcatcagatataataatagtgacgaatcagacaggaaagatcctggctaaaccatttgcatttttttccagaagtactgaactcctaatatcaccaattcttctaagt

SEQ ID NO: 7097 - DNA, 757 bp, Macaca Fascicularis
  misc_feature (1)...(757): n = A,T,C or G
tcatagcaatcaggatcnnnnnatgcaaaccnnnnnnnnnnnntctggccaactttgtcaagaaggaattaattagaaggttatggtggcaagnnnnnnnnnnnnnnngagggagaactggagaaataagctcaaaaaagaccaggattgagctattcagagagttccannnnnnnnnnnnnnnnnnnnnnnnnnnnnnctgaaactgggtttggttaggaaggatgctgagtagcataaaacagaaccaagccatctgactgttcttgtcatagagattgtgtattcctcctttcctgnnnnnnnnnnnnnnnnnnnnnnnnnnnnnngaccctgcagtccaccccactcttcctgagatggcctgtgggggctgcagagatagnnnnnnnnnnnnnnnnntcttccccatgaaccaacagaataaatgaatgactgtctcccctaagagatatggtctggctccctgtggctannnnnnnnnnnnnnnnnnnnnnnnnnnnnnnnnnnnnnnnnnnnnnnnnnaacccactcttgtcaatgcctggcnnnnnnnnnnnnnnntctctctgctctctcttttctttgtatctgtctgccctttggaggcctcctgcctcttccaggagggcctctcattattctggtgcccagaattagaaagtatatgggnnnnnnnnnnnnnnnngctggtaagtgtttaacaactggttctcagccatgtagctccaacatgaattttgggtgatattttcat

SEQ ID NO: 7098 - DNA, 543 bp, Macaca Fascicularis
  misc_feature (1)...(543): n = A,T,C or G
tatatttaattngnntttcattgcctcncttcttaaagccaacaggctcagtttacaaacctgtgagcnaatgttggctgctgccctccttcccagtgaaaggtacaaagcaatgagtatcatgcatcctccccttacccctccaacacccctctgcctctggctcaggttgctcaaagcacagatcccctcttacccctgtccccaggtttgaaacacatagcctcatttcaaggtgtagccaggttccccccactttcctctgggatataaaaaagggggtaagggggcaaagagagccctctgggcctctcctcccatacacactacactgccccttctccccccatcaaaacgctcagagacgttgtgatgatgcgactgaggattatgcaacgtggtccaaccggagcggccagcatgaccagctgtccaggggctgcctcctgccttttcttttgtaaagacaagacccttgggagttttaattctgttttgtacttgccctatggggcctccactgcttttctatgggagacactc

SEQ ID NO: 7099 - DNA, 1949 bp, Macaca Fascicularis
taatcactacttctcccagccctctatttgatagaggtctgtccctcagatcagcaatgtcttagcccgtctcctctcttccattccttcctgttggtactcatttcttctaacttttaataaacgtttaggtataatacattacagtaagtgctatttagatacaaacttaaaaagatactatatattttaaggatctaagaatcctttagagaaggcacatgactgaagtacctcagctgcacagcctgtagccagtttttttatgtaaaagtaagaatgccagccttaacctagccctgcagataaaagctaacttttattattaccagccctgaataatggcagtaatccacactcttccttagagtgatgctgtaaaaataaaatcaagggcttcagattaaaaaaaaaaaacaaaaacaaacattgcctggccctgagggtctgtctgcaaaacttcttgtagatctaacttctgaacactcactgcttcatttctattcctccctgttgcagggagtaatttcttctttctctcacttcccttatcaagaacaccaaccactaagtctttgccaaattctcagacccactcaggacacgagtctctacatggcttaatagaagagagataattaggattttttttcctcagtctttctgaggtttttatttaaacgcactcagtggtcacagggcagaagctcaagctagctggggcgaagggaggacgccagggagagtatgtttctcatccctgggaggcattcagcctagctcctgcagccaaattacagcaccagagaacaatgtgatgcattcctgggcaggtcggtgggaccctgggcgcctgggccttgcggagagaggtgccagacacagagctctccgtaagcaatcccgcagagccgccccctgggtgcagaaatgaaatacgggaaagcttcacattacacagagacctgtagctcacacctggttattgatggccttggtggaggcctctgccccgaccctccacttgggaactgcctgctactacgggggttgggcatctttgaagcaatgttggaaaacaagaaagagatggttccttttcactctttgccctccctgtcagcctgagcacaaccatgaggttacacacacacacacgtgtacatatatagacacatacagaacttctctcaggctgcataggagttctgctcatcctcctctcctcaacaattaaaaaaaaaaaaacaattagatttcgatccagtaattcaaaaaggataccaatagggtttagctgtaatcaaggaatatctacaaagttacattaccaacctgcaggcaactctttggtttggggaccagaactccgctggtgggtggttgggggaaggatgcagaaagggcatggcgaggagagatcagtagtgaagaattatcaccaaaggagagtggctgagactgtacacattcacaaggctggttcatgctggagagagtgagatgtgcaccctatgtgctgagaatgatgagacagtctcctatgactgcataaggtataactgccaagcctactgcttatgacctgtggttgttttaaactcttaactgggttagaaaactggatagctttggattccagggatgacctccgtaagagagaagcactggaaaagaccaagtggtggctttattaaggtaaatatatcacagttgctacagtgaattgagctttctcagaagctattattttctttgggtgattggtaggtatagggcaatagccagtgggctgtatgcctgtccctgacctcaaaggtaaagggatagaaaagagaggagttcacaaactcattttcccacttcccactcatggcttatattatctctgagcatctttgtggctattcctcatttacttaagatgttttagtcattctggatttgca

SEQ ID NO: 7100 - DNA, 721 bp, Macaca Fascicularis
  misc_feature (1)...(721): n = A,T,C or G
ctttacatacccnnnntgctttaaaannnnnctgattacctaaaagtatcttnnnnnnnnnnnnnnnnnnnnnnnnnnnnnnnnnnnnnnnnatttatctacttaggtgtatttattattgaacactactgcatcatcccctttttcagnnnnnnnnnnnnnnnnggaattaggtcagttgttatgatgttacacattctggatttctccaacttttttggcctctgtccctagttcctgggagatggcatttaaacnnnnnnnnnnnnnnnnattatagaagctgtttgttattcnnnnnnnnnnnnnnnnnnnnnnnnnnnnnnnnnnnnnnnnnnnnnnnnnnnnnnnnggcctctagataagttatgctagtgagattacttcagataggtgctggttacnnnnnnnnnnnnnnnnnnntgatttgaagtttaggactctgagccaaataacatcagcctgtgtagaggatgggggctagagatagagttacacgtcagttcttcaatcaatcacacctatgtaataaagccctaataaaatctatgaacacaagcttggatagacttctttggttggcaagtattctcttacagctgtgtgctgggagggtaatgtgtcctgatttcaagagaaagaaccatggaattttctatctggaaccctcccagaccttgccctatgcattttctacctttggttggttttgatttgtatc

SEQ ID NO: 7101 - DNA, 713 bp, Macaca Fascicularis
  misc_feature (1)...(713): n = A,T,C or G
agtctgcaggccagattctgccttaagccattacaaatatttcagaaaacccacatagaatatacctttacagttatgataagatcgctaatgaattccaaccaaacatctctggctgagcaactcaggctgcaaggggccactcatggtggtctagagcttgattggcagtttcatcaaaaggaaatttgctgccaggaaaaaagacattcttaatctgggatcacaaagaggttatgtcagaatgcgttcagctccaagtgatagataccaaagcaaacaaccataagaaaaatagggaattttttagttcatgtaagtggaccagtttcaggcatggctggatctaggggctgaaacagtcagggtctgtgtctgtcttcaccttttttttctttttttcttttgnnnnnnnnnnnnnnnnnnnnnnnnnnnnnnnnnnnnnnnnnnnnnnnnnnnnnnnnnnnnnnnnnnnnnnnnnnnnnnnnnnnnnnnnnnnnnnnnnnnnnnnnnnnnnnnnnnnnnnnnnnnnnnnnnnnnnnnnnnnnnnnnnnnnnnnnnnnnnnnnnnnnnnnnnnnnnnnnnnnnnnnnnnnnnnnnnnnnnnnnnnnnnnnnnnnnnnnnnnnnnnnnnnnnnnnnnnnnnnnnnnnnnnnnnnnnnnnncacagcgtaagccaccgctcctggcctatgtcttcacctctttgtcctg

SEQ ID NO: 7102 - DNA, 716 bp, Macaca Fascicularis
  misc_feature (1)...(716): n = A,T,C or G
tgtacannnctgnnncnnnnagctatattatttatacannnaggttttctgttaaggatggaatcattctttcatgaaagaacaattggcaagaaataatttaattaccttaaaaagtaagaattaagaggcactccagccagataacacctcccaacaacatgaaatttagttagtgcttagtgaaattccttaaatatatatgtatatgttttattcaacattatttaatatcataactactgcttttgtatttttnnnnnnnnnnnnnnnnactnnnnnnnnnnnnnnnnnnnnnnnnnaaaactgggcagctgaaaataaaagagaataaattctattccactgtaggaagtggatttcttttcagctttctttgtatatcagtaaagaacaagaattgtttgaaaataattttaagtctgataggtatggatagcatgttacctaagcgtttaatttgtacattttgatgtctgatcatttgcatggaagagacaatagtgccactnttgaattgttctcttgtgcttggttaatatgtacttctctagattgttcaaaaagtttcaaatgacattccttactctttggttttcagaggcattcaagcaaaatatcacagtttgttttatgaccagtctaacaatacctgtgattaaatttaatttgttagtgtaaataaatttcttgccaatgagtattattgttgtaga

SEQ ID NO: 7103 - DNA, 2500 bp, Macaca Fascicularis
attttacccggctcctattcaagatgaagttgctctggttcacacgcctctgacaccaaggcaaaataaataattgtcctaataaccacaatagcattgtcaccaccaagaaaattaacgctgccttcacaacatctaatatgcaatccatattcagattttccctattttcccccaaatgtctaactgttacacatctgtttagcagttataacagtttcctctcctccgagatctacttccaatttggttgttaagtatctttagttgattttcatcaacaggacctgactttttttccatgccctcgactcttgagaagtccaggccattatgtttgtaaggtcccacatcctgaatatacctgattttcacctttcgcgtagattcagggtaaatatttttggtactgttttagcaggtgtgactgtgcctttctcactgtgttacaacagaaggcttaggatgtcagagtgttctccgctggggagccaagtttgattgtttggttagactgagggtgtttggttagaccgagatctcccgatctctccattgtaaattgatactttccctttatcataattaagtaacttaattaagtcttctgtaaaaaagagctttctcttctccttaccttttttttttagcatcatcatttatggacatagatattttgttgtatgttataatccataattgacatcattctttttgatgcttaaattttcccaaatttggtagggaattcccctcacagggccctccatgcctttctgtttcacctttgagcacttccttgcttcggcataacaaaatcaaccttcttttataggagccctagttccttttagggggcagtgatatttagaaaccaagatgtggatgctaagtctgctctttctctctgcttcttaagactgtttaacttggtatttttagtcctgagtctctatgatgtttacctccttttggagggtgaggatatctttttaaaaaattgatacacaatgtacatatttgggggatacatttgatattttgatacatgcatatcatgtgtagtgatcaaatcagggtaattaggatgtccattacccacctcaaacatttatctttcctttatggtggaacattccaattcttctagccattttgaactgtgtaatacattattgttaactatagcctaccatactattgaacactagatcttatttcttctgtctagctgtatttatgtatcattaaccaacctcttttcacatcctcttcctctctacacttcccagcctctagtaagcaccaataactttctatttccacgagatccacctttttagctcccacatatgaatcagaacattcagtctttgtcttcctgtgtctggcttatttcacttaacgtaatgacctctgtttctgtccgtgttgctgaaaatgacaggattttgtttttttaatggctgaataatattccactatgtatgtatacatttctttttttaaaatttagtttgatgaagaatttctggaaacaaaagaacagttacacaagttgcaggatggtaaccacctgctgtttcaacaagtgcctatggttgaaattgacgggatgaagttggtacagacccgaagcattctccactacatagcagacaagcacaatctctttggcaaggacctcaaggagagaaccctgtactgtggcccctctcaagtgttgtcacttgtcagcttactgatgccttagctgattagcagtcctctgcagcacaccacatttactttatgtcttacatagttatgagatcagggagcaaaaacccaagaaggtcacgaagaccagttggaacttcagtagagagagtctgagtaaaacaaaagaaaataattggattcagatgttgaatactatatctagggtgtcattgtttcagatttcaacatttttaaatgctttgatactgctttttacctttcttacacattcactgttgttaagtattaggaatgaggagctgctgtgatgttcaaggcctgggagagtgaccattagagaccattagattataatttgaattcaaagcctggtccttgcaccccttagatgtatgaccctgggcaacgtgggtataagaatagtacatttctcatagtgtcatgtgatttaatgagataatgaatggagagtgtttagcaccatgcctggtacactctaagcactcaataaatggtattcactattttcatgaagatgaagtttgacccatactaagagaccaaaacacagatgctggggtgaaggtggaggagtaggatgccaggaagaaagcactcgtgactctcaagctgtctgatctgtgacagatttttgtgagttacaactagaattgaccttatctctttgctcttaagagacaggtataggtaaatgctgctagggacttaagttgccagcatcttaaaaaaaaaaaaaaaaaaaaaaaaaaaggccaca

SEQ ID NO: 7104 - DNA, 640 bp, Macaca Fascicularis
attaagcagaaagagacattgctagatttgcattctgcagtatgacattagctatattacagataacaaattaagagagagtctggcataagtgtagggagacttaatttaggaagatactgtaggagctactgtgtgtggttgtgcagaacacaccataggggtttccattcatgtatactggttgagcatcactaatgcaaaaacccaaaatatgaaatgctccaaaatctgaagttttttgagtgccaacatgatgccacaagtggaagattccatccctgacataatgtgatggtttgtagtcaaaatgcaggtgcatggtttattcaaaccaacacatggtttattcagcatctctaagggaaaaataaaattaccttcaggctgtttgcataagatatatatgaaacaaatgaatattatgtttggagttaggtctcatctgtaaagtatctcatcatatatatacaaataaatattccaaagtcccgcaaaaatcccataatccaaaagcattctggtgtcaagaatttctgataaggagtgagtattcaacctatactacctttgcagtggtatggatgaaagatagtgttgacctagggtatagttgtgccagtgaaaatggagaaaagtg

SEQ ID NO: 7105 - DNA, 208 bp, Macaca Fascicularis
cacacccttggcacttttctgtgatgatggagatgtgaagtttgttctggattctgctattctcgaaggtggacatgaaaaggtgtactttcatccaatgaccaatgctgcaaccatgggattgagccctgaagactttctcacatttgtgaagacgacaggacatgatcccataatactaaattttgataaaaacaactaaatggcc

SEQ ID NO: 7106 - DNA, 671 bp, Macaca Fascicularis
  misc_feature (1)...(671): n = A,T,C or G
tgcacagnnnnnnnnnnnnnnntttccaatgcacatgaaaatgttgtcactcctctgggtttcactgattgtatcagccaaaaaggaaaggcaggagggaatttagaattccttttgcttgtttgatccatttgtttacactttatgttgatacattgatttaaaacgtagtgtctgtgatttatagctcttaggtaggatgaaggaaaatgtttaatttatacaaagaacagtattgtttgcattaaattattccattttgtaaannnnnnnnnnnnnnnctacatgaaagatcttaagttatggcattattatcattgttattttattttataatattattctcattttctgtcgatcagaaggtgtgatttatgatgtagcacaatgattgtgtttattgctaaccaggaattattatggattttatgattttaatgaaggaatgaaaatggaattgccatttgggagttccctggtattgatcttagctgtgttccctaattttctgtgtacaacaatcatctgaggatgcatgttctgccctgaagcccaatggatacatgnnnnnnnnnnnnnnnnatgaaagctcctgggtgggccagtaacccccaggatgtcaaatagtggatggacatatagttcaaaagcntgtaaactttctaaagttc

SEQ ID NO: 7107 - DNA, 4279 bp, Macaca Fascicularis
tttactgtcacttctcctccaggagtcaattttacagctcgatcccagtcatttgctgtcttgcctgtgactaggaaggagaagtcgaccatcatcctggctgcttccctgtcctctgtggcctcatggctggctctgagctgtctggtgtgctgttggcttaaaagaagcaaaagcagaaaaacaaaacctgaagagattcccgaatcccagactaataatgaaaataatcatatccacacctcatccaaatgccgagaatcacaagggcccaaaaaagaagacactgtggtggcagaagatatgagaatgaaggtcatgctgggcaggctgaaccagtgcccccaccagttgatgaatggagtgtccagaaggaaagttaaccgccacattatccgagaggaagaggctgctgtgcctgctcctggtactaccggcatcacatcccatgggcacacctgtgctccaggtgctcctgcccagcaggtgtacctgcaagagactgggaactggaaagagggccaagagcagttgctcagataccagctggcaggccaagatcagctgctgctgctatccaggcctcagacaagagaggcagcagttgccagggcaaagttggctgagtaagcaaagtggcaggttggggctttcccaagagaagaaagcctcctgtggggccactgaggcgttctgccttcattcagtatgcctggaagctattcaggagcaactgtgatcagggaaggtgtgggcatttggtctgaaaggcagaatcttccaaatacttctggataataagcaggggaagtgaggactgtcctgctgggacaactaagaagagagaatatggactccgaatccctgtttcaactttaaaatggaaaacagtaatataaatgcttatagactgaaaaatgtctgatacatcttttgcagctatcacgatcctagtacattgccagacaaatgatggcacttgttaattatttaccagtttttaacttaagcctgacttcaacaacttaataatggcataatattgacttataccagcaggggttattattaagcattctctggattgaccacccacaatgctttcagcttctcttatagaagggatcatgaaaaggtctggtcagctacagttaattccacactgttggagaaaagcatttctttatcctgtagtaacatttgaagggacagttcaacaccctgctctgtgatctgtcagagcttaccttccaaccacaaggcaacttcctggctttttacaagtggattttatttcatggtttaaattcaatcattattgagagcctacagtagtgtgagcatatcaaatttgcacttcatgagtatttacacatgaaaattgatattctcatgggctttgctgagagtttagttaaggacaaagatgtaaaaataccaaatttgggaaaggaaattgtctatggaccactgttgtgtttttcagtgattctctccgttagtagctgggtcacatttacaactggaaaagaactgcattgggagatcagatagccaagcggccaggtggatgatcagctaactcctttatcagataactgctttttggagaagatgatgcataaaactgtgatacgaaggagaggagggattatgtcatatgcaactgctctaggctgtgctgggggtttaaatggagatcataatgaaggcttacctggtattgatacatttggtaagggtgttaaaggcagtttcaccaaattcacacatttgtatagggcccatttcttttcaaactgaagaatactttaaacagcctgactgtgtccttggctctggatccagaagaccttatgctccaagcatgtaaagaaaagatggcaggaatgaggagagcctccaaaaagagattgctctcagattttcccgaaaatcctgaaaaccaggattttccaatctctacaacgttaatgggttgttgtgtggttgagttggaacagagaaaggaaacacactctttcattgctgaaatctaaattatgatgccctggaattagtattatgggaagtactggcagaaagctgttatgtctgcagggcatcaagggggaggtgtgtctcaccctactaccaattggcagaaatgttttaacctcttctttaggcatctggtgagtatttcagatcttcaggctgtccctgaaaggaggtaggtagctttgtctgtggtcactgtgttggatctggaagaaaatatgagtagacgttaaggccagtgctccccaagagatttcagtccaggctatctgtgttcagggaaggatttgcaagaaattggtttatagaagtttactctggaggcacaagctggctgcctgctgagtaagtcctcttcgtagatgatgtattttgcttgggcaccaacagaattaaaaacaaaaaacaaaaaataactcgaatgacttaggcagaacatgccttccctagtttaattagtccctgttataaccagttatttatctttcttgtaggttcttggtctgtgaaatcatttgcctttgcaatctctactttagtacactcgctggatcctcaaacagctgtaagctttttggacaaaaacatttcagaagtgaagacttttgaggattataaaatggtggcagtcttagtccttgccctacctcagtttacctgcacattctttctttctttcatttctgcagattctttcaccactttttaaatattttttccaggtatttttcctgagctctataccatgcataaatagctgcctagtgagattatccagtaggttatcctatagctactatgaagttaacacagcactaaaacctgctcctccttgtgtttttttcccaattcagtgaatgacatcactgcactcagaccagaaatctagaagtcagtcatgactcttcattctatttcacccttcgcaaagagccgccagctctgttatttctgtcccttgtttacccttctcccaatttttattatcttcttatttatcccctatgcatcacaagacgcatctttctaggaggcatgttttatcctatccctctgtttaggaataaccataattatcttactaattccatcccagaaaatcctgtgatccctgaggccagaattgactctttgggcctaaatagcagctataaacatcttcagtaacttgccaggctctagcatgtggcatggaattttggcatctagctaaaatccctcaacgcatagttaagctagtcctctttctcttaaaaaaaaaaaatcagagaattggggaaacactgaaagcaaagagagagtagctctacattcattcatgtctggagatgagccaatttgagcaccactgtaggccaaccctaaatttattaagatcattaacatgggtcacccagcaaatacttcccagcagcgacaatctacaccctttatctaaataaatattgagatgtactttattcctgtgttagttcaaagaatctcctcttgcctcccattgctgattttctgtattgatggactcctttctctcaagagattggacaagctaaaagtctagagagttcaaaagtgtttgaaagtacattttaactgttctcaccacaaaaaatgctatgtatgtgaggtgatacatatgttaattaattcaattgatccattccacaatgtatatatatttcaaactatcaagttgcatatgacaaatatacacaatttttatttgtcaaataaaaaatgtctataaatatttgtggatgtcaaaattgaggaagaagtatatgtggagctaccgttgttttggccatctctccatgctttttgtttggggagggggacttttctgggggggcaggaactgtgttcagggaaagtacctgaccaacagaacttcatgtctcttccagagtgagagactcagcttatctgatcaaggtggacttgcccttcaatggacttgctcttggtactgcccaatgaggccaccgaggaccaagatttgagctctctcagggcccacccctttcaacaatttagttgaatgactcccttccatctatcagtcttactccaaatatgtgacattactatatattgaaatgcatgcaaactatatgcaaaaatgagtatgaggaaatcaaatgtaaatcatatgcaaatattattcaaccaaggttctataaaattgtacatgtcaataacagtaaagaattttaattaaaaaaaaaaaaaaaaaaaa

SEQ ID NO: 7108 - DNA, 702 bp, Macaca Fascicularis
  misc_feature (1)...(702): n = A,T,C or G
tttgcatattttacccacagcttaacatcctttttannnnnnnaannnnnnnnnnnnnnntcaaaattctttcaaccaaataagaaaaattcaaaatcgtaaacccgtaagaaaacaaattaaaaacggtgatgaaaatacgtcactcctctcgttaggaacagtgtctnnnnnnnnnnnnnnnnnnnnnnnnnnnnnnnnnnctttacagcgtaggcacgtgtttccacctttgcgggcttcgcctcctcggggcctggggctcctggaaagctcgggacgcggcggctctggctcggcagcgccacccggtggccggaggcagaggcggccgggcggagccgtcgcggatgcgggcagactcaggcttgtttcccgtgaactgcagcgacgaggccagaacagcaagggcggtgggcggacaggtgctctgaagagnnnnnnnnnnnnnnnnnnntgatcttcccgatgggaggatggagtacagcggcggccactgccacaaggggtgactcctgccctgctgcccgctttactgggagtctggggtgtggaggcgcgtgggtggtgccatctcctcggctaccttccaggttggctgagtctgagcacgcagcggggcctccctcccaagcaccaagccttgtttcctatgagtccccctcttggcaaactcctcactgggagacctcctcgggtctg

SEQ ID NO: 7109 - DNA, 735 bp, Macaca Fascicularis
  misc_feature (1)...(735): n = A,T,C or G
gtcagtccttagtttttctattggaaaaaaaaaaaaatcatttaaatgatcttttgttcacggctctccttaatgactgagtgaacagttcctatctgtatatttgactaaaccttttcctaagctatctctcatggttcctatgtttttttatcataattaaaagcaaaaccatctggatcacctaacagtcagaggtcagtatctcagcgtgtgaattacagagtaaatacagagagaacctcttccacttttacttttcgtccaaannnnnnnnnnnnnnnnncagaagttgaagatcgggttgaggattggggctagctcgatgacactaaggccccgacatcgcgggacgggacctgctgtggcgtggattcttaggaacgcggttctagccggccccctctccagggctcgccgtggccggcgttacttcctagttcttcttgtaaccctgaggtgccagcacggggagggaggagggatcagggggctgaggatgcaacctctgacgttctgcgccttcctaggagagtcttacatgtgttgagatttcacaannnaatgcgnngttgtaaaataccagctatacaagaagctaggctctgtgacagcatagttctcagtagctttatcacaatattcacaatggagaattatatgacatggtagcagaaataggcccttttatgtgttgcttctattttacctcaaattgtagatatagggaacatc

SEQ ID NO: 7110 - DNA, 714 bp, Macaca Fascicularis
  misc_feature (1)...(714): n = A,T,C or G
aggagaatcgcttgaacctgggaggcagaggttgcagtgagccaagatggcannnctgcattccaggaaaaaaaaaaaaaatctatgggctctatatactgtatatttatattgcagtacattcaggtgctaggcttttattcagtaaattacagaaaatattaaagatacaaagcagaaagtaaggcaatattaatgaggccttagtcaatctcagatagcttcaccaattcagctcctaaaaaggttgcttatgaagtgtgaattgtagtgatagctactgtttcatggtggtaaatattcgttttgacttgatgtacattttctgtttaaacattggagtcatcctgatagacatctttataatttcctgtcacaacaatatgtgggacaggcgtggtggcccatgtgtgtaattccaacgctttgggaggccaaagtggaagaattgcttgagcccgggaatttgagagcagtctgggccnnnnnnnnnnnnnnnnnnnnnnnnnnnnnnnnnnnnnnnnnnnnnnnnnnnnnnnnnnnnnnnnnnnnnnnnnnnnnnnnnnnnnnnnnnnnnnnnnnnnnnnnnnnnnnnnnnnnnnnnnnnnnnnnnnnnnnnnnnnnnnnnnnnnnnnnnnnnnnnnnnnnagaagagtgagaccctgtctcaaaacaaaaaacccaacatattgtgaattatcttccaagcagtaa

SEQ ID NO: 7111 - DNA, 721 bp, Macaca Fascicularis
  misc_feature (1)...(721): n = A,T,C or G
ggagtcacttgcatgagtgtgtttcgttagaaaaagtcatcaagctgtacactaggacatnnnnnnnnnnnnnntatggatatagatgtaaattctacttcaagaaagagagtttttaaaatccaagtacagaacattgtagaaatgtgcaaacttggtatttggaagtttnnnnnnnnnnnnnnngggatgatagctcacgcctgtaatcccagtactttgggaggcccacaccgaatgatcacttgagctcaggagtttgagaccttgactctacaagaaaatttaaaaattttccagggcacagtggtgcttnnnnnnnnnnnnnnnnnnnnnnnnnnnnnnnnnnnnnnnnnnnnnnnnnnnnnnnnnnnnnnnnnnnnnnnnnnnnnnnnnnnnnnnnnnnnnnnnnnnnnnnnnnnnnnnnnnnnnnncttgtctcaaaaataaatttttttctaaaaaaagtttcctgttttttttttcttcccatattttttaaaacataaaattgaaatcttgcaaatataatacataacatagagaatatagaaaattaaatcttctaatattgttctgcagatttgatctttcttctctcataataaatcaaggcctctgggtatatttgtttggatatgtacaggaaaaggtctgtaaggatttnntntcnnntgttaatggcagttactctgggaattttcacttctgctttctacag

SEQ ID NO: 7112 - DNA, 131 bp, Macaca Fascicularis
aggaaatggcaaagcgcggttagagaaatgtgacaaaaatttttacatatggcactgttaccactctcacgccaaacactgggtgcgccggggtagcgttatttgtaattaacatcaaaagagtagatatg

SEQ ID NO: 7113 - DNA, 572 bp, Macaca Fascicularis
  misc_feature (1)...(572): n = A,T,C or G
atcatttatcttgtggaaaagaagattcaggcgnnnngaggtctcannncnnnnnnnnnnnnnnnnnnnnnnnnnnnnnnnnnnnnnngcaaccccatcgagnnntccctcacctgggaaccctcactagcaggactggtggtggagtctcannnnnnnnnnnnnnnnnnnnnnnnnnnnggttcacctcacacaagcacagaccccagactttgccaaaggcannnnnnnnnnnnnnnncccctccacccccagctgaggcctggtcacttggtcaggacagagcaactgcatctaaaagcacaagacagaaacctgtaagctatgaccccacccccnnnnnnnnnnnnnnnnnnnnnccacctccttagggacagaccctggcaggtccctgcccatcgagatttcctcatgcgtgcattgatctgggaggatatgggagccgagactcaagattccatcacagcctaggtgtgtggggttgggagtcnnnnnnnnnnnnnnnnnntatttgcaccttgtcctgtgtctgaggtcnnnnnnnnnnnnnntcctctgccctgggacatctg

SEQ ID NO: 7114 - DNA, 749 bp, Macaca Fascicularis
  misc_feature (1)...(749): n = A,T,C or G
ttggattacactaatgtgctcatctgttgttttaaaagtttnntatcaggnngggcacgnnnnnnnnnnnnnnnnnnnnnnnnnnnnnnnnnnnnnnnnnnnnnnnnnnnnnnnnnnnnnnnnnnnnnnnnnnnnnnnnnnnnnnnnnnnnnnnnnnnnnnnnnnnnnnnnnnnnnnnnnnnnnnnnnnnnnnnnnnnnnnnnnnnnnnnnnnnnnnnnnnnnnnnnnnnnnnnnnnnnnnnnnnnnnnnnnnnnnnnnnnnnnnnnnnnnnnnnnnnnnnnnnnnnnnnnnnnnnnnnnnnnnnnnnagcaagagcaaaactctatctcaacaacaacaacaaaaagtttggtatgtttctctnnnnnnnnnnnnnnnnnnnnnncagaccgcagcaaaagcttttgtgaaaaccaaatgtgttcatctagatagtaagtaactcctatttttnnnnnnnnnnnnnnnnnnnnnnnnnnttccctgtggaaactccctgttactacatcctaggggagaaagcctgtggaatatggtggttattgatgacgttgcctttgtttcatctttgagtttgtcgtttgtgggatctagtgggataatgagcactgacagaactcttaacagcgtgctgtattttttacattgaaaatgttaatgacttatttgatttgtacataactctgtaaataggtgatagtagatcacagctgacatttacaaaatgtttttgtaccnagaatttctg

SEQ ID NO: 7115 - DNA, 712 bp, Macaca Fascicularis
  misc_feature (1)...(712): n = A,T,C or G
accgggaatagtgtctcaccggctccagaantnntgaattgttttcactgctgttccaggcctggcggtccccagacaggacattagaagcctgtcctgggctgttcactcttgcctgagaggtgtgccttcgagatagttgacttttacaacacatggatcaatctcgttttgtaaaatgtgatagcagcccaatggcatttttacaactgtgtttgttgggnnnnnnnnnnnccttgaattagctttaaaatcctcaattctgtggaggttgaagaaagactatttacgtgatttggatggatttctggagactgtttacannnnnnnnnnnnnnnnnnnnnnnnnggctcaccggttccggacttagtggggaggtggcaattggcagtgttccagtaggaatctagtaatgacttagtctcttccttgcttttccaatttttttcctgagctctcttcccccaaagggaaaaaattnnnnnnnnnnnnnnnnnnnnnnnnnnnnnnnnnnnnnnnnnnnncactcctggaaggcggctactagcccggcaatgggggctacccctggaagctggatgcctgttccccagtcaatctgtcctagannnnnnnnnnnnnnnnnnnnnnnnnnnnnnnnnnnnnnnnnnnnnnnnnngggcatttcccacacattacttcagggaaagaattcaataggtgaaaatgaaaa

SEQ ID NO: 7116 - DNA, 698 bp, Macaca Fascicularis
  misc_feature (1)...(698): n = A,T,C or G
ggcaagtnntagatgagcttnnnnnctccatttcacctggtggtctgtggacacacagagggtgggggtgagcaggcagtgtgggtggggaggggctcctgatgctacctcccccnanntcccttacaaactctgtacctctcggtgcgtggcagcctcttgctgtagttcttcttttctggatatgactgtcagtttcgtcatgagatttcttgctctcatttcgaactctttctttcttccactttctttgggggtgacccccgatccatgccaggtcttcctgtgaagacaactccaacctcgtttccatttcttgaatgttgagtattacaacatcactgcgctagggtgcttcatggtgctgttctcgaagaggccagttgggctgaatctccctcctcccactggctcctgatatcttgctgtattttgtcttctttctgatttttcccttggggtttggggtgggtgacttaggggcggcttttgtgttctccctctctctctcttttctgtatgtatgtatggactggctaaagtgagtttgggcagctgactttatggtatgggttggctgacttttgttcaatattaaagacaaaccaacaaattgtacagctgcacacagaacaccctcgagtgtgaactgaatgcaactagaggcttactttttgaacttcaggtatgtactcaaa

SEQ ID NO: 7117 - DNA, 730 bp, Macaca Fascicularis
agttttccatcccatcgtttcttaatcgctttcgtggatggatgatgggtgctgttcatttccgttagatgtatgtgaaggcacggtgaaaatggaaatgtttttggagctacttcctcaaatgtgtccttagtcacctcagtgcaacagctgggagggggccgtgttaagattttttttgcatcaaagaggaggtggcaatggtagatccacccttacgcttcccagtttagcataacctcttttggattttcatcaaattcagcgtattggtcactggaaagagccttttccttcttttcttactctcccctcttggtgttccgctcttaaaggagaggagcttttaattgacagtcatcacctcatttgctttccaggaggccatgcaagataggcaggactacagggttaatctcctttttacaaatgaggccaagggaagcctcattggttcacagtcatgcagctcatactgtccacccttgtattctcagatgcaggacaattgcattttagttttattttgtggaggtacagaatatttactctttctgtccaacccttgattctgccgaggaagacactgatggtttgatgagtgattcaactctgtttttggctaagggttttggagttgatagcaggggtctgatgaatccaaatgagctctagacattatcacagactgaataaatcttaactgtctcctacatgtgtgttttcaaat

SEQ ID NO: 7118 - DNA, 640 bp, Macaca Fascicularis
actatagcttgtgtctcctccctgggcgcttgaggtcaggcttttgcctctttgtcgcattgagccacatgcccttgatacccagttgtagcaaagaagggaggtgatgaacttgcttactttcttctctgatgtccctccctgcgcatcctgcacattcgcccacaaccactccccaccgaaacccagatatgttatagtccaaggcttttagaggattaaggaaaggagttggaggtgggttttacttagttcacagaaaagctttctttgggatttttcctcccccttagggcttttaagtctaggtgaagtgaaagttcacgtatgtgtttgtttggttcctctgtaattagctactagtttttatccctagaccttctctgctccaatgtcttgtccatgtgtcctgaccctgtgtccttgaattcccactttgctttgggatttaagttattgtatgttgtcaacaatatttaaagatgaaaaagttctgaaggaaacttatcaggttctttcctttggctttttttttctttcgaggtactgtaaattgttaactagggatgccaagcaggcttggttcaatggctaaacctcttattgtattacagtgtaatgctgatctcagcctggtctc

SEQ ID NO: 7119 - DNA, 213 bp, Macaca Fascicularis
ggtgagagaggctgggtgggtggcccccgccctctcccgggaagcatacacgaggtgcgcgaggtttcactgttttttatatctccaacacatcttctctaaaaaggcaattttatgtggtttaacccagtagttttcaaattttaacacgtgtaagaatctcataggagttatttaaaacatagatccctggccccacccccagagagtgtg

SEQ ID NO: 7120 - DNA, 743 bp, Macaca Fascicularis
gagtcacagttgtggtacagccatttgcccagggctgctcgtgagggggatgatggaaaattcagcagtgtaaactcgctttaaacaaggtccgtggatcccgaaatgctgaatatcacgtagctgggttgttgggtcagcagagctgccatctgcccacgtctggataacaacacacggtgagtcaccagttggctacgagaattctccactttaaaggcactgtgagcttgtctctaagatacatacctctgccttttgtcttttgctgtaagctttgacctgttgcagatctgatgaaaatacaacctcttattatacagtttgccttgattataagccatagtaaatcgagctgtttgcattttgcaggccctgcattttctactaggaggttcatcgaaccttccacttagcaataccccgactcaggcagaatgccttgtaaattagccttcaaaagaaaagtgcacgctcagacagtgtgtcgaggagcaggagcgtgatgcagacaaggacttagtcatgactgattttctttggccactttttaatggcttgtggggaacattgtaatcttccgaactgacatgttggcagatatagaatattaggatgctcaaacatctctaccatgagtccaaggaatttagctccctgttatcactttgttttggaatgttttttataaaaatgcaactaaatacctcactataaactgccatgatgcctcagtaaaaaaa

SEQ ID NO: 7121 - DNA, 751 bp, Macaca Fascicularis
  misc_feature (1)...(751): n = A,T,C or G
attggaacttannnnnnagatgacggcatggggaggtggggcnnncgggaggtgatcaggccatgaggnnnctgccagccccttccatnnnnnctcccacgcgaggatgctgcagcgaggtgctatcctggagacagagagccctcagcagacaccaaatctgccggcacccagatcttggacttcccagcccccagatctgtgagaaatgagttcctgttgtcaccatgagactccatggtattttgtagaacagaccaggacagcacatactgaatcacagtgaccacctgctgtcatgaaggctgcagctgcaacccaagtaccaaagacagggctgcagtccagcccccagtgaaacttccttggagactggagctcctagcggggtctgaatctgcactgaaatggacagaaatggtgtaaatgttcacattttaactctgacttagttaaggaagggacacagctgcttctccaccagtgtccttgagcgacacagagctcacagcggctgcctgtgggaggtgggcagacgagggccgctcagctcaggcaagggtgagggccagctgcaggcgccttggccagcagagccttgttgaggagcacagaggacttttaaaaaggggactgaaaatgtaggcagacaaacagtctcttgagttgaaaacaagtgacacataacttgggtttttaagccttactgttcttcagcacactctctttcatttactcttaatcccagaat

SEQ ID NO: 7122 - DNA, 708 bp, Macaca Fascicularis
  misc_feature (1)...(708): n = A,T,C or G
gaaaccattgtctagtcctaggtcctaattctcctttgnnnnnntctaaatgttttttattttacatgttacatttagatttatgatctattttgagttaacttttttttaagtatgaagtttatgttttttgtttgtgtttaggagcatatggatggatgtctaattgttctagcaccatnnnnnnnnnnnnnnnnnnnnnnnnnnnnnnnnnnnnnnnnnnnnnnnnnnnnnnnnnnnnnnnnnnnnnnngggtctatttctagactttttgttttctcccattgatctgtacctctctccttttgccaataccacataaatcaagatgactatagctttgtaataagtattaaaatctggtaatataattcttccaattttatttttcttttaaaattattttgactattgtatcagtgttacctttccatttaaattttaaggttagcttatctacaaaagtnnnnnnnnnnnnnnnnttggaattgcattaaatctatagataagtttggggagaatgaacatatttatgatcgtctttnnnnnnnnnnnnnnnnnnnnnnnnnnnnnnnatttgcatgtttagtttcttcagcattttatagtttcagcatacagatcctgtacatattttcttagatttgtaactatttattttcttggagctgttgtaaatggttttgtttttctgatttttggtttcca

SEQ ID NO: 7123 - DNA, 703 bp, Macaca Fascicularis
  misc_feature (1)...(703): n = A,T,C or G
gccacagataatcttccccctnnnnnnactgcactgaagggggccactgggctggtgtgaggctagcctggggtcagcaagcctgaagaaatggccgccctacccgtgacagtttcccaagacaaaggaatggtctcagcactgaannnnnnnnnnnnnnnnnnngccagtgtgcaagggaagggacgccggctttgcttatccgcagannnnnnnnnnnnnnnntactgctaagctcataaatacnnnnnnnnnnnnnnnngacgaggactgtcgtgggcagctcaagactcctgcgggtccgtggggccacccgctgtctgttcctcttcaggggacctgctatggaagtcaccaccttgnnnnnnnnnnnnnnnaccatgtaggggagagggtgatatcacctctcagggccttggagaaggtaacaaactcttctcaaacatgtgacaaaagaaaatcaaaagttgactttcccgtttccttatgagcgctgtgccctcaaaccgtgaactcccctggcctccagtctggcttcccggccccaagctgatgcgcgctcagggactagctatacattgtaatggctgcctgtgcagaaagtaatccagaaagaaaatctgcgccccactctgcaatgtcatataatttatccccaggcaaatatcaattctgggtttatttgtatctctgcttccttccc

SEQ ID NO: 7124 - DNA, 1033 bp, Macaca Fascicularis
  misc_feature (1)...(1033): n = A,T,C or G
caatgctttgatcacnnanaaatttgtttgaataacacannntctcatnnnacnngcagtttaattggaaagatgtgtgtgagtatgtgtgtgtgtgtttgtgtgcacgcacgccttgagcagtcagcattgcacctgctatggagaagggtattcctttattaaaatcttcctcatttggatttgctttcagtttgttttcaatttgctcactggccnnnnnnnnnnnnnnnnnnnnnnnnnnnnnnnnnnnatcagctcctggattttttttttttcttcaaacaatagtttgaaacaactactggaatattgtccacaataagctggaagtttgttgtagtatgcctcaaatataactgactgtatactatagtgttaacttttcaaacagcccttagcacttttatactaattaacccatttgtgcattgagttttcttttaaaaatgcttgttgtgaaagacacagatacccagtatgcttaatgtgaaaagaaaatgtgttctgttttgtaaaggaactttcaagtattgttgtaaatacttggacagaggttgctgaactttaaaaaaaattaatttattattataatgacctaatttattaatctgaagattaaccatttttttgtcttagaatatcaaaaagaaaaagaaaaaggtgttctagctgtttgcatcaaaggaaaaaaagatttattatcaaggggcaatatttttatctttttccaaaataaatttgttaatgatatgttaccaaaatagattgacatcagcctgattagtatgaattttgttgataattaatccattcctggcataaagtctttatcaaaaaaaattgtagatgcttgctttttgttttttcaatcatggccatattatgaaaatactaacaggatataggacaaggtgtaaatttttttattattattttaaagnnnnnnnnnnnnnnnngtgctgtatctattactcttttactttggttcctgttgtgctcttgtaaagaaaaatctaattccctgaagaat

SEQ ID NO: 7125 - DNA, 830 bp, Macaca Fascicularis
  misc_feature (1)...(830): n = A,T,C or G
actnnnncggtaccaaannnnngacaagaannnnnnnnnnnnnnnnnnnnnnnnnnnnnnnnnnnnnnnnnnnnnnnnnnnnnnnnnnnnnnnnnnnnnnnnnnnnnnnnnnncttctgttgaggagtttgaggtttttaagaagctcctggctcgggaggaggaggagnnnnnnnnnnnnnnnnntgatgacaaaagggcaagtctggatgaagatgaggatgaagatgatgaggaggacgacgaggcggaggatgatgatgaggatgaggacaacgaggaggaggaacagctatgatggaaggcctagagcaagggcccagagataccaaggaagcttttcattctcttaaagcttttgggtcctttacttgaatcttcttaagttattttttattctaaaactggtctcttgatgaaaaaaataagtcacctgagaggcagacagagcaaaccaaaccggaaacaggaaatgcacgtttgatctgttgtcaggtgtctgtgaggaaggccctgtcccatcctgaatagaacacttactttgagctcttcaaatcaagggcactcaatacatcaacctttggttttatttttttctcttttgaatatgttgatgataattctgtgacagttggaagatggggttaattcttctggttcaggaatcactttatatttccttctagtgataaaaataaaattacgagaaggcaatgtgaggttttagtacatcatagcactttattttatgaaaaccgtgtagcaggctttccacagaaatacttgtttttaatccaaaagtcnnntgcttagtgaccccatcttccaac

SEQ ID NO: 7126 - DNA, 734 bp, Macaca Fascicularis
  misc_feature (1)...(734): n = A,T,C or G
cagaaagcacnantnctggagccaaggaggagactgcggccaccctcaccatgaccaacagggtgcccagtcctctctccacggtggtatccacagccacaggcaacttcctcaaccgcctggtccccgccgnnnnnnnnnnnnnnnnnnnnnnnnnnnacatctcccatgtggccgagggggataaaccccagcacagagccaccatctgcctaagcaagatggatatcgcctgggtgatcctggccatcagcgtgcccatctcctcctgctctgtcctgctgacggtgtgctgcatgaagaggaagaagaagaccgccaacccagagaannnnnnnnnnnnnnnnnnnnnnnnnnnnnnnnnggactacttcaacaggcatgcagtggagctgcccagggagatccagtcccttgaaacctctgaggaccagctctcagagccccgctccccagccaatggcgactacagagacactgggatggttcttgttaaccccttctgtcaagaaacactgtttgtgggaaacgatcaagtatctgagatctaacttcagcaggcatcgctttgccattcctatttttagtcnnnaaattataaatatacaaatatatgtattataaatataacctgtgtgtaaccctgacttaatgagaaacattttgagctttttttcctatgaattgtcaacatcttttttacaagtgtggttaaaaaaaaaaactttacagaa

SEQ ID NO: 7127 - DNA, 737 bp, Macaca Fascicularis
  misc_feature (1)...(737): n = A,T,C or G
aacatccaatagaagctgtgcaattatgtaaaattctcatcaactgtcttcctcaaaataaagaagtatggtaatccttacctgtatacagtgcagagccttctcagaagcacagaatatttttatatttcctttatgtgaatttttaagctgcaaatctnnnnnnnnnnnnnnnnnnnnnnnnnnnnnnnnttttgtaaaagaaatcatgtccatacactttgttgcaagatgtgaattattgacactgaacttaataactgtgtactgtttggaaggggctcctcacattttttgactttttttgtacgtgttttttctttttttttaagttctgatgaggaggggagggtnnnnnnnnnnnnnnnnnnnnnnnnnnnnnnnnnnnnnnnnnnnnnnnnnnnnnnnnnnnnnnnnnnnnnnnttctctgctatatataacggtgctgtgagggagggggaacgcatttttcaatatactgaacttttgtaccgaatttttttgtaataagcaatcaaggttacaattttttttaaaatagaaattttgtaagaaggcaatattaacctaatcaccatgtaagcactctgnnnnnnnnnnnnnnnnnnncttggttttatggttacttcttctcttagattcttaattcatgaggagggtgggggagggaggtggagggagggaagggtttctctattaaaatgcatccattgtgttttttaagatagtgtaactt

SEQ ID NO: 7128 - DNA, 744 bp, Macaca Fascicularis
  misc_feature (1)...(744): n = A,T,C or G
agtagctgagactccaggcaccnnnnngccctggctgattttttaaaaactgtgtgtagagatggggtttcaccatgttgcttaggctggtctgaaactcctggactcaagggatctgcccactttggtctgccaaaatgctaggattacccacatcctagcaccaactttatcacttctgatggcattaggacacacaggccatttataagagcagtgtttgagacctcgtgtgtgtcacttcaaagcctcttggccttcatactaaagtcactgctgtggtaaccactttcaagtagggctgaaccttgcctcttgctctggggacggctcacttcctgcccctgggcttctcaacagctgcaggaactgcctagcacttgggtatgtacaacccagaagaggtgtggggttaccccatcccctcctcaaagaaattcagaggcacagtgtgaggataacttccatcttggatgctaatctaccatgttgacttctnnnnnnnnnnnnnnnnnnnnnnnnnnnnnnnnnnnnttttacctattaaaagaacacacactcactgtaaatcctggcaaattataggctatgttgcaaacagcgttcttgcctttccctgaggagttgacttcagtgtctcacatgttccttctgaagcatgtaaacccttttctctatgtcatataagccctgagtcgggagtaactgcggggatccactgtctcgtcactgcctgagacatgg

SEQ ID NO: 7129 - DNA, 718 bp, Macaca Fascicularis
  misc_feature (1)...(718): n = A,T,C or G
ttccatgcagaaataccaataagcattaaaaacaaattttagaaaactcctgacatgtgaataaatttcttgaccagctgtcctccaggaaagtttgaattccaacaacatattttcaggaacatgctgttgacagcattaaaagtagctattttatgtatttatttttaatttttaaaaatttcagtaggtttttggggttcaggtggtatttggttacatgaagttctttagtggtgatttctgggatttgggggcacccatcagccaagcagtgtacagtggactcttatccctcacccccaaccccttctactgagtccccaaagtccactgtatcattcttacacctttacgtcctcatnnnnnnnnnnnnnnnnnntgtagttattttnnnnnnnnnnnnnnnnnnnnnnnnnnnnnnnncctgtgctcttggcccagatttcagctcatggcaccgagcgtgatcactgaggcagtctcgatcactgtcgcctgacccctctgaagttcccaagaggatccactcatgatgagctttctgctggccaagacgtgaagggcaactggcactgtgggcttcagagaatactaaggacggtttcagggctttcaaattgaaatctagtgatccataaagcccctgtccgannnnnnnnnnnnnnnnnnnnnnnnnntcacgctttcctganctnataccgtccgttttcctgtc

SEQ ID NO: 7130 - DNA, 629 bp, Macaca Fascicularis
  misc_feature (1)...(629): n = A,T,C or G
tcnntgcatcannnaagnnncnnnaaaggcccgtgtacacnngctgtcttccttcctcannnccaatttcctcttcaacccactgcttctcgactcgctctactccgtggaagggctctcacaaaggcacgtgggccgtggcctggctgggtcagcnnnnnnnnnnnnnnnggacgccgcggaagaggccccgatggggcccaccaccctggacccaagtcttcttcctggcgggcctctcgtgtctttcgtggtttgggccgaagccatcacctggattcttccgtgggaacggacctcggacgtgggaccccagcccccctccagctcgaaatcggcagactaggatggaagtgccctgtgagctggggggccctcaaagggccaaggagaaaacgcaggccgagggaccagcnnnnnnnnnnnnnttcgagctccaatgacctccgctcaccccctcgaaatgtctggaaaacataatgggcagattttctgtcttcaaagtttccgggtaaacctcttcaagttctttattgtttgggactgagacactcagccacggtaatgggtagtttcttttgtatttgccccgaaaggccaaaatatttttatattgccacagacaaagc

SEQ ID NO: 7131 - DNA, 698 bp, Macaca Fascicularis
  misc_feature (1)...(698): n = A,T,C or G
taagttttcagtagtacaataggtaatcaataattggcctcttgggactgtgtaacattttgatgtttgtgtgttctgagacagagcaatagatttcctctgtatcttttaaacattaaggtctcttgtataagaaaaataaccattgtgggttttttgtgcatcgtatactgatacgaaacaaagaaacaaaaccccctggatattttatctttagaaacatagaggaagatatgagaagggaatggtcattgtaaattagatagatatattgagtgttagaagattatttaagtaattgttcttttgttatttgtactctgcaaatttatttaaaagcatatccatgtatatcataagtattcacgtgcatgtctaaatttaatttagtggcatagatctatttcaagggtattaatctttcactcatgtactgctttgtgttttattttcatttaaaaaatttggaactagtggctgggcatgnnnnnnnnnnnnnnnnnnnnnnnnnnnnnnnnnnnnnnnnnnggtcgatcacctgaggtcaggagtttgagaccagcctggccaacatggtgaacccccgtctctactaaaactacaaatattaggtgggcatggtggtgggtccnnnnnaannncnnnctacttgggaggctgagacaggagaattgcttgaaccctggaggttgcagtga

SEQ ID NO: 7132 - DNA, 1886 bp, Macaca Fascicularis
  misc_feature (1)...(1886): n = A,T,C or G
caactgaaataatttatatggacaaacaggcatggcacatgctgtataggacatagatatagatcactgtctgacatatttcatctacattttaaattttaaaaggaaaagagtgtctataaacaagatcttttctgttaaatatgtaaattatgaggtcacttagcactaaagtactgaccatatgcattatgacaggaatttgacacctgtcattggaaatggtacttagaggccgtataatacaacaaagttgaaggaggagaataagatgtgggtaggaggctgtaatttataattcacagtgctcaagaatgacccgtcctgggtgattcaaaattcctatctttgattttaggatttacatacagtgaaccctactagtaaacaaacttgattagggtaactggtagcgttagcagaaagtggagaatatatgtatattcttacagtgaatttttagttgaagtagatgtcctatattctaaaagacaacttgtaagttaaatgtaataaaattattttattacattacacctgcaggtgactttatggaagaatttcattctaatgcttgagtaatgtagtatagaattgctaccagttatactgttttcagattaataattcgttgcatatgagaattcatctaaaaaggagtagtgtctttctgtttctctatgtgattattttgccccaaaaagcttttcatttttttaagtagcacaaaagctgtaattggcatgctttgtaaggaagtgtcagtgtgcaagagagtggcgatcactaagaattcttttacgtgttctttcccctttgcaccaccgcctcctcagcagggtcactgagatcactagcttttcttgaaatggccattttcactggcaggtgcattataccctgtattttcagattgtttttccattctgaatgtttggcaggttgattgctctggctgcattgacggagaaagggctgacaaatgtggttgggctggctgaaaagacagtgattactgttttcctttgtggctgattgaggcccttgaaaggaaaaattttaaccttcaccatttggttcaaaagtatgagcatatattgaaatcactcgtgccatttatcctagttctgtaaacttgtcagaacgtaaaaatcgctcaatttcaagtaatgtaggattggcatacgtcattatcattttgattaagttggaggttgtatcattgtgtgcattatacagtgtcatttaaagctttctttccacaggtacagttatatttttattgcttatactatagagttagaaagattttcatagctctctaaacctaacactatgtgtgtggtttggcagctggtgtggcctacaagctgcattttgtttgcagggtaaaggcttgtctttaggcctcctggagtgctggtaatttgcacagacccgccattggggannnnnnnnnnnnnnnnnnnnnnnnnnnnnnnnnnnnnnnnnnnnnnnnnnnnnnnnnnnnnnnnnnnnnnnnnnnnnnnnnnnnnnnnnnnnnnnnnnnnnnnnnnnnnnnnnnnnnnnnnnnnnnnnnnnnnnnnnnnnnnnnnnnnnnnnnnnnnnnnnnnnnnnnnnnnnnnnnnnnnnnnnnnnnnnnnnnnnnnnnnnnnnnnnnnnnnnnnnnnnnnnnnnnnnnnnnnnnnnnnnnnnnnnnnnnnnnnnnnnnnnnnnnnnnnnnnnnnnnnnnnnnnnnnnnnnnnnnnnnnnnnnnnnnnnnnnnnnnnnnnnnnnnnnnnnnnnnnnnnnnnnnnnnnnnnnnnnnnnnnnnnnnnnnnnnnnnnnnnnnnnnnnnnnnnnnnnnnnnnnnnnnnaaaaaaaaaaaaaaaaaaaaaaaaaaaaaa

SEQ ID NO: 7133 - DNA, 699 bp, Macaca Fascicularis
  misc_feature (1)...(699): n = A,T,C or G
tgagtgtactgcatgtagaaataggtggtnnngnctcatgaatattctgtttctgcgtgttcatataagtgtatattttactttgtattttgttcgttttttaggagacggtcttgctctggttgtccaggctggagtgtagtggtataatcatagctcactgcaagactccttgaatccctgggctcaagcaatcctccatccttggcctcccaagtagctgggactgcaggcacatgccaccatgcccagctaatttttttttttttaaatttttgtagagacagtgtcttgctatgttgcccaggctggtcttgaactcttggcctcaagcagtcctctcgatcctcccaccttggcctcctaaagtgctgagattacaggtgtgagccactgcacctggcttacttatttcgtctgctgtctgttccactagtatttaaagtcttagagggcaagaatttttgtttatttccttctcttcctccattcctttcttcctcttctacttcgttcactactgtattccacataaaatnnnnnnnnnnnnnnnnnnntgttcaatatgttgaaggaatgaaagaagttatatgacttgagttgcaatataaaatgtatattttttttactgtgagttatggcaaaaaagttttgaaagccgcttctaaatnnnnnnnnnnnnnnnnntttgtatgaccc

SEQ ID NO: 7134 - DNA, 700 bp, Macaca Fascicularis
  misc_feature (1)...(700): n = A,T,C or G
attaaatgannnaaaaactcacctatatgaaacatttannnnnnnnnnnnnnnnnnnnnnnctgattttgttatttgatatgctaatttgggcaacgtaatttacattctggcagtcagtgtagataactaaaagcccagttaagtattttataatttcaggctactgaggccatgcttgggatgttgtttgaaagaaaaaaaatacacttgacatatttcacatttctgtaccttcatctgtacttccagtaaacatgtggatgatttgatgagggataaatgaacctatttcttttacacacataccaaggacatgcttgtggctaaagtgagttgataatgttgtgcaaaggatagttgtcaccaactcatttctttatggtccataatgaaataaacattttgtatactgttaattctgtaaacagatgcatgttcaaaagatctatgatggtcttgtaatcttaatctaatatattttagatattttaattttttccctcttggggaacacatttagtatagtgtagaaaatacttcattacattttcatataaggttatataacttttcatacataaacatgaaatttgttgtagaaaattctttaaaccaaacatttaaatctaggacttcaatttaatttgtttcttgaatctatttttatgtggcccttaaaaacatatccaaaaaaccca

SEQ ID NO: 7135 - DNA, 672 bp, Macaca Fascicularis
  misc_feature (1)...(672): n = A,T,C or G
cagcaccagnnncggggannnnnnnnnnnnnnnnnnnnnnnnnnnnnnnnnnnnnnnnnnnnnnnnnnnnnncactgagcccccttctctccccaggcagagttgcagcagaaggtggaagagaatgagcacctgaggctggagcnnnnnnnnnnnnnnnctgagagggtgcggctgtccctgctggaggagaagctggtggacgtgctgcagctcctgcagaggctccgggaccnnnnnnnnnnnnnnnnagccctggggaagattnnnnnnnnnnnnnnnnnnnnnnnnnnnnaccccacccacgtggggaggcccagccccgcannnnnnnnnnnnnnnnnnnnnnnnnnnnnnnnnncctgccagctgttgaggagacagccctccnnnnnnnnnnnnnnnnnnnnnnnnnncgccaaccccctcctcgtnnnnnnnnnnnnnnnnnngcccagcctgtgggcaccctgctcagcctgactgcctttggaccagcctccatgannnnnnnnaccactgacagctggtctgaccaccgtcacatcatcagaacttgagtctgtgctggctccttccaaggttgagcccaagcccagagcctcccactgcagtgcctggaagccaccccttccttgggctcctccacattccctcgtagcccctgcattc

SEQ ID NO: 7136 - DNA, 740 bp, Macaca Fascicularis
  misc_feature (1)...(740): n = A,T,C or G
atnnnnnnnnnnnnnnttaaaaaaaaaaaaaaaaagtcaagaaacttttgggtaacactgcaattacattacttaaaattgataaactgcgaaaataattggaactcctgcttgcaagtgtcaacctaaaaaaagtgcttccttttgtnnnnnnnnnnnnnnnnntctgattgacttcaattgctgnnnnnnnnnnnnnnnnnnnnnnnnnnnnnnnnnnnnnnnnnnnnnnnnntctacgctctctnnnnnnnnnnnnnnnnnnnnnaccctcttctggaaaggggtacccattattactttatggggcagcagcctggaaaagttcttggggaccaaagaagnnnnnnnnnncctgccctgcattttatcaaaggagcagggaagaaggaatcatcaaggcatgggggtccacactgcaatgtttttgtggaacatgaannnnnnnnnnnnnnnnnnnnnnnnnnnnnnnnnnnnnnnnnnnnnnnnnnnnnnnnnnnnnnnnnnnnnnnnnnnnnnnnnnnnnnnnnnnnnnnnnnnnnnnnnnnnnnnnnnnnnnnnnnnnnnnnnnnnnnnnnnnnnnnnnnnnnnnnnnnnnnnnnnnnnnnnnnnnnnnnnnnnnnnnnnnnnnnnnnnnnnnnnnnnnnnnnnnnnnnnnnnnnnnnnnnnnnnnnnnnnnnnnnnnnnnnnnnnnnnnnnnnnnnnncacgcctggctataacaacattttcaaagtggca

SEQ ID NO: 7137 - DNA, 1908 bp, Macaca Fascicularis
agaggggtgggcgggttgggaggcgacattgagttctttccgagggtttcagatgcttccttaggatttcgctcttgtgttcacaattctggacggctggcgtttttgtgcaacctagaacaaagacggggacggaagaggagggggctttgggggggttccataggggcagagacagggtatcgagttaccaagaagtgggattgaggtttctaggtgaattgctggggttttttgagaaccatgtaggaatggatgtagaagaaagcaaacgaggcctttgcttacctgcaggagtcattctgatcgttcatgccacgtgagagggttttgttaacgttagtttttggcttaggtcctttaaggtcttgaacatcggtttcctgacttgagcagggcccatgcccctgccgaggaggctcaccctggaagcagctagccgatttcctatcacccccaccacgaccctgcgaggatctctatttgactttgctccttcaggcatccacctagaaaatcattgagtttgttcatgtcacaagtgtaagtatttttctcatgcgttcatcattggcacgtcctcctttggcaatattaaaatctactaacaaatgggaaagtaacatttgcaccatcttgccatattcaagaactttgtgcttagttgaaagtgcagcttcaagcttaggactacccaccatgcccatccaggtgctgaagggcctgaccgtcacttggtaagaacagaggaggctgcctgttactcatggtgatggtgagaaggtggacgcagacaggctctcctgggccctgcaggtggacggccgggcccctgccttgtgcctcatctcaagaactgctgctgctggctgacctgatccgacctgacaacgtgccatcttcagctaccactgcgaggccctgagggcaacagcagcgcggcactgcccacctggctgctggtggcctggtgccagctgggagtcctcccagcacttcgaggccactgagccgcccttccagccctggcccaccatggagaggggtatccagcttcctcttcaacctcatcgtctgcccctgagccagtgactcccaaggacatgcctgttaggttacccagggcctgtaccagcgccagctggtcaagggcatgacgttgttctaggccgtcctggacatccaggccattgccaacagcaggctgctttccatggagccagaggctgccaggctcacgctaggacccaacccagtgcacaaggacctggctgttgagccgcacaccctggagaaggtggatgagtgggctaccaagggcttcctgcaggctaggggaggagccagcctgctcccctgttctgaccaggcctgcggggaggagctgcccatatgccaccatgagacctgggcctggctcccgaggacagataccgcctggtctggtgctccaggggtgaagcaggccagaatcctgggggagctgctcctggtttgagctgcagtcaggaagtgcgggacagggtaggggaggcaaaaagccttgggcagtaccctccccgtggagccattcggcatctctcgagctggccacaccctgacactatgttcaagggctccggaagagaggggtgtctgtccccaacctctcccccgtgggtgtcactggccagacgtcatgaggggagcaggctgcgtgagtggacacttaccatgagtccctggggggagtgattcccccaggcattgtgtgccatactacatttctgtccaggcagcagggtaggtgggtaccatgggtgcccacccctctgccacatggagccccaaagcactgcaggacaagcagggagaccccacacccatgacataaaagcatcttgaagctttaaaaaaaaaaaaaaaaaa

SEQ ID NO: 7138 - DNA, 743 bp, Macaca Fascicularis
  misc_feature (1)...(743): n = A,T,C or G
cagcaaacacacacacacacacacacacacacacacacacacacacacacacgcaaagacatatttaactgttaacaaggacgtttgagcagcaagaaaagaatctcagtnnnnnnnnnnnnnnnnnnnnnnnnnnnnnnnagcaaaggcatgtggaacttctttatttcaaaacaggagtgtctccttgcacttagccttggtgactccaggggagatgacacgggggaggaagtgtgtcacctacttctttatgcctgtttggctctgaagcccatgtgtgcctggatcctctgccaagggttaaattttcaggtgaagagtgaggtnnnnnnnnnnnnnnnnnnacttcccagctctccctcaagannnnnnnnnnnnnnnnnnnnnnnncagctctgggaaaaagaggagcagacagggttccctgggcccannnnnnnnnnnnnnnnnnnnnnnnnnnnnnnnnnnnnnnnnnnnnnnnnnnnctcagaatcacttttcccatctgtaaaattgagatgagttttggtgttgaaggnnnnnnnnnnnnnnnatgtcctagaaggttttagggacagtgacagagtcaggccactgcaagggccatgggagccagctgacctgcttgaccgaaggatttctgacaaactatctttggggatgttttcctcttcaagaagggatataagttatttactttgggcatttaaaagaaaatttctctggggaataatttatag

SEQ ID NO: 7139 - DNA, 700 bp, Macaca Fascicularis
  misc_feature (1)...(700): n = A,T,C or G
atgctgaccagactgnnnnnnnnnnnnctcaatctnnnnnnnnnnnnnnnnnnnnnnnnnnnnnnccaagaccttcccatttgaatgactagatttccattctatccccgatcatccttttgaaatagttctagtgataaattcaaataaattcaatatattgattgaattttatttttttgctttgtatctacaacaaaaattgatttgttcatttttattccaannnnnnnnnnnnnnnnnnnnnnnnnnnnnngactttgcactcgagaaaggtttgtttaccagttttgtannnnnnnnnnnnnnntcttagcaaatagaaaccccgtcttttcttttccttctttatatgttcttgcagttactcttatcttgcaagattttctgacttctttaagctttgagactactgcatcttaaaagaagaactaggctgactggcagaaagtcttgccggtggccctgtcactcccatgatgctttggttttgagagttgggaaaactctgagaactttaagggaaccaaactcaggaatcccaaaattggtggcattgtgccattcgtttaggggctgaacataggacctgtctgaaactgagtgaactagatgcatttgggtttgaatttttnnnnnnnnnnnnnnnntaagtcagccctaaataaaacactttattttatttttctttttttaaata

SEQ ID NO: 7140 - DNA, 670 bp, Macaca Fascicularis
  misc_feature (1)...(670): n = A,T,C or G
acccagcaacnnnantcctggatgcatcctagagaagtgccatgtgaacagagaaatgagttgaagacttcactgaagtattgtttaggtagcaagattgggannnnnnnnnnnnnnnnnnncagaagagtggataaataaatgggttgtttttggtccttggaaagtgaatatgaaagagttatgtctcaacacagatagatgaaaaattatgctgagaaagttggtgaagctacatacaaggtactgtttgtgtaaagttaagcatactgtgtatctgtggccacgttacttcaacttgtttttcaccttttctataaaatgggatcgtagtggcaatctcacagggtgattgtgggtggggggtggtcaatgaagtaatgcatgtgaaatgcttagaatagtgtctagcatgtaagcattgtggacatacagaaagtgttattgttttgcacagtaatctattttctgtggattcaaataatatgaaatgaaatcatgtattggaatgatgtgtgcaagtcaccattctgccttcctaaggcaggagacctgatggatttggggagggtacatgggggcttcagttgtgttttctttctttctttctaaaaattgatgcagaggcatcagaatgttaagatattaacaggatagtgtggtgggttct

SEQ ID NO: 7141 - DNA, 782 bp, Macaca Fascicularis
  misc_feature (1)...(782): n = A,T,C or G
gaataagttcagtgtctagcctcaccnannnaccatctgtcctttcccagcctcgctggtagtcctggccaaggagatataggcttactccattcctcctgacccacctggggcactcactggcagcagctgtgcttcagtggaccaggtggctttcaactgcttgttagtaaactgcatgtgacactgttctcacctacaaggctgacctctgaggactggagcaggctctggaggggacccgagctctgcatgctgctgccgccacagagaactgttctcagcagcagcagcagccaactggccctcctatctttggctcagagcacacgcgtggcttgctgaacccaggcccaggtgtatcgccaaggccccagctttgagaagggggaaggcccctggtaagttattaatgcccccacatttcagccactgctctctttccaaggccttgcatggaaaggcctactagccattgtcccaggcagcaatctttggcctctgcaggtggtagcagcctttcaccaatgctccatctgtgaagagtctcagccataactttgggctgagcctgggagaagtaaagcaactgttaaggccggcccttgcccctcggccctaccataaaaggaataagccctagactgactcctgcagcacccccgggaaaggctgggaccagctgtctgtctccaggtagcagagtccctcctcctccaacctttccaacctactttgtttggaaatactgagctacacttcaaaatgtatcaagagatcca

SEQ ID NO: 7142 - DNA, 1789 bp, Macaca Fascicularis
aacatcaaccctgtcctgttttgaagactatacgaaacagaagtgaggctgaactacgatatattcactctcctctgtgaaatgacttcatattggtgagtcattaatcaggtgatcaggaaatgtggtttttggcagacagttggggtcatgcagcttgatattttggagaagtagaaccctctcctcttccagaggacacctcagggcgtacaaagtgcaaaacataatgccaaacatacaagcatgaagaggaaataatttagtattttgctctcaaggaggatcacattgtcttctatcagcattttaatgaagcattgagacccccatctccttaggttttgcagcggcactttcttccagagggagtgtgagtcctgtgctgtctcactggactgcctgtagaagagacccaacttcagtccagagccaattatacagacgaaagagggaaacgattgagaagatgcttcactccgctttcttgaggtatcattgatatacaaagaactgcacacagctaatgtgctcaactgtatgacttcggacatccacaaacactcatgttaccgtcaccacaatcaagggagacatgagacatcaatcaagacatgtaaaatgaacatcggtttggtcaaaaaatgtgggaccacccaaagcaaaagcgggataactgaagcaggaggaggcttccagatcacagcctcttttgaggtgtaagaacacaacattcttcccctctgacatgccatcttggacacagacccagctctcacccaataccaaacctgcttgtgccttgatcttggacttacaacctccagaacttctgcggagttattgatcattctgacattccaagatcatcatacccatcctccacatctatgctactatggatccaatgagcagaattatactaaatgcctaggaagtacttacaagaaccagagaaacagagaatttgaacaaaatttcaagggtccactacttcagtgaaattcctagaagtcgaatagtcaagagcatgtagagatagctcttcaaaggaaaaccgaaggaatagaaagagattgagaatccttgtaaaaggctacttagcaagaacaggctaatgccagattttcagcaaggataaatggacaaataaatatgatgtatgcggactactatatccacagccttggcaccatagttcttcataaactcaaattcccactctgccttctagagccataaagaaggcaaggaggaagtgggagaggcagattttttgctatcggacgagaagtaaaccattaatgtgtaagcgaactgaacacctaccggaattacacattcaaacgactcccttttcatccatgcgtcttttagtccagaaagcaaaacacaggagaagggttctgattatcttcgctttggcatcaccctgaggctatgctggggaatgagaggaagccctaggtcggggaaaagaaagaggaaaagctcaggatgcctggaggttccacgtgagaagctgcaccgatggagagacgcctttaaatgactgcagacccaaggggaggaggagagtttgctggaaagatgatgggcctcaggttaatctgcttgaacacccacactgctcaatttaccttgttggtgcgtcaactttatctggtatattttctccaccgtcaaagcgaatccttactgcagcaaaagaacagaggtaccttgttaataaaagcagtttctcagctggcatgtggttggcccatgcttcaatatcaaaaaaaaaaaa

SEQ ID NO: 7143 - DNA, 1127 bp, Macaca Fascicularis
  misc_feature (1)...(1127): n = A,T,C or G
tgatggttgtcaannnnnnnnnnnnnnnnnncggctgtgatgagattattgatagagagtagttacatgctgttaaaagaggaggaaactacttgaggagggacccaactttccgctatcttttgggttcattccaaatagttttgtgccattgaaaaacttgaccttcaaaaaaatttgtttttcagaatagaagacaataggacagtgactgcacagttgtgaaaaaggagaatcattaaagaaaaaggaaaaaagattttaagaccgttgaaatctgttatcaagaatgtgctaaaacacctatggctttgactttgttattgatccagattattttccttgcattggggaaaatatctttcatatttgtttgctgtaaagatggttttgcaagaataagtcatgaccaagacaaactgccaatacaagagcccactgatattaattatataatgagaaaaaatgtatccaactaggacacatatcttttgagttatttggactgaaagtttaagaaaacttgggaaattctattttgtgatctagtcaagccgtagttatcaaaggctaaattttcagtgtaagacaaatgaagtattcttcattattccaaaaggatgagtaaactcaaagatgtatcacatgtgctctgtatctnnngatgtgtttccaagagcgtctgaaattttgtttgtacatgtatcttgatcatttataaagccactgtgatatataaatcaagaaaattcattgtcataaccatttttaaaagtcaaaaattaagacatctttaattaaaaactttcaaatctagacactaaatgtgtgtgaatgtacaaannnnnnnnnnnnnnngctgttatatactagagaaattttgttttgcttgctgttttaacttgcaaggtgaaatactttagttgaacttcatattgtaagaactgttaataaaaagttgtcaagtaaaaagccctatatctaaaaagactttatgaacagttattctatcaacttttaaaggttttaaacctacccagaaattaccttggtatctgaagtttccctctgtctcctcctctaattaagcttgttatttgttatgcannannnattggagataataa

SEQ ID NO: 7144 - DNA, 606 bp, Macaca Fascicularis
aaccacagacaaagtcccctcaccaataacaagacaaaggcccctcaccaatcacagacaaaggcccctcaccaatcacagacaaagcccctcaccaatcacagacaaagcctctcaccaatccatagacaaagcccctcaccaatcacagacaaagcccctcaccaatccacagacaaagcccctcaccaaccacagacaaagccccctcaccaatcacagacaaagcccctcaccaatcacagacaaaggcccctcaccaatcacagacaaagcccctcaccaatcacagacaaagcccctcaccaatcacagacaaaggcccctcaccaatcacaaagcccctcaccaatcacagacaaaggcccctcaccaatcacagacaaaggcccctcaccaatcacaaagcccctcaccaatcacagacaaagcccctcaccaatcacagacaaaggcccctcaccaatcacaaagcccctcaccaatcacagacaaagcccctcaccaatcacagacaaaggcccctcaccaatcacagacaaagcccctcaccaatcacaaagcccctcaccaatttctgtctcccaacttgattgctgtctctgt

SEQ ID NO: 7145 - DNA, 346 bp, Macaca Fascicularis
  misc_feature (1)...(346): n = A,T,C or G
tgatgtttgaaattctcgtgaaaatccctttaggaaaccaggtgtgaaaagggctcaataacttcgcagaatggcatttttacctgactggaagtgcttaaccggaattgtcttttattatcagtatttctaaaatgagaatttaaatactgtgcttactgtgaaatatatcagttggtgagccnnnnnnnnnnnnnnnnnnnnnnnnnnnnnnnnnnnnnnnnnnnnnnnnnnnnnnnnnnnnnnnnnnnnnnnnnnnnnnnnnnnnnnnnnnnnnnnnnnnnnnnnnnnnnnnnnnnnnnnnnnnnnnnnnnnnnnnnnnnnnnnnnnnnnnnnnnnnnnnnnc

SEQ ID NO: 7146 - DNA, 144 bp, Macaca Fascicularis
tcttacatggctcgtgggggccactttgcagcctttgagtaaccagagttgctcgctcgggacatccgcaagttcctgtcagtgatggagcagcagtgaccactccacaccgccccctgcctccctccacatgtgccatccagg

SEQ ID NO: 7147 - DNA, 685 bp, Macaca Fascicularis
  misc_feature (1)...(685): n = A,T,C or G
gcaggttatgttaaagagcngnnncannngagaacagtgtttcattgnnccnnntccaaacaatgaagatgtcaaaatgcacgagatagcgtgtacaagtactcacctgcctttccccatgggcaggctcagcagcaaaannnnnnnnnnnnnnnnnnnnnagagcccacgattccaagcatttcctctccgatgctcctctttcctatctctcttaattgcaaaaggaaaatatgacggtctgactctctggaattgatgggtaagccttgaagggaagaatcactttaggttaggtctctttgccgcttattgattgtgtgactttggcttagtggtttcctgttattattctgcggatgatatttttccacggtgagttaccaaaaccccatccaacaagcagaggtccatctttgaactccctgtgatgaatatgtatctggacttttgttccaccttggttgggtggcacattatagatattaaaaaacgtgttggaatgagtacatacgtgcagacagtggaataacagacactggagacaccaaaagatgggagggtgtgagggaggtgagggatttaaaaaaaaacaacaaacacctattgggtaaaatgttcaccatttgagtgatggtcacacagaatgcccagatttcaccactgcactgtctatccatgcaac

SEQ ID NO: 7148 - DNA, 712 bp, Macaca Fascicularis
tggctttaggttggcccaactgcctcagggcattggcagctactgcaatccttatagaagatgccaacgagctaggcttaggtcagaagttaatagttcgggtgccacacgctgtagtcaccttaatggagcaaagaggacatggttggctgtccaactctagaatgcttaagtatcaagggcttctgtgtgaaaatccccagataacactggagaatgtaaataccttgaacccagctaccctgctgcctgtggaggagcccgattggaaggatggtgggttgcctcactgctggcaggaccttccccactgttgcataaatacggtggatgaagtgttctcgagccgggaagatctcagagatacccccttggagagcccagatgttgaatacttcactgatggtagcagtttcataacagatggggtgcaatatgcagggtatgcagtagtgacccaacactcggtggtcgaggctcaagccttaccttctgggacttccgctcagaaggctgaattaatagcattaaccagagcactgttattggccaaggggaagaaagtaaacatatatactgactctaaatatgcttttgcaactctgcatacccatggggcgatatacaaagagagaggacttttgactactgaaggaaaagaaataaaaaacagagaggaaattttgcaattattagaagccatatgggcttc

SEQ ID NO: 7149 - DNA, 659 bp, Macaca Fascicularis
aggcctcagggtgactgtgatcaggactgaggatggacaaggtggcccaagtgtggctcccagaccccaaggccccacaacctcccaggtgcccgccatgatgaccctcaggtggcagtgaccccgtcactgcacaagacattttctcctgctgagcagaaggcatcatcccctgcaactacctcttcctacaacgtctttctcccctggtaccaaaaagaaccctgtacctcctcctcctcctcccacctgccagtgcagtggccttggtcttggaaactgaagggagaaggtctggcccccggggtggggctctcctttccctcccccagccccactgtcagcactggccctctgtgaggttcgatacttgaacgccccctgccctgtgccttggacctgggcaaagctaggaggaggaaacagcacaactcacagtttgagctggggggtggtctcggcaaggctcctgtctgcacccctccctacacttctcaaaagaggtgcacagcctctcgggtgacttggaaactcctggacgaattccattctaacttattttgacatgtatacaaaccaactgtttagagattccacttgtgcaaagccctactgtgtttttatgttcctgttaaaaagagaagtttactagcaataat

SEQ ID NO: 7150 - DNA, 538 bp, Macaca Fascicularis
  misc_feature (1)...(538): n = A,T,C or G
gccactgcccttcacnngnnagtcctgtanntctctctgtgttnnntgagggacaagtggtaaaacccttaaaaagggaggtggaggcccaggactttggtaacaggtgatgaatgtgttgtcttggccatcacagatggaacttcagttagtacccgagggattcccatggcacaagcattacaggaattagtccaccactggtgtgggtgagcagtcaggtaatgggaattgatcagtgccaccacccttgaccccaactaccatcccagatgcccagattccagtcctggagttttattctcagcttgaccctttgaccaagaagatccagtcccaataggtcacgtgtgcttcatctttggactatatatctcatgtcagttaatgggaacttactgggttagaagtcaggatgcagagtttcaatcctcacttggtagtagtctgtggccctctttggcacatttacctccgnnccttgatnnncaggccacacctctgtcaaatgggataatgtggctccttttgacttcaa

SEQ ID NO: 7151 - DNA, 1944 bp, Macaca Fascicularis
aaccccagcaggggtttctgtctcgccactggaaggaagagagagtatggctgaactggacacctccttcagagaaggcaaggaagggaggaggagagaggaaggcggggcagcctcaagcctcactcagcactgagcccaatgctggctgatgagctaaaaatataacgacagaaagttccaagttccaatctctccttccctacctcttttcttgacttctctggaacaagctatctgaaagaagaaatagtcacgttacaattttttttttttttctgggctcacgtgaatattgctccagggacaagaagaaaaaaaaaaatgtcttctctatttccttaagaaggtcagcaagacagagcagttacatttcatatgcagcctctccaaggacattcattttctccaccagagccccaaggtgggcaaggagggccagttttgtgcagcgtctgttgtgtatagcattcaggacaacgtccacttggatcccaggctctcctcacagatggaggagataaaggaaggtccctctcctggtctccctgccagggaggctgttgctgacagagggtaaggggcctcccagagtcctcctcaggtgggagcagaagctattgtgcattaatgctggtgtgaacaggagtgtacaatggaaagaacctgcttccaattatgtcaaatagataccctgaagtggaattgctggtttgcatggtgaagacctccctcctgtgacctcagccctcctccttccctctgcttctccacaccgcctgccttcgcacacaggaatccagatttttctgtctcgacttctctgacaggagattgcagtgtctcctggcacaccagggggaatgtggcagaacaggaggggtgaacttcagtactgtaaccaggctggtactctaacaccagctttgcaccttggtggcagcatgagcactttagttagagtcccaagttagactctagttagatgtctcagccatccccccctctctgtcacatggtggctgtctttattgaggagtgaagggaaattctcctaagaaatataaagctcttctggggtcaccttctaaaaaccatccagaagtgggtgagcctattcttgggacttctttcttcactcagttggctcctgctccttcaagaacttttggggacaggatgaaagaactcaaggctccgggcttacccaccacaactttgtaacctcgcttttgccataatggtctccttatgcctccactatgaaatgaccaggactcttatgtttttttctcctctcattcctccttttttctcttcagtataatctctctttattgagaacttacagtatgctaggaactatgctatatacccatactacatctcatttaattcttacatatccctgtgaaagaggtagtcatatgaataccattttatatgtgagaaaaccaaggcatagaatagttaaataaattgtccaggatcttctagttaaaaactggcagagtcaagattcagtctcaggtctttttgatgcccaaacatatatactttacctttaaaagtgtggctcatggatgcctggagtttcctaggtcctttacagggttctgtgagatcaaaaccattttcatgatgctatctgcctttttcactgtgttgacatttacactgaaggcacagcatcaacgatgggtaaaactgtaggctgcttagcccaaatcaaggccgtagcaccaaactgtaatactaaacattatattttttactagaacgcacttgcagaataaaaaaaatcacttttactcaagaatgtcctgatgtggcaggaaatattaagtttcttaaatgttgacctttgagtacatgcctatttaatattccgtgtaataaaatgggaagtatgcaaaaacaaaaaaaaaaaaaaaaaaggccaca

SEQ ID NO: 7152 - DNA, 736 bp, Macaca Fascicularis
  misc_feature (1)...(736): n = A,T,C or G
atcacaggcacccnnnancatgcnnnnntaagttttgtatttttagnnngtctcgaactcctgatgnnnnnnnnnnnnnnnnnntacaaatgttttcattannnttcccccaacaaaacccattcctgtcaagctgttactccccattctccttttcatctcagcccctgacaatctggtttttgtctctatggcctcaccgattctgattatttcctatgaacagaatcatacaatatttgacttttttttttttttttgaaactaagccttgctnnnnnnnnnnnnnnnnnnnnnnnnnnnnnnnnnnnnnnnnnnnnnnnnnnnnnnnnnnnnnnnnnnnnnnnnnnnnnnnnnnnnnnnnnnnnnnnnnnnnatcacaggcatgtgctaccacgcctggtacattttcttgtacttttagtagggacatgttggccaggctggtcgtgagctcctggcctcaggtgatccacccacctcagcgtcccaaagtnnnnatattacaggcgtaataggtgatcttttgtgtctggttgctttcacgttgaacgctatttttgagggtcgtgcctgttgtagaccacagtcacacactgatgtagtcttcccccatcctagttcccagctgcctcttcctaatgcttccctctgtcaaaagcctccttggcccaggttccctgagctgtgggattctgcacggtgctttggattctctgatatgtccttcgaatcc

SEQ ID NO: 7153 - DNA, 1962 bp, Macaca Fascicularis
ctattagactaggttgaaactaactgtttcctggtgccctcctacctctatggtcaatcattatctaacccttttattgatcatctatctctatccttcaaatatttgtattttaaaagtgttcttcctcctttgggcttgcatttttcacagttcaatgcctgatgtcttctgtctttcggctatactttacttctaagctcttggtccatgaattatttctgtactcttatctccttcagattcctccacagatatctcaaattcagcatgctcaatataattttatgatcatctactcaaacttgcccttcatgatgtattccttatttgaggattgctattccttcagttgcctcggttaaaaattacggagtcatggtttccttctttctctttccagattgagtctaattgtttctatttctgaaacatcccttccctccatttcgactgcattttccaggtcttcatcataccccactgggctatcatcatggatagttaactgatgtccctttcccctccttatctcttcctctcctagtccatcttccatactgcttatgggtaaagttgcttacacaataaaattcaaatattttggaagggcatactagtcattattcttaaatgtgctggccacttttatgctttgggtatttatatgaagttattttctttcacctgaatgctcttgacatgcttgccattttccctgggaatccctgggaaattgctactcatcttcacatttcagttattgggtcaccttttctgcaaagtcttaagtcaccttttctactgctcagcaaaagtaattgccctcttgtctgcattattatgacatgttatacttatatctctttgggaaccctttgtatttttattgctattaaaatctgtgtctgctgctagatgatgatctccttgggacaaggattctgactttttcatccttatagtctgaagatttcaaaaagtgcttgttgcataatggaaacacctttaatgttaactattaaatttatcagtactgtaatgtgtacatttgaatgtgtatatactatgtatcagataaatagtatgacctactaatttcaggagtaatacgtcaaatcataaaatgtactagtaacagaggctagcatcagctgtaggatatagatactgttgtatgcaaacatcaattcaataattagaataagtctaagtttctctaaattatgcctttggctaatctgaagaatgagttagtaatatgaaaattgatttttcaaatcatttgttaaatactataccaatttaaatctgatttgataatattaaatatcacagatatatggcaaattttaaaagaatcattaaagagtacaatctaaggacctgatacaaatgtactaaagtattctttcacattttggtgttgatgtaagagagataatatagtcactataaattaatatttatggtatccttacataatgtataacattagtatcataagtttgggaaataagacatgaatgtcattgatacagctaaactcagtattggaggtatatttattattgccttgcacgtgaggagtattactagatttaaaggagaatgaagaaatgaaaaaaaatgcaaatgatgatggttgtctagattcattgtttgtaaactgaaataaaggaaaaagacatttgggagactgaggcaggcagatcgcttgagcctgaaggagcttgagaccagcctgggaaacatggcaaaaccccatctccatcaacaaaaacaaaaattagccgagcatggtggcatgtgcctgtggtgtcagtgactcctgtggctgaggtgggaggatcccttgtgtccgggaggcggaggttgcagtgagccatgattgtgctactgtactccagcctggcagacagagcgagacgctgtttcaaaaaaaaaaaaaaaaaaaaaaaa

SEQ ID NO: 7154 - DNA, 2320 bp, Macaca Fascicularis
cctggcctttgagactccctcagcggctttgtcagagttctctgagcccagctgtggagagtctgaaatggctgctctgggaggcagtagcaggagtgtcccagtgctacaggccgggctggtgccgagcctaagccagcacctgcccgcagcgggtcttcggtctttgcggctccttgtcctgcacagcaacctcctggcgtctgtgccagccggcctggcccgcctgccactcctcacccggctcgacctaagggacaaccagctccgggacctgccccctgagctgctagacgccccctttgtgcgcctgcaggggaaccccctgggtgaggcctcaccagacgtcccaagttcaccagtggcagccctcattccagaaatgcccagactgttcttgacctcagatttggacagctttcctgtgactcctcgaggctgctcagtgatcctggcctgtggtgtccgcctgcagttcccagcgggagccaccgccacccccatcaccatccgctatcggctgctgctgccagagccaggcctcgtccccctgggtcctcatgatgccctgctcagccatgtgctggagctgcagccgcatggggtggccttccagcaggacgtggggctgtggctgctcttcaccccaccacgggcccggcgctgccgtgaagtggtggtcaggacccggaatgacaacagctggggtgacctggagacccacttggaggaagaggcaccccagcggctctgggctcactgccaggcaccccacttctcctggttccttgtggtttcccgccctgtgtccaatgcccgcctggtgccaccagaggggacattgctgtgctcctcgggtcatcctggggtcaaggtcatcttcccccctggggccactgaggaacctcgtcgagtctccatgcaggtggtgcgcatggctggccgagaactgcaggccctcctaggagaaccagaggctgcagtgagccccctgctgtgcctctcacagagcggtccccccagcttcctccgaccggtcaccgtgcagctgcctctgccctctggcatcacaggcctcagtctggaccgctcccgtctgcacctgttgtactgggcccctcctgcagtcacctgggatgacatcacagctcaggtggtcctggagctcacccacctgtacgcacgcttccaggtcacacacttctcctggtcagtgccccccagccttctcagccccccttccccagtctgtacagcccccctcacccccagccctcccaggtactggctctggtacaccaccaagaactgcgtgggaggcctggctcggaaggcctgggagcggctgcggctgcaccgggtgaacctcatcgctctgcagcggcgccgggaccctgagcaggtccttctgcagtgcctgccccgaaacaaggtggatgccacccttcggcggctgctggagcggtaccggggccccgagccctctgacacggtggagatgttcgagggcgaagagttctttgcggccttcgagcgcggcatcgacgtggatgctgaccgccctgactgcgtggagggcagaatctgctttgtcttctactcgcacctgaagaatgtgaaggaggtgtccttctaccgtggcacggtgcctgtgcaggtacccgaggaggctgaggctgcccggcagaggaagggcacagacgccctgtggatggccactctgcccatcaagctgccgagacttcggagctctgaggagccacggcggagggctggcctctccttggcgcccttgaacctgggagatgctgagaccggctttctgacacagagcaacctgctgagcgtggctgggcgcctgggtccagactggccaactgtggccctgcacctgggcgtgtcctaccgtgagctgcagcgcatccggcacgagttccgggatgatctggatgggcagatccgccacatgctcttctcctgggctgagcgccaggctgggcagccaggggctgtgggactcctggtgcaggccctggagcagagtgaccggcaggacatggcagaagaggtgcgtgcagtcttggagctcggctgccgcaagtaccaggacggcatccgacgcacgggtttagcccccaaggaccccgctctgcctggctcgtcagctccacagcccccagagcctgcccaggcctaggccccacagactttgggctggcccggacattccccagtggatgggcagagcccctaccttcaagcctttccagtgtgtggggacaggggtccccgtgggcaacaaacccgcactgtttctttt

SEQ ID NO: 7155 - DNA, 720 bp, Macaca Fascicularis
  misc_feature (1)...(720): n = A,T,C or G
agacattagnnctnntnnncnggccctcacgtgcagctcaaacacnnaannnnnnnnnnnnncttgaacagtnnnnnnnnnnnnnnnngtgctagtagccgatatttnnncccaccccctacaattgggagcagactatataccaggaacccaatgagtactttatggccannnnnnnnnnnnnnnnngaggttgtccatttctgtgaatgaaggtggtgttgcatgacttacccaaggccactcagctggggnnnnnnnnnnnnnnnnnnnnnnnnnnnnnnnngttcccagcactctgctcttgctaccatgagtgcttctcaaaccttgttcctaatggtggaggcagaggcacacgccactctctgtaagctggggaagtagccaggagcaagcctcaggaaggacaaaatctcttggaagcccaattctggcttaaaaattcatgtaaatgttggatcctccttcagaatcttctgtgcttgtggtggtgcacagtggctgtaatcccagcactttgggaggccaaggtgggtgaannnnnnnnnnnnnncagtttgagaccnnnnnnnnnnnnnnnnnnnnnnnnnnnnnnnnnnnnnnnnnnnnnnnnnnnnnnnnnnnnnnnnnnnnnnnnnnnnnnnnnncagctactggggaggctgaggcaggagaactgctgaacccgggaggtggaggttggaatgagccaagatca

SEQ ID NO: 7156 - DNA, 760 bp, Macaca Fascicularis
  misc_feature (1)...(760): n = A,T,C or G
agacattgatgtgtgttgtgaagtgaaacttatttnaataacttgctcatatcacattctaagcttataagatgaaatagggtcattgttcggcttctcccgctctccgggttagcaagtgaaatggaatgttgagaacgacagtcacaacaaaaagacaaattgtgtgtgcaccttcgctgtctggggtagtccacgaagccaggcctggctggagnnnnnnnnnnnnnnncaggaaggagtcaggcccaaagggcagggttcgggaaggagttatggcttcccaatatctgacttggagctgccaaacagagggacgcaggtgtgagccagaaaagagagctaagctggaaggcagcagtggacaaaaggacaggccaagctgaagctggactgaagactggaagctgaggaggaggctcacaaatagaataagggaagatggggcccgtcagcnnnnnnnnnnnnnnntgggcatttcttctagatgaggcccctcttgatctcttgtagcagatataatgagggcgctgggcaannnnnnnnnnnnnnnnnnnnttttcctctggatgcttgtgtgtgtataactttggctcgtgagttgttaaagagattcattttttaaacctgtgctttaaaaggaagaccaccacaatggaatgctttctattacgttctgatatgattgctattacattctgatataattgctattacattcacagtttggaaggtggtctgttctgttactggaaccata

SEQ ID NO: 7157 - DNA, 704 bp, Macaca Fascicularis
  misc_feature (1)...(704): n = A,T,C or G
ctccaccaagagacccctctccatggaaggggcgtgtcntgcctgttggtcacttggtggtcatcttgcagccactctggccagtgagcagagccaatagatcaagggggtgaaggggcagggggaggccatgtccttgttgacgttgctgaggccctgagtcataccacggggccgcctacctctccctctgggtttcttggtctgtaagaataacatagcgcctttgattttggcaggttacatgggcttgcctgtttcctgcagctggaagcaggatggtactgacagcatgagagccacaggctgcccacgtagctgcaccacctcctccccaagctgccaggcatgggcaggcctccctggcctgctggtgcacactggcggcctgcagcccagcagtctaaggggaaattggaaaagacacttgacaaaactgaacatccattttgataaatattcttcgttaaatgagaacaggtggatcttcacctggatatactcaaagccattcagtggagagacaacggcagcattcccatcaaagccaggaaaaatacaggcacgtccactgaagacccctggtatagagcatctccctggaagggttcaccaaccagacaagagaaagaatggaaagctatgaaagctggagaagagggtgagctgttattactcctcctgttaaattatttttcangggt

SEQ ID NO: 7158 - DNA, 746 bp, Macaca Fascicularis
  misc_feature (1)...(746): n = A,T,C or G
gatnnnnntaagcactttgagctgttgaatggggctcaggggcaagaattnttgctgccctccccagcgtggtcacagggttattgaactgcctgcannnnnnnnnnnnnnnnnnnnnnnnnnnnnnnnnnnnnnnnnnnnnnnnnnnncagcttggtatggatttcccaaatcttaacatctgaagcagcttcttgaggctggcaactatcctggtttctgtctgggagggggtggtttgtttgctggggcccaatgtctgtcctaagtggtggggtgagaggaagttnnnnnnnnnnccaggtgagaggtgggggctctttgcttagactccttatcatggaaagattggagttttctatgcagggcgttggggaaaaggattannnnnnnnnnnnnnnnnnnnnnnnnnnnnnnnnnnnnnnnttttgacataggatttggagcccatctaaatgttgaagttccttgagacagctnnnnnnnnnnnnnnnnnntgccaggggctaagcagccccaaatgagaggctctgctccctttcccacctcgccaatgttgttgttgctgcctttttgatttgtatcctctgttatagacattttttaaaaacgatttcttctttcattgtgcacaagtgctgagagtctgaggccccatttctgctgtgtatatatatcctgactcggggcttttattcagcaaactgttcattcttctgtcagacaatgtcatatcaactctgttc

SEQ ID NO: 7159 - DNA, 1600 bp, Macaca Fascicularis
cttatagttttaggttttacatgtaggtctatgatcctctctgagatattttgggtatgagatttcaaggtcattgtttcatatacagatgtccaatgggtccagcaccacttgttgaaataacttattttgcacgaccttgtaaagtgacacagctctggacaatgtgctctctgagaactttctcactaggttcatgtacagtcctataaaaattgggggggggcattgtcatctctgtctgtgacagatagagaaaacaaggcagagagtgtatgagtgcttgcccaagatcgcccaagtacgaacaggtggagctgagacctgaacggtgtctgcctagcacccagtcccgggcacctgtgcatttcattctttgccttgagggacgaagcaacacgggcagccccaggtgggctccttaacctgggagtcactcccaccgaggcttctgcaggaccagggatgcccagcgaccgaggcttctgcaggaccagggatgcccagcgaggcaagtctcttcactagctcatgggctaaacatgactcgaagtttcagtgcattagaatgtactcaatacacttaccctgtaatcctgcctctggtgaacctgtcaaccacaactggcacagaattgatttccctccccttccctacaagacatggcatgggcaggagccacagtctccccctagagactaatcacatctcataggaggaaaggcctcgacagagatggcctcttcaatgccagggctcccctttcaaaagaaaggaaacgtgatcccacctgggatcaacatcttaatgtggtcccacccggtataaacatcataatggaaaaggcagggatttgtgttttgttgcatttgggggcttcctttatcctattctaaacattggttttggacagagtgctaaagccccactcctatttgatgtaatcctttgtaaaatcatggccatcccaatggtcttgtactccttttaagttttcagtaaataaatacagtctggcacagctgccccccatggtgtgacacaccagcaccccaaaagcctctcatcaatcataggatggggaaaccttgtaattctacatgtttctgatatttccttacttaagaaaatcatgtgctaagctatttaaaaattacttttcatcttagattactctagagaaatgcttgcccggtgaagtctagaaatctgtaagccctttaattttagaccttcaattcattgaaaggaactataacccaatagtaaacattaatattaccccatgtaggataaaagtaggggtttaatattggacttaactcatagactgtttttttttttctttttgcttaggaaaataaattgcttcatcttattgctacagtttgttaataatgttgatgacagttttgtcaatcagtcaatgtgttacactattaatctccattcagatttcaaccataactaacagtgcttggttatgtatgactttctcacatgccctcaacatcaataaaaaattggtttctccatggcaaaaaaaaaaaaaaaaaaaaaaaaaaaaaggaaaaaaaaaaaaaaaaaaaaaaggccaca

SEQ ID NO: 7160 - DNA, 725 bp, Macaca Fascicularis
  misc_feature (1)...(725): n = A,T,C or G
gcacatcagggcgcccctcntgggaacgcaatgtgtgctatgcccgccccactgcctgccctccactgccagctgcgcctgccactgtgctatttgtggcagccggcgcccaggaggacccactctggaaaggaaacacaaatctcattaggcaggggaactggagaccaggcgggaactggccctttcacaaacttctcttaaactcaccctagttgattagccaggcacctgtggtgaactttgtcccaccctccagacacccatatatccttcccactggcacaccgcagcctcaccttctcttgcacatgctagccagcaatagctaagatctatgttatgtttcagagtttacagggtgatccgtacacgtaatatcctggatatctcgcggggggtgcaggcagccacatccacgcttgtcatcctgctgtgtttggtgagggaagctgaccctccgcagcccacgcagagctcaggggctatatcctcatgaggacctctgggctcaaagatattacctggtgtccccatatcccaggctctcaaggaccagggtccacacaggtgtgttggcttnnnnnnnnnnnnnnnnnannnnnnnnnnnnnnnnnnnnaaagacctggtgaaccttctcatgaacaaggacaaaggctgtgtgggggtctgtagagtggtcatgtacactcagcagacacagaaaactgatattcttgggttt

SEQ ID NO: 7161 - DNA, 746 bp, Macaca Fascicularis
ctgcagggatagaatttctctctctctttaaatagttttattttgtctgtcctgtttgttcatttggatgttttaattttaaaagaaaagaactttgctgatatttataattttgtatcataagaatgttttcctctacagtatttgtcatgccagtttataacaaaaaaaaaatgcagggattttatttctattggaaacattacagctatgttttacttttggacagaatttttatttgtatagagtgcttactaatgttaaatagttcagagtatataacattgacattaaggactcatggtaggttttagggtaaggagtttaaaggaaataaatattcaaactgggtctcattgccaattttggtggaaatgagtttgtgtcatttcaattacaaagataaaagtatgccatataatttatttatatgaagatttatttttgtagtgtacatagtagtcatcaagtcttttgacagaagtatatttttaaagaatttatatgtgatgaatccataatgtctggaactttgctgagacatgagtggggcacagttttcattgtaaattacagcaaggaaagaaaatgtttaccagtgttaagagagtcagagcagaatggatattcatgcgattgtcaagtgtttattagttaccattggtgacctagcatgcttctcatttcaaaccttggaaggtgaaaatgtacaaactctctaaatattaatgttcaaacactgatag

SEQ ID NO: 7162 - DNA, 876 bp, Macaca Fascicularis
  misc_feature (1)...(876): n = A,T,C or G
acnnnnnnnnnnnnnnnnnnnnnnnnaatatatacnnnnnnnnnnnnnnnnnnnnnnnnnnnngggatacaaaaatgannnnnnnnnnnnnnnnnncttcaagcagcttacagtttagtaacataattacaaatatacctacgaagactgatttagattatagtgggaagaccaggcaccaatgtgaataaaccaacttggaggctactgtccagggaggagctcaggagggccagaaccagatgactaatagtagagatgaaaaggaaggagtggattgagaggtcttatggaggtcaagcctgtagaatgttccaattatccnnnnnnnnnnnnnnnnnnnnnnnnnnnnnnnnnnnnnnnnnnnnnnnnnnnnnnnnnnnnnnnnnnggagaatggtgccattaatannnnnnnnnnnnnnnnnnnnnnnnnnnnnnnnnnnnnnnnnnnntttggttgtatatacattgaatttgagattccatgagtacggttgtccttcggtatctacaggggattgattccacaacccacagcagataccaaaatcctttatatatcaaagtcccttatataaannnnnnnnnnnnnnnnatataacttaggcacatcctcccatataccttaaatcatctctagattacttacaatacctaatacaatgtaaatgctatataaataattgttacattgcattttttaaaaattgtattattttaaattgtcatagttttttattttttattttttattttttccaaatatctttgatccgcagttggttgaatccacaaatgcagatcccagggatagagagagctgactgtatatccagttggaagcannnnnnnnnnnnnnnnnnnnnnnacaaca

SEQ ID NO: 7163 - DNA, 740 bp, Macaca Fascicularis
  misc_feature (1)...(740): n = A,T,C or G
gtatggaannnnnnnntnnnnnnnnnnnnnnnnnnnnnnnnctggtgaatccacacagaagctttctgaagtagcaaaggaatgcagcatatatcttattggaggcnnnnnnnnnnnnnnnnnnnnnnnnnnnntatataacacctgtgctgtgtttnnnnnnnnnnnnnnnnnnnnnnnnnnnnnnngaannnnnnnnnnnnnnnnnnnnnnnnnnnnnnnnnnnattacatttcaagaatctgaaacgttgagtccgggtgatagtttctccacatttgatactccttactgcagagtgggtctgggcatctgcnnnnnnnnnnnnnnnnnnnnnnnnnnnnnnnnnnnnnnnnnnnnnnnnnnnnnnnnnnnnnnnnnnnnnnnnnnnnnnnnnnnnnnnnnnnnnnnnnnnnnnnnnnnnnnnnnnnnnnnnnnnnnnnnnnnnnnnnnnnnnnnnnnnnnnnnnnnnnnnnctcctgcccgggatgacaaagcctcctatgttgcctggggacacagcaccgtggtgaacccttggggggaggtcnnnnnnnnnnnnggcnnnnnnnnnnnnnnnnnnnnnnnnnnnnnnnnnnnnnnnnnnnnnnnnnnnnnnnnnnnnnnnnnnnnnnnnnnnnnnnnnnagcgatcagacctctatgctgtggagatgaaaaagccctaaagtttatgtttctaatgtgtcagaacaggaagatatnnnnctacagctaatc

SEQ ID NO: 7164 - DNA, 697 bp, Macaca Fascicularis
  misc_feature (1)...(697): n = A,T,C or G
gccacaggccacacagaccctgctgcactgggtggctggagaatgagaccctgtgtccgccactccccctgccacaggccacacagaccctgctgcaccgggtggctggagaatgagaccctgtgtccacagcctgaggctgcccccgccgcagggcacacagacccgtgatccgggcagcccatcctgtcggagccacctctatttcccaggtgtctgatgtgtgccagtttccaggctgaagatgaatacgagtgggcccacctagtctgaaaactcagttgctgttttaaaagggacttcagannnnnnnnnnnnnnngggccacacacatgggtcatgtgaccctttccacccactccacttaggaagccccaaaccctctaaggagcaggctatgtcggttctcctaaggagctcccagacaccctgctgtccttnnnnnnnnnnnnnnnnngcctggtggatggtattgtcccactttccagaggagaaagcagagggtttggggagtctgctctaagttacacagagctgctgcaagatttaggattagaactcgatgtctggaacagccgccgacctcagaagttaggttcgaacacaatttccacaaactccgtgtctctgaaaccccacatgggtgatgcttccaaggggtttgcagcatccagccagagtcgttgattgtgctgag

SEQ ID NO: 7165 - DNA, 743 bp, Macaca Fascicularis
  misc_feature (1)...(743): n = A,T,C or G
gcctaaagagtctcctcaccgtctgtgtcctcgctgctttcgttgccagcactgtggaagagagttacaaatgtgtacaatgtgatcaacagtgtgacgaggagaaaacttgtgattcctctcatggctgcttcagcaaaaagagtgaatttaatatgacagggcagcagccctatactatcctgcagaaaggctgttcttcaagcaagtgtgagccacgggccttctcggcgacactgggnnnnnnnnnnnnnnnnnnnnnnnnnnnnnnnnnnnnnnnnnntgaaaagtgtaacaaagcagacttccaagtggctcggaagtcctcagatcccaatggcattacctgtcctgcctgctacaatgcgcaaggtgctacctgccaaccaagtgacctcgcctgtaaaggggaagagacgaagtgtcttaactttacaggcacagttaatgacaccatattattatttggtatgggttgtgcaactgaaactgcttgcaacttgaaggatgtggagacgataaattacataaaaatccgtacctactgtgaaggcagcagtaatggaagccctcagctgatgtccatcatctcatcaattctgactgctctctttctgctgaaagtcttgatttgatctctgaggcacttccaaggccatctacaaacgtttccaagcacttctataaacctgaagaagttggagaccttgaatgtctccctcccccagcactgcctacccaca

SEQ ID NO: 7166 - DNA, 770 bp, Macaca Fascicularis
  misc_feature (1)...(770): n = A,T,C or G
cagaaattggctagccannnnngcatggaagnnngagaaaactgatttctatataggacntnnntcagagccctttatttggcaactaatggcataagtgatctgaatagtacagaggaagatgagagagaagatgcacagggtggnnnctgagtggttataccaccaccagtgtcttagtccatttgtgttgctaaaagaactgcccgaggctggatagtttataaagaaaataggtttattttgctgtggttctacagactgtataagaagcgcaaacatctgtttctaatgagaacctcagaaatcttccactcatggcagaaggcnnnnnnnnnnnnnnngtgcagatcacatggttagagagacagtgagagagaaagagagagagaacaagagagatagagagaagggaggtaccaggctccttaaaacaaccagctctgggaggcagagagaggaaggactctcaggagaactaatggagtaagaattcactcattaccgcgaggatggcaccaagcccccgtgatccaaacacttccaattaagccccacctccaatattggggatcaaatttcaacatgaagtttgaagggtcacatatctaaactatagccatcagtaagatcagtccagagagtgtatacacagtcaaaaatcggcatctcacctctgctgataatgtaagtaaactcattacctttggagtatatcattggttaaaaattactgtaagttacaagacatgctgtgcgtataagaaaaa

SEQ ID NO: 7167 - DNA, 1984 bp, Macaca Fascicularis
  misc_feature (1)...(1984): n = A,T,C or G
aatagaatgcaaatagggctagagctgaggagactgaagtagagagactgttcccatccatcacccagccacacccgtaccgacacacacacacacacacacacacacacacacacaaattaacctcatacttttgtttttaaataaagaagagcaccacacttgaaagagcaagacaaactttcatgaatattctccctgtgtatttttaggacatttaattgtagtgtggcgcagctgccagactctcagcacagtgttggaaagctctgtagtcattagacattcgcctccacagaagtttaattttctgagcctgaggactgttagcgagaagcaacgcccacccagaaggagcgtttcacttttctttatgcatctcagcctcttaagactttcaagaagattttatttaaaattttctttttttgttttgtagtggtttatggcaggcttctcataatgtgaacataaagacatttgattatatttgaaaatattgttcttttagtttgcccacattctaagccattaaaatgccattttaagtatgagttatggaagatatttaagtatctgtgcatcagtgcatactgaggctgacattagttacatggttgcatttttgaatgattaagtttattaaacacctagtcttttacattgtatatttttgtggtaaaatatggctgacacatgccattttgaaaatgcaaattgaaaattttttctttttacaaaaccaaaagttgggtaaatgaaaacttataaaagcccacttaagtacttaatccaaattttaacatcttatatgcctctcggcttaatacagtagctcaaattttacatgtagacggaagatgaaagcttaaaagtttttctggaagtgaaaacagagcattcccacctaggcagtaccaatcaaagtcttgtaagacttgaaaaatatgttcagtatgatttgtgcccccaaggagctggtacatgtgttggagtctagaaaatacaaattaaaatttgatttaaatatattcgtttcccctgacacacagccccattatgagacaagtttcacatgtgtacagtgacaaatgccattagagatgagaaagtaaagacaccaatgtttagtggcagtattgttttagactatgcatgttgtcatgtcattctcaagatcatcctgtggcaggtatatggttgtattcccacataaggaatgccacagagacattcaaagaacttttgtcctttggttttgatttgtcatattggatataaccaagatgcatttatcttatgaatctctggacatttttttatttgccctcaaggctcatttccaagattcaaaaatcagttttactactctacaattattcctcattattttccagaatatgttgtgtagtataattatttattcaatagacttggctctgactagcttcttaaactttttccaaaacttttgttgtattcaccctcaagtgatgaagagtgacaaccatcaatgatattaaaagaatatgatatagaagtaaaacatttccaaagttttatatagcgttttgggccagtgtttggtaagtgggaaaactgaattcaaaattgtccgcactatgtttataactatctaaaaatgactatctaaaaatagttatgcatgtgtggctgggtgtggtggctcacgcttgtagtctgagcactctgggaggttgaggtgggtggatcacttgaagtcagnnnnnnnnnnnnnnnnnnnnnnnnnnnnnnnnnnnnnnnnnnnnnnnnnnnnnnnnnnnnnnnnnnnnnnnnnnnnnnnnnnnnnnnnnnnnnnnnnnnnnnnnnnnnnnnnnnnnnnnnnnnnnnnnnnnnnnnnnnnnnnnnnnnnnnnnnnnnnnnnnnnnnnnnnnnnnnnnnnnnnnnnnnnnnnnnnagtgaaactttgtctcaaaaaccaaaaaaaaaaaaaaaaaaaaag

SEQ ID NO: 7168 - DNA, 4161 bp, Macaca Fascicularis
agcctgcggggactggtcggcaccggccgtcgccgtgtgagcgctctcccggctcgcgtcgccgacccgcagccgcgggacggactaaggagggagccgcccgccgcgaggccgccgggttccggatttaaattgatactggtgtacatctccttgttctaagctatattcatccaacaagtcataaagccataatgtggtataacatcctttttgagaggtgaatattattgaatgaaaatggctgacagaagtgggaagattattccaggacaagcgtatattgaggtggaatatgattatgaatatgaagcaaaggatagaaagattgtgataaaacaaggggagcggtacatcttggtgaaaaagaccaatgatgactggtggcaagtcaagccggatgaaaactccaaagcgttttatgtgccagcccagtatgtgaaagaggtcacgcgcaaagctctaatgccacctgttaagcaggtagctggtctaccaaataactccacgaaaataatgcagagtttgcatcttcagagatcaacagaaaatgtgaacaaattgcctgagctttcaagtttcggaaagccatcgtcgtctgttcaaggaacaggtcttactcgtgatgccaatcagaattttggacccagttataatccaggtcatactgtcaacctaagcctggacctgacccataataacggaaagtttaacaatgactcacattctcctaaagtttccagccagaataggacacgcttatttggtcattttcctggtccagagttcttggatgtagagaaaactagcttctcccaggaacaatcttgtgattccgcaggagaaggctctgaaagaatacatcaggattctgaatctggtgatgaacttagcagcagctccactgaacagataagggcaaccacacctccaaatcaaggaaggccagattctcccgtctatgctaatcttcaagaactgaaaatatcccagtctgctcttcccccacttcctgggagcccggcaattcagattaatggagaatgggaaactcataaagacagctcagggcgttgctattactatgacaggggaacacaggaaagaacttggaaaccacctcgttggactcgggatgcaagcattagcaaaggagatttccaaagtccaggggatcaagagcttctttcatccgaagaaaactactacagcacttcttacagccagtcagatagtcagtgtggttctcctccaaggggttggtcagaagagttggatgaacgtgggcataccttatataccagtgactatactaatgaaaagtggctcaagcatattgatgatcagggtagacagtattactacagtgcagacggatctcggtcggaatgggaattaccaaagtataatgcttcatcccagcagcaaagagaaataattaaaagtaggagcctggataggcggctgcaagaaccaatagtattaacaaagtggagacacagcaccattgtattggacactaatgacaaggaatctccaactgcctcaaaaccctgctttcctgaaaatgagtcttctccctcctcaccaaagcaccaagatacagccagcagtccaaaggatcaagagaaatatggattgttaaatgtaacaaaaattgctgaaaatgggaaaaaggttcgaaagaactggttgtcttcttgggcggtgttgcagggttcttctttactttttaccaaaactcaaggaagtagcacaagttggttcggcagtaatcagtccaaaccagagttcacggtggacctgaagggggcaacaattgagatggcttccaaggataaatccagcaaaaagaatgtatttgagctgaaaactcgacaagggacagaactgctaattcagtccgacaatgacactgttattaatgattggtttaaagttcttagtagtacaatcaataatcaggcagtagacactgatgaaggaattgaagaggagatactcccagattcaccaggaatagaaaagcatgataaagaaaaggaacaaaaggatcccaaaaagcttcgttcctttaaagtatctagcatagattcttcagaacagaaaaaaaccaagaaaaacttaaagaagtttcttacacgacgccccactttgcaagctgttcgtgaaaaaggttatattaaagatcaggtatttggatccaatcttgctaatctgtgtcaaagagagaatggcacagtaccaaagtttgtgaagttatgtattgaacatgttgaagaatatggtttggatgttgatgggatatacagagtaagtggcaacctcgcagtgatccagaagctaaggtttgcagtcaatcacgatgagaagttggacttgaatgacagtaaatgggaagatattcatgtcattactggagcactcaaaatgttttttcgagaattaccagaacctctttttacatttaatcattttaatgattttgttaatgcaattaagcaagaaccaagacagcgagtcgctgctgttaaggacctaatcagacagttgccaaagccaaaccaggatacaatgcagattcttttccgacatctcaaaagagttgtagaaaatggagagaaaaatcgaatgacctatcagagtatagcaattgtttttggtcccactctattaaaaccagaaaaagagactggtaatatagcagttcatactgtgtaccaaaatcagattgtagaattaattcttctggaactgagttccatcttcggacgctgattcttactgaagacaacctgtggaatagaagctggattccatcagatttcaaatgtttatacacaatgtattttattttttggaccaagcagtgactctaattttgcactttttttttgagggatcagaagggaaggagagagtcaagatgtgtgttaggccctcatatttgctgctttgttgcaagttgatataactgcgtgtaattatgaattcattttatcctgaatgtttgcgtttcatactctgaatttcagtaaaaatcaaaacttaaaattctaaccagtcatatacactggataatttggtaagaaaactgtattttttccctgaaattggataatgtagactttcttctcaagattcatgacttgatagaacaaaatacttactatcagttatgttgaaaaggctcttgggcattttaaacaaaatgaagtatatccattttgaaacctgtgtatttctttttcggggtttctgcatgcagtggcagtcttaagtgccaaaattcatcataaccccaaaataacctcttgatgaaggcttgctgtcttttactgtgttacacagcatccttactggatatcttagttgcttgtttgggcagcacactaatattacttaaaacactgtgatatactggagttttagttagcttaagtcagttcagggcattttagggctgtcttgctatactgaattgtagctaacaatcctaattatatctagtaccatactaagttcttggtatgaccctgtggaaacacacattattttatgtaaatataggctaaagacttaatgtcctttagcttgtgtatataattgtgttgtatagtctcagagtacattctaaccctacatttctaatcatgttattggtaatcttttctgtgaatattaggtttcctccagaaataggccgttatttgggaaagttaactgtgtgcacttttagatattaattacattcacaggcaaatcactgtcatgagaatggtactggaaaaatactgaatagacttgctaaatggcacatgcactacaagaggaaccttttaggttatttaatatgtacagaaaacattagaaaaaatttattacagaattctaattccagtatgaatagtggaaacccatctgtaaattagatgatgtcggatggaaaatgacattgctaaattggagaatttctttttacctactaatgtagattgctttgtataataaaacacagggtttggaaggttttgttacagggagcatggtctgttgaagatttttaaaatgtatttttctagattaacttctgtacatgaaatgtctaataaaactataagaggtttagagaaaaaaaaaaaaaaaaaaaaaaaaaaaaaa

SEQ ID NO: 7169 - DNA, 689 bp, Macaca Fascicularis
ccagcaccggtaagcagagacacatttcaaaatgttccccccaattcaaccaccatgagcctgagcatgagggaagatgcgaccatcctgcccagccccacatcagagactgtgctcactgtggctgcatttggtgttatcagcttcattgtcatcctggtggttgttgtgattgtcctagtcggtgtggtcagcctgaggttcaagtgtcggaagagcaaggagtctgaagatccccagaaacctgggagttcagggctgtctgaaagctgctccacagccaatggagagaaagatcgcatcacccttatctccatgaagaacatcaacatgaataatggcaaacaaagtctctcagcagagaaggttctttaaaagcaactttgggtccccatgagtccaaggatgatgcagctgccctgtgactacaaggaggaagagatggaattagtagaggcaatgaaccacatgtaaattattttattgtttcatgtctgctcccagatctaaaggacactagcattgccccagatctgggagcaagctaccaataggggagacactttcctatatggacaactgctgtggaaatactgcctgcttctcccaccttctcagagccacaggaaagaggaggtgacagagcgagagcaaggaaagtgacgaggtggattgatccttctacttgc

SEQ ID NO: 7170 - DNA, 683 bp, Macaca Fascicularis
  misc_feature (1)...(683): n = A,T,C or G
gagaccacctctgcctggactntattgtccatatcaccatcagcattttggtcagagccattcaacaagtctctaggaggttccaaactttcccacattttcctgtcttcttctgagtcctccaaactgttccaacctctgcctgttacccatttccaaagttgcttccacattctcaggtatctttacagcagcactacactcctggtaccaatttactgtattagtctgttctcatgctactaatgaagacataactgagactgggtaatttataaaggaaagaggtttgattgactcacagttccacatggctggggaggcctcacaatcatgactgaaggcaaatgaagagcaaagtcacatcttacatggcagcaggcaagagagcttgtacaagggaactcctatttataaaaccatcagatctcatgagacttattcactaccacgagaacagtatgggggaaactgcccccatgattcaattatctccacctggcccagcccttgacacatggggattattacaattcaaggtgagatttgcgtggggacacagtcaaaccatgttattatccttcaaaataggctgtattgccccatcccctcttttctgtgaagagggaactatgtaagctccatctggcctttccttgagtctcatattttatgtggctccg

SEQ ID NO: 7171 - DNA, 2201 bp, Macaca Fascicularis
  misc_feature (1)...(2201): n = A,T,C or G
tctgaacaacactaatccaagttgaagggttctagtttccacacaatattttttgtaaggattcaggattattctcttagtcatgaatatgaacctttgatttgggaaagatttctactcacacgttagccctatccccattcctctgccactccagacaataattctgaaataaataaaattatacaatattagaaagtgaaactataaaatcagcacattttattttggagatgcactgtcactttaatgatgtagaaaggttcttagatccacagataaaggcttccagtgccaaggctagaaattcacaaggaagaaagaattacataatgaattttggatattataatgttactagggatgttatccactattgtggaaataggtagttcacccattaatagtaaagttttctattatgtaactaaatccttttctggttccacagtcactcagaaactgtttttaaattggttttctatgcagatctatctataagaggtgaccattgtggttattctggaaaaagcattgcaacgtatatgacatttaaaatgcattggtgttcagnnnnnnnnnnnnnnnnnnnnnnnnnnnnnnnnnnnnnnnnnnnnnnnnnnnnnnnnnnnnnnnnnnnnnnnnnnnnnncaactactccagaggctgagggaggagaatcgcttgaacccaggaggcagaggttgcagtgagccaagattgtgccactgcattcctgcctgggcaacagaacaagacttcatctcaaaaaaaaaacaaaaacaaaaaaaccaaaaaacattggtgttctgggctaatgctgttctgagtttgattaatgtgaaatgtctgcattttctgtgcagtgtcaaaattgtgttgtttctcagcaagacaagtatctttgaatggagcttagtcattggacatttatatattcaacaagaccattgtagcaggcagaataacagtcccccaaagatttccacttcctaatcctcagaacttctaagtgcaccacatggaaaaaaagtattttacagacgtgatcaagggtcttgagatgggagattatcctagtttatctggctgagcccgaagtaatcacaagtgttggtaaaacagagagaggagatgtgacagtccaagaagaaggtggagtaacgtgctctgatatggcagaaggggctgcaagctgagaaatacaggcaacatccggaagctggtaacagcacagaaaacagatgaccctcagaaccttcaggagcatggatctgcccaggcaatttagcctgttagactcattttgtacttctgagctccagtactataactagattaatttgttttgtggtaagctaccacgttagtggtaatttgattatactagagattggaaacaaatacagtaattcatcttcagaagattcttagatggtaaccatttggccttttcctgttaatagcctcattttacattgtaagatttttctcatgtctacatatttatatgatgtcacatgtaattctcttctggagcaaacaacattttggacacaatctgatatctctcatttattgttattagataatgcattttatgagtacattttgaaatcacgacttttttttggttgtgaccgtatgatgtgtttaggccttttaaaaattaatataaattgctagatctcatttttctaatcagcgatcctttgattttaaaagtcaagtactataaaaaccttcccctaaggaaaactctaggcctggtggcatcagatgtaaattctttacaatattttaatttaaagtaacagcattttacgataaattcttctgcagaataggacaataatggtttgttgagatcaactagtgatattacaacaaaagaaaaacaaggccgggcgcgannnnnnnnnnnnnnnnnnnnnnnnnnnnnnnnnnnnnnnnnnnnnnnnncacgaggtcagnnnnnnnnnnnnnnnnnnnnnnnnnnnnnnnnnnnnnnnnnnnnnnnnnnnnnnnnnnnnnnnnnnnnnnnnnnnnnnnnnnnnnnnnnnnnnnnnnnnnnnnnnnnnnnnnnnnnnnnnnnnnnnnnnnnnnnnnnnnnnnnnnnnnnnnnnnnnnnnnnnnnnnnnnnnnnnnnnnnnnnnnnnnnnnnnnnnnnnnnnnnnnnncaaaaaaaaaaaaaaaaaaaa

SEQ ID NO: 7172 - DNA, 604 bp, Macaca Fascicularis
  misc_feature (1)...(604): n = A,T,C or G
aattctttgcaagtaactgtatatagtaaataggtataaaaggccttttttctaaataaggacttaactgcctgtaacatgaaacttcaaactaaaccactaactcaatgaactacttatggtttgtctgacatccctcacttaccaattaattataaatatgtttttttaaatccccaaagacattatctgtggtctttttttcctttcaagctcagcctgtgtgcctgatgtcatttctttcaagttgcccacagtatctccatttaaactaggctagtaaccaaaataatgtggaccttctttaggaaacagcgtgggagaataggagtccagccgtaagataaactggaaatatttgggtgtcttgtacctggctatgcaccacctcagtgttgttcctacataaacaaggccccttttaaacttgtatgtggactgctgtttggtcaaagaataccttgttagcattgcagaaaggtggtcagatgaccaatgcagtgcaggaaacagccctgtctcaactaatggaaatatatttgcatgtaacccanaaattagcttatcttgcatagaacataataagtatgtgtctttcgtgaca

SEQ ID NO: 7173 - DNA, 155 bp, Macaca Fascicularis
tttttttttaaataataaatgggttcactaggtaatactctacaaatatctgtgtgttgcaattcaaatgtatgttgatattgtgaaaagtgcttcaatgccactacgcttaccagtacactagactaagcctttgatgacttattgcatgatac

SEQ ID NO: 7174 - DNA, 676 bp, Macaca Fascicularis
  misc_feature (1)...(676): n = A,T,C or G
tcaggtgatcagcctgtctcggcctcccaaagtgctgggattacacgcgtgaaccactgcggccgacctaatttttgtattacttagtagagatgaggtttcaccacgttggccaggctggtctcannnnnnnnnnnnnnnnnnnnnnnnnnnnnnnnnnnnnnnnnnnnnnnnnnnnnnnnnnnnnnnnnnnnnnnnnnnnggccaggannnnnnnnnnnnnnnnnnnnnctccaccacgttcctccagtgcagcctggaagacatggcagcggggagctctcacnnnnnnnnnnnnnnnnnnnnnnnngtctggctcagcttgggcaagggctgggccgtatgtgctcagggatgtgcttctcttgtggagcaggaggacagaagaggaccaagaagggagggggctgccctgtgatgcacacgggcctgccatggggcgtgggagcctgtcccgctgcctggccggagctggccgctgtggtgctcaggaaccacttttgatactgcaactcctctctttttcccagtcagggaaagctgactccaagtcccacctccccctcagtccacccttatagtagtttctctcagagggttctctgcttcagctgtgcttgaagtggcatgcctcctctgctgcannnnnncccctacccccacacggcctctaaag

SEQ ID NO: 7175 - DNA, 764 bp, Macaca Fascicularis
  misc_feature (1)...(764): n = A,T,C or G
ccacagctgctgctctgcnnnnngacagttcaaatgcctcctctgagcctagctcgtgagatgaaagaacagaagttgtttggactttagagccattgtccacaatcacggatggttctcaagagatgattttaagaaatttccaaagaaggctgcctgcatagtggttctggctgccctttctaggtgattggaatcagcccatnnnnnnnnnnnnnnnngtacattctgaggccagagtaacattttgaactttggggggatgtttgttcatcacttgggtagaagaggagcaaaaatacctctgttttctctttccaaagtaagatgaggctattccaggttgagggatttttctttgcactgggtagattaatttctgcacagggagtgcgattattaaaataacacacaaaataaattgcaaaatgaaaaaaatttagatcagaagcaaatgagttttggagcaatattgttgataactaaattgtcaagagagatcgtataatgcaacatcaaattctttattcagtgttactgaagtactggctctttcctgctnnnnnnnnnnnnnnnnnnncttgtctgatgactgggaaaggaggacctgcaaccatctgacttggtctctgttaatgacgtctctccctctaaactccattaaggactgggagaggcagagcaagcctcagagcccaggccttggtggtcattaagatgttaagtcttttgctgcaaattcctggtnatttgatctaataaag

SEQ ID NO: 7176 - DNA, 777 bp, Macaca Fascicularis
  misc_feature (1)...(777): n = A,T,C or G
gttttttannnaatttttnntaattgcttttgactcttgtaaacagcttggctttgttttgtattgaaaaggagatcaagccatcacagtgctatttctaaagatataggacatccctgattgcctttaaagctcnnnnnnnnnnnnnnnnnnnnnnnnnnnnnnnnnnntttcacatgatcagagnnnnnnnnnnnnnnnnnnnnnattgacagacttgaaggagaaacatgttgaagcatgaaacatgcttcaaggaaannnnnnnnnnnnnnnattaacaattcaaaaactgtaaaaatggtggaatggtaaaatacaaacagtacttggaattgtcaaatgtttgcactcgagactccatgaaccatatattttattttttaaaaaatcatatttatatccatttacataagacttacacatttaaaaagaaatgcacagtaatacataaatgcctagtatattacaataaaacatgaaaaacaactggcttcatttcataaaagcatctgttgtacagagtttatgatgtagatgatgtttattattcaaatgacttaagcattttattacaattgtagtaaactaatcaaatgtaatatctgactccccccaaaaatcacatttttcagcttttaataagtcatgacgtcattatttccttagaattcagntttcacaaaggttttcactgctcgtcttcttnnntggtagtgcactttaggtagagtnnnctgnaaagannncntnnnnnnncagtgctgcctcctttga

SEQ ID NO: 7177 - DNA, 756 bp, Macaca Fascicularis
  misc_feature (1)...(756): n = A,T,C or G
aaaagacagtacagaaatagcagnnnnnggaaaggaagtataatggcatttttttctcaaaggaagttcttgttttcacgtcaaatacgaaaagcagatcctgcaggagtaatccccttctttaagagccaagtattcgcccgtgcttaaattacaccatacagttctaattgtatataatcttttcttcagttttttgttttgtttcctttttgttattgttgccgaaggtgagtagttttgcatttctgatgacagccttggaaagtatatttgtaactccatgtctggtaatgccaacccaagtccatatgggtcttaggacactgaccgcctcacatgccataccctcagttaagcatgttaacatttataggaggaaaaaaatcactttaggagaaaataaaattcaactcaagcataaagcttctatttactctggccttttnnnnnnnnnnnnnnnnnnnnnnnnnnngagaaagcctggtttcacttatttatataattcactgggacattgccaaatgagtaagcacttaatttgctgcttctgagacttctctatcaaaacagccccactaataatgttagaatgagaatgcaggggtctcttccctccccctggggtttaggaagctcatgaggagctcggcttaaaatgtctttgatgtctcttcctttgtctcaaaaagtaatgtcaattttatatactattcaatcattactatctgcatttgttttaatataaaaatgttt

SEQ ID NO: 7178 - DNA, 729 bp, Macaca Fascicularis
  misc_feature (1)...(729): n = A,T,C or G
catgcaggnnngagctgggtgctggttgtcatggtgaggtgaggacaggacctggttgtatgtggagatttgcgttgattggggagtggggtggggaggggctatctaccactgtgccgtcagccagggcctgccccacagaggaagatggcagccctccctggtgcccactggacctctctggggctctgctgccctgcccctggtcctcatgtagaaaggcctcacctacccaccttgacattcccttttccccagggtttcctgactatccctttgtttctgacactcagcaaaatgtccctgagctgaggcccctcatttacaccacatcttggtgtagggaggaaaggggcctaggacagcagcttctgggttcctgacataccacacacctgccacagtgccgcttttcctgagctcaggccctggctgtggggtcacccactgattcccctcctcctcgggtgagctcactcacagcctcggcaccttgcgagggcaaaatgatggtgccgcgtccctcctgcatgtgcacctagggccctggctgggagctggagccagcagtgatgctggggcctccccgagaggacacataacaacctcaggagtgggccaggcacannnnnnnnnnnnnnnnnnnnnnnnnnnnnnnnnnnnnnnnnnnnnnnnnnnnnnnnnnnnnnnnnnnntgagaccagcctggtcaataggcaaaaccctgtc

SEQ ID NO: 7179 - DNA, 738 bp, Macaca Fascicularis
  misc_feature (1)...(738): n = A,T,C or G
cagtnnnnnnnnnnnnnnacactcaatgaccagaccttggagaatgtcacagtgnnnnnnnnnnnnnnnnnnnnnnnnnnnnnnnnnngttatgtgcctgcccggagcctgccctacaaccagcnnnnnnnnnnnnnnnnnnnnnnnnnnnnnnnnnaagaagaccnnnnnnnnnnnnnnnnnnnnnnnnnnnnnnnnnnnnnnnnnnnnntcaaggactgtgatcnnnnnnnnnnnnnnnnnnnnnnnnaaggctatgaggatgagtatgtgctggaagatttggaagttactgtagctgatcannnnnnnnnnnnnnnnnnnnnnnnnnnnnnnnnnnnnnnggatgaggtaggggatgaatttgagaaggaggaaacattcaccttgtctaccatcaagannnnnnnnnnngctgnnnnnnnnnnnnnnnnnnnnnnnnnnnnnnnnnnnngtgagaggtcagacaaagtgccggataacaagaatacccacacgttgcttctggctggtgtgttccggggtggtcnnnnnnnnnnnnnnnnnnnnnnnnnnnnnnttnnnnnnnnnnnnnnnnnnnnnnnnnnnnnnnnnnnnnnnnnnnnnnnnnnnnnnnnnnnnnnnnnnnnnnnnnnnnnnnnnnnnnnnnnnnnnnnnnnnnnnnnnnnnccttcccccccaacactaccnnnnnnnnnnnnnnnnnnnnnnnnnnggcggaaaccccttcccaagctt

SEQ ID NO: 7180 - DNA, 675 bp, Macaca Fascicularis
  misc_feature (1)...(675): n = A,T,C or G
tagcatgttaattctgactttnntccacttcattttactnnnaagttaaatgctttaggaannngtggtgtgtggccactgaccaccccccacnntcctgccgctcctccaagtttgagctgagatggttctgtgagtccttggcaggggtcagagggcacacctccttgaacctagaaagtccctacactctcagaggacgcctctcctgtggattcagcgctggggcagtgaaggtgtcgggagccagcagagcatggtgcgtgctgccagctgccggccggccgggatagaggagatgccactggccctccgtgcccccagcccctccctcttaatcgaggctgcccttgctctctgcagaggccactnnnnnnnnnnnnnnngtcgcgcgtgacgtgtggtggcacagccgtgtcaaagtcacagtgtcttttctgtcgttctagttccagggtcacccccgagaggacaacaggcannnnnnnnnnnnnnnnnnnnnnnctgggtgcttactgtctctggcttgtttccatcactggaaatcacttagagaattgtagtgtttttggtccttgataaagcctagaannnnnnnnnnnnnnnncaaaatgaaagttttcttttgtttctgttttttaagatctaagaagttgtgaatgnnntaatcatagc

SEQ ID NO: 7181 - DNA, 761 bp, Macaca Fascicularis
  misc_feature (1)...(761): n = A,T,C or G
cttttctcacaaccaatactgccacannnngtgagcgccactcctcaggggaacctttttttgtagtttagagcaatgccctgaatgnnntacctacatggcacatagtatttgcaacatgcaaatggagacctaaaggctcatgatgggaatagaaggtggctctatacagaggaacagaaatggagttatgggaagctcaatcaacaattggcaacaagctaggtcagtagtttgccaaactggccatctatgcagtgcctgagttttggttctgggcttggatcatgtaannnnnnnnnnnnnnnnngggtgccaagaatcacacctacaatnnnnnnnnnnnnnnnnnnnnnnnnnnnnnnnnnnnnnaaagccggggccttgagcgcagccttggtagtaaaaccaagcccttgtatctaaaaaacaaaagggcaggtagattccacagaaataatgttgcaggaagggggtgataaaatacagaaacatcaacacacagcaaaccctcaactgtttcattggctcccagtgtcttaatctatgtctgctaacattttaaggtacannnnnnnnnnnccctaaacccagcaagcttttcatttaaaattccttcagtgaggtacatctagggaaaaagtccctaaagtgtgctgataaattaggctccttgaatgctgccttggagtaggaaatgcagcattagacagactgcctaagcaagctgggtaaaaccagttaaaatagcaaactctcaa

SEQ ID NO: 7182 - DNA, 753 bp, Macaca Fascicularis
  misc_feature (1)...(753): n = A,T,C or G
gccatgactcgcnnnntcnnnnnnnnnnnnnnnnnnnnnnnnnnnnnttgcacgagggnnnnnnnnnnnnnnntgagggccatggaggacaaagagaagacggacccacagtgccttgccctgtttcgcgnnnnnnnnnnnnnnnnnnnnnnnnnnnnnnnnnnnnnnnnnnnnnnnnnnnnnnnnnnccgccacctctttgcgctctatgtcgtgtcccgattcctccacctgcagtcgcccttcctgacccaggtccattcggagnnnnnnnnnnnnnnnnnnnnnnnnnnnnnnnnnnnncaaatgcatctgtttgacgtccacaattacccggactatgtttcttcgggcggtggattcgggnnnnnnnnnnnnnnnggttatggtgtttcnnnnnnnnnnnnnnnnnnnnnnntgatcaccttccacatctccagcaaaaaatcaagcacaaaaacggattcccacaggctggggcannnnnnnnnnnnnnnnnnnnnnnnnnnnnnnnnnnnnnnccaggcgggacagcattttaagcgccggttcagagggtcagggaaggaggactccaggcacaggtgtggatttctctcnnnnnnnnnnngggcctccaagacatcaatgacatccacctacttctgactccttccagcaggcggctggcctctccggggaatgagggtnnnnnnnnnnnnnnnnnnnnntnnnnnnnnaggggcagcctgtttggccaccggatatccaggc

SEQ ID NO: 7183 - DNA, 734 bp, Macaca Fascicularis
  misc_feature (1)...(734): n = A,T,C or G
ctgtatggaagattgaacaaccgtaaatagatgatatccaannnnnnnnnnnnnnngacttcagttttaaaaatcggcgtacctaggcagcgcacagtaggaaataagtggtccttgcagcttccccgtttgacccactgtgctgtagttgcatgtggaacaatcagcctttctagtnnnnnnnnnnnnnnnnctctcattgtattcccannnnnnnnnnttnnnnnnnnnnnnnnnnctttctgcaaattattcagcctccaaatgcaaatgaatggtataaaaataagtagggaacatggcagagtggtgcttcccannnnnnnnnnnnnnnaatttgatgtgggataagagagtatagatttaaaagataaaatctttagttaataattttgtgtttatttattctagatgtatgtatctgaggaaagaaatatggtatttttgctttccaataaaggggatcaaagtaatggtttttatctcagttctctaagctggtatatgttgtagctctagnnnnnnnnnnnnnnnnnnnnnaatacgcttaccttttgaacgatcatggctatatgttgtttaaatatttaaaacttaccttgttttcacttgtgcactgtgaatgaactttgtattattttttaaaaccttcacattannnnnnnnnnnnnnnnnnnnnnnnnnnnnnnctgtgcttgatcaaaggtcatttgtgtagatgagtaataaaataa

SEQ ID NO: 7184 - DNA, 723 bp, Macaca Fascicularis
  misc_feature (1)...(723): n = A,T,C or G
gagtaggcagcaccnnnnntaagaattctatgtgaccaggaaaggaggtggaattcctgaacagaagcaatgcaaatacacagagaacttggtgagttggggtcatatgtggaaatgtaaatggtctatgctgtataacttattacaggcatgagcgattgtatgtctgtgctaactttgctgtgtcaaagtcatttcctatttaaactgaatttgtagaccacagaagaggatcaggattaattatgtctgtgaggaagaagagaagcaaacagctcacttgatttaactaaatacattacaataatcactacattctgtcctttagacctgtgctgtccagtagggtagccaccagacatctatggtcactgagcacctaaaatgtgctcctagtacaactgagagacgaattttaaattttacttaattttttaacagttaaatttaaatttaaaagctgattctcagctcaattattggaaaatgttaagtatgtttggaacaatttgggtatatacatcttttttttcaattatgaattttatgacatctaaatatagatcacctatttctggtaaaatttagcatctgaattaagatatattataggtataaaatacacactggacttcaaagacttagtataaaaaaggaatgtaaaatatctcaataatgtttatattgatgatgtgtcaaannngataatcttttgtatgtact

SEQ ID NO: 7185 - DNA, 762 bp, Macaca Fascicularis
  misc_feature (1)...(762): n = A,T,C or G
ctggccagaggtcacccttctgcttcctgtgtgctccagtggcttttgaagacactgggctgggacctttttcctgaagagagctgggtgtagccagagcttctggcacctacccctagcatctccctctgtaagcagcttcaggggcagtccgtttctctgtgcttctgaaagcccccttcttacgtttcaggcccgagtttnnnnnnnnnnnnnnnngcaggggcatttgattgatgatgacagaggacacaggtttatgctttgccagcaagaaggaaaaccgaggcttggcggaagggaaaggtggtgtgtcccctgttccctactccatctccctgggacttcctgctcatnnnnnnnnnnnnnnnnnnnnnagatcctactagactgggtcagcaattctagagaaccttccggaatagtctgnnnnnnnnnnnnaggtggcaggggctcccctagagagggtgggggtgtagttatttcccagttggtcagaaaactgggcccttagcattttttcccttttttttccttccttgctttttacttctttggggagccccttgtgttttggagtttgactggagtctcgcatcctggggcctgctccatccattcctcctgggccccagaccctccatcctagccctgtgtctttccagaggcagggtcaggccccgcctctattccaaggggcactcagtacacattccataannnnnnnnggtgtccctgcccgcccaccccatgaaactgagc

SEQ ID NO: 7186 - DNA, 741 bp, Macaca Fascicularis
  misc_feature (1)...(741): n = A,T,C or G
atgaaaagacatcttttcctgtctgtggtgaatcgtccaagttgtttggcttgatttccagtgtcgactttctaaaccaacaagattttaatcctctgatggcagaatgttaggagtgtctgtttgtgggctggattttagttgccgaggtgaatgaaacctggttcaagttgcctggcacaggaaagccaaacatccacaccaagattttgcagctagagaaaagagggcatttattcgcagggcaccaannnnnnnnnnnnnnnnnnnnnnnctaatgacctgcttcagcttcactgcacccagnnnnnnnnnnnnnnnagcatgctcagtatatctgggatgtctggagacagctggaacaaagaagagctgcaggagctgtgagtgtcagtcacaacgtgggtaccactctggtcctcagtggcctgctcttcaaaggaccccagcagccttcactgccgaggacctcagtaaccctcatggtcaccagagaatcctcactgcttccaccaatgagaatcctatcatgtctgcttcaaacaccagagccaccactatgggatcactgtctttcattgtctgatatttattgaaaacttgtttattttcagctttnnnnnnnnnnnnnnnnnnnnnnnnnnnnnnnnnnnnnnnnnnnnnnnnnnnnnnnnnnnnnnnnnnnnnccgcctgtgacatgttactgtacacctcaagaagaaccctggcagtatgtaaaa

SEQ ID NO: 7187 - DNA, 733 bp, Macaca Fascicularis
  misc_feature (1)...(733): n = A,T,C or G
aatcccatggaagttgtgctcagcctgtcgggtctcnnnnntcctgcccatatattataccaattgctttgcagcccacagatgccagcaatgccaggaaacaagttgaaatccaggaatctctttaactgattttgctaaaaatttccctgtgagccttccactcaactcttaataggcttgcattgtttaagtttttaaattctgaaaattaataattagggtttttcttcatatatgttgcataatgcaaacctcctagattaaaatagtttctttatttaagatagaataatttccagaaattgtccttttgagataatcacttttatctataatggtttgtctgtcttttttcttctgatcagttttttttataccagttttgaaaactgagatgaaagaaaatgcgcaataaaagggggttttcctgatgtggtgtaaagaaaacagattcaagagaattgaagattttttttgtttcttggtacttttttctttttaaattaggactaatgtttcttttgtggtgcttgaggcatattcatataaccaaagtttgggaactgggaacttcatgctgatttgtacataatgaagtttctcaggtattcaaaggttatatagtgaataaattttcattaataaatcactttgtcagaaattcccatatcatctatattttatatatgtatatataaacatatgctctttaagtgtgtctatatgtgag

SEQ ID NO: 7188 - DNA, 754 bp, Macaca Fascicularis
  misc_feature (1)...(754): n = A,T,C or G
aganntttcaaaannnntttcnnnnntttgccattagttaaacaaatgtgtataatacnnnnntctataagatttcaattgaaagtggccaactttaaatttattttatagcataactaaaaattctgtaataataccatggtcctttttaacattttaaaatattttcagaagtctgtggaagatttttttttgcagtgagtcatgccactaatcattggattagtgggtgctatcgtaatgggcattaaaattttgtataaagttttagtctaaggcctcaattgctaattacaggttttacaaatatgttagatctgagaatgggagctgagtgatggggatgaaagaagaaaaaccacaggatagggagtgattattgagcaacctctgtgttcctggaactcaatatattatactttacccttggttctcaaaacagggttttggaagtagatgttaatagctgcattttatagataagatactgaagccaaaggaggttaaaaaaataatcacgtctgactctagagtctctattaatttccatcatactattagatgaaaagtgtgtgtgtgtttatatttgtgataagcaaagagaaaaggcagttccaaaagcagtggttagagttggccaactgcaataacgttattgtgaggttagttttctcctagaaaatttatattataccaccttatagaatcgaaagcaaactgattttatagagaggactgtgataaataaacatca

SEQ ID NO: 7189 - DNA, 2065 bp, Macaca Fascicularis
gtcaaaaacataactgaggctgctgcagagaccaaagaaaaccagagggacttttcccagttggtgatatggagcaagtgccatcaacaggcagactcgtgcagatcaccgtgacagagggatatgatttgaaaggatttaaaggagatactccagttacctttattcgggcagaattcaatcaagtggttctgggagactctgcaaaaattactgtttctccagaaggaagtgcaaaatacaacttcactagcagttttgagtttaatcctgaaggaggaatcactttagatgacctcgctcacaaacctgtgttcttaactgtgactgaagttttaccaaaggaaaagaaacagaaagaagagaagaccttaattcttggtcaggcggtggtggaccttcttcccttactggaaggacagagttcatttcaaacaacagttccattgcaccctgtgcaaggctcacccttagaaactcctagatcaagtgctaagcagtgcagtcttgaagttaaagtattagtggcagagcctttactgaccacagcccagatctcagggggcaatctactaaaggtcacgctggaggctgcttactctgtgcctgaatccttcattccaacaggtcctgggcagaactacatggtcggtctgcaagttccatcacttggagagaaggactatcccattttatttaagaatggaactctgaagcttggaggggaaagagaacctgttccccggcccaaaaagtggccaattgccaacattctggctccaggagctaataacattcctgatgcattcattgttggtggtccctatgaagaagaagaaggagaactcaaccatcctgaggacagtgaatttaggaatcaagcagagtgcataaagaaaaggattatttgggacttggaaagtcgctgctaccttgatccttctgcagtggtcagttttcagaagcgaattgccgattgccggctttggcctgtagagatcacaagagttcctctggtcactgtacccaaagggaaagctggcaaaactgaaaagactgatgaagaaggtcagctttcatttcatggtgtggcttatgttaatatggtcccattgttgtatccaggtgtgaagagaattcggggagcttttcatgtttacccttacctggacagtgtagtccatgaaaagaccaaatgtttactgagcttgttccgggagattggccatcacttgattcataataataaaataggaggaattaattctctgctgtccaagcaagctgtttctaagaatctgaaagaagataaaccagtgaaagaaaaggatatagatggaaggcctaggcctggggatgtgcaggcacctagtataaaatctcagagctcagatactcctttggaaggtgaaccccctctaagtcacaatcctgaaggacagcaatatgtagaagcagggacatacattgtgttggaaattcagctggacaaagctttggttccaaagcgaatgccagaggagctagccagaagggtcaaggaaatgattcctccaaggcctcctcttacccgtcggacaggaggagctcagaaggcagtgagtgactaccacacacagatcaagaatatttctagagccattctagatgagtactacagaatgtttggaaaacaggtggccaaactggagagtgatatggatagtgaaaccttggaggagcaggcctacaagtacatgattaagctgaaattgaaagatgaggctctgcttgcagagatccacacactacaggaaacagttggctttggaaatccatctttctgatacccctccagctgaacaattttccgtatgggactcttgagttcctttccttcccagagagtttcaccatatcaagtctgcagctggagaacgaaagaatcttcaccataaacagagacccattcatttatttccattggctgtgttactggatgttttactggttgacaagaaactgggtcacaataaaaaatgaagatatgaaactcaaaaaaaaaaaaaaaaaaaaaaaaaaaaaa

SEQ ID NO: 7190 - DNA, 738 bp, Macaca Fascicularis
  misc_feature (1)...(738): n = A,T,C or G
tgtgctgccagggcgggtgcggccagctctccatctcagggcagtgaacagtcctgggctccagctccagtcatgtggttctgcggcagttgtgtgacagggaccaaggagaagtcagggagaattcctccaaggagaagtcaggacgtcagcaaagcccctggaagcagccgtgagttcctctgggctgacatggtgctggggtccacgtgggacagacatcctgggccctgggcaggaccaggcatatacagagacatggggccaagggaagagagggcgccgtggaccacctgacccaccaccctctggggaggctgggatctgcctccctggcatgcaaggatcctgtagaaggaaccagggcccgcgccttctccagcctgggtggccttggccccagcttccccgtgggtctctctgacaggccagcatacggtgacctgcttccaagagggacacctgtggcagcttcagacccttatttaaaagacattaggccgggcgcggtggctcaagcctgtaatcccagcactttgggaggccgagacgggcggatcacgaggtcagnnnnnnnnnnnnnnnnnnnnnnnnnnnnnnnnnnnnnnnnnnnnnnnnnnnnnnnnnnnnnnnnnnnnnnnnnnnnnnnnnnnnnnnnnnnnnnnnnnnnnnnnnnnnnnnnnnnnnnnnnnnnnnnnnnnnnnnnnnnnnnnnnnnnnnnnnnnnntgnnnnccggc

SEQ ID NO: 7191 - DNA, 744 bp, Macaca Fascicularis
agcaaggtacaggtgactacctagttcaaaacaaccactttctcaggcttctcgtgtgtgtagctaagctaccttgtcatatgtgttgattcttgaaaactgggacatgtatttccattgggggttggccatttatgctgacacgccatccttccacaaacatacaggaacgtgctttcaattgatggactactctgttttttgcaaatttgtaaactttgcttctccaaataccagtactaggttggccatttatgatacctatttggtgctagtaaattttcaaactagatttataaatgcactgtaatatttacacaacttagaaaccaaattacaagtattcagttccaatacttcattaatttcaatcaaccaaagttagttcagtagcttatctcagttatgagtataatacattacatgtaaattaagtgtgtgtatactgtaatcgtgctattttttatcattgaaacatttataaactagaataataatgcccttaatgtgagggtttgtaatggtgcttattaagaccaaagacttgttaaatgtatacaccaaatggtaatgaaatttctgtgactggcccacgcgtgcatagaggtctgggaggaccaggaaacagcctcagtggccagaggatcaccagtgcatccttcatcacagcatgtgcaatatgccaagattaccctcggtcattcctgtcaacaaggggtcaatgtcataaatgtcacaataaaa

SEQ ID NO: 7192 - DNA, 701 bp, Macaca Fascicularis
  misc_feature (1)...(701): n = A,T,C or G
tacaggttcccatgaatctnnngctcttgtttgtgtaacatggaacaaaaaacttctttgccaccactttgccttagataactgtgtgtgtgtgccagtttgaactctgacaccacattttccttctatgcaatcatgccttgtctgataatcttgcattgctttgctctaagctttagtgggtcctagttgcacactggcctttctgtgctgtttttcaatttgcctaataatagcagttacccttattgtaatttatgtaactttaaacaggatcacactgtaccccctgcctgccttatttgcttactgagnnnnnnnnnnnnnnnnnnnacaactctgggttcacacacaagctgagatgagnnnnnnnnnnnnnnnnatattgtggaaaatcatagtttgtaggtataattatatagtgcttttctccctcaaagtatttttctagtcttgaattcattttatcttcattatataatccctgtgaagtaggtgggacaagtatgaggggaagaggggtgctgaatttttaggccaaagactgatattaatacaaatcactcactaactgtagagcctnnnnnnnnnnnnnnnnnnnnnctaagatttactgtcttcatctgtttaatgagtagaatatccgtgatgcctacctcacagggttgttgtgagggtcaaatgagaatgtatgtgaaaga

SEQ ID NO: 7193 - DNA, 806 bp, Macaca Fascicularis
  misc_feature (1)...(806): n = A,T,C or G
gcagtagctacagaatgcagacacnnntnnntcaatgtctcttcatcaactctgacttccaaatacagaggagaatctgagaagcttgttcgtcttctgtttnnnnnnnnnnnnnnnnnnnnnnnnncnnnnnnnnnnnnnnnnnngatagactccatttgtagtcgccgannnnnnnnnnnnnnnnnnnnnnnnnnnnnnnnnnnnnnnnnnnnnnnnnnnnnnnnnnnnnnnnnnnnnnnnnnnnnnnnnnnnnatgatgacccttccaaaatggttatggttctggcagctacnnnnnnnnnnnnnnnnnnnnnnnnnnnnnttaagacgacgccttgagaaacgaatctatannnnnnnnnnnnnnnnnnnnnnnagggaggagctattacgaatnnnnnnnnnnnnnnnnnnnnnnnnnnnnnnnnnnnnnnnnnnnnnnnnnnnnnnnnncatgnnnnnnnnnnnnnnnnnnnnnnnnnnnnnnnnnnnnnnnnnnnnnnnnnnnnnnncaatgagaaggcgcattgaaggtttgactccagaggaaatccgaaatctttccaaagaagaaatgcacatgcctacaactatggaggattttgagatggctttaaaaaaggtttctaagtcagtgtctgctgcagacattgaaagatatgagaaatggatatttgagtttggatcatgctaaattctcacatgtaaattgtgagaaatgtgccttaagtgtttgaatattannnnnnnnnnnnnnnnnnnnnnnnnnnnatattttttttaactttcataatggtaagatt

SEQ ID NO: 7194 - DNA, 2824 bp, Macaca Fascicularis
agcaacgtcagggccggggccgcgaggtagttggcagaggcctcggggtcctcctggaaggggcctcatgacagattcggacgaggatgccctgaaggttgaccagggcccctcacaggacatcccaaagccatgggtgattccagcccccaaagggttcctgcagcacatctttggaaccagccaggtgttccaaagcatctgtgacgtaaagccaaaggtcacggggttaacggtgcccctcaaagtcagggagtactactccagaggccagcagtgcttggagcaggcagactgggagacagctgtgctgttcttctcccgtgcgctccacctggacccacagctggtggacttctacgccttgcgggccgaggcctacctccagctctgtgacttctcctcggctgcccagaacctgcgaagggcctactccttacagcaggacaactgcaagcacctggagcgcctcacctttgtgctctacctacaggggcaatgcctttttgagcagtgtgccttcctggatgccctgaatgtcttctcacatgctgccgagctccagcctgagaaagcgtgcttccgttaccgatgcatggcctgtctcctggccctcgagcagcatccggcctgcctctcactcatcaccgaggagctgaagcaggacaccaccaacgccgacgtctacatcctccgggccagactctacaacttcctccagaagccccacctctgctaccgggatctgcacggcgccttgctgttgaatcccaagcatccccaggccaggatgctgctccagaagatggtggcccaggcccagcaggcgcgccaagacgcggggatcctggccgtgcagggcaggctgcagcacgcactgcagcgcatcaactgtgccatcgagaacaaccctctggaccccagtttcttcctcttccggggcaccatgtaccgacggcttcaggagtttgatggagcagtggaggacttcctgaaggtgctggacatggtgaccgaggaccaggaggacataatgcggcaggcgcagcgccagctgttgcttacctacaacgactttgccgtgcactgctacaggcagggtgcctaccaggagggcgtgctgctgctgaacaaggccctccgggacgagcagcaggagaaagggctctacatcaaccgaggcgattgcttcttccagctgggcaacctggcctttgccgaggcagactaccagcaggcgctggcgctgagcccgcaggacgagggcgccaacacgcgcatgggcctgctgcaggagaagatggggttctgcgagcagaagcacaggcagttccagaaggcagaggaccacttctccacggccatccggcacaacccccagaaggcccagtactacctgtaccgggccaagagccggcagctgctgcagaacatttttggggcacgccaggatgtggccactgtcctgctcctcaaccccaagcaaccaaagctgtccctgctgatgaccaacctcttcccgggcatgtctgtggaggaggtgcttagcacccagatagcccacctggccaggctgcagctggaacggatggtggagggcagcctgcaggctggaggcccacaaggcattgtggggatgcttaagcagtgggagttggagcgccagaaggccttggccctgcagcactcatggaagcagggggagcctttgattgagacctccgagaagctgcaggccacccctgagattccgcaggtagaaccgggaagctcagagggacaggctgaggcccccaaggaggaggaagagaaggaggaggaggaacagaaggaggaggaggaacagaagaaggaggagaaaaaagaggagaagaaaccaaagctcacacctagcaaggtggcgtccctgtccgagagctacctcgaccagacctctttagcctccagcatgagcttcaggaccacatgcacctcagagactgagacgtcggctatctgccaggaatacaggagcacctcagccaccgccatgacattctctgactcatcactgctgaagacgcaatcctcagactctgggaacaatagggaggcattgagccatggtcccagaaaaatcaaggacatccagggccagaggcagagccttagcaagacccaggccacccagagccagaggcagaacttcagcaagaccaaggccgccgcacacaggaggaactccagcaagaccaaggccacccagggccaagggcggcgctccagcaagactgaggccactcagggccagaggcagagctccagcgagatcgagacctcccagggcccaaggcaggagcccagcaagaccaagaccacccggagcccaaggcagaggccccgaaaggtcaaggctgctcgtggccggagctggagacccagcaagcttgatgccacccagggccgaaggaggggactgctccgaagttccaccaagactgaggctttctatgactcaaactggagcctcagcaagactgaggatgttcaaggccagggccagagaaccagcaaggctgaggctgcccagggcaagagccggggcatgagctcaacttccagcaaggctgagtccacctggggacccagcccgagtgtcagcaaaactgaggttggtcaggacctcacctactacgaagttctctgaagggaccatctagcccctcacttcttgctggggaggggagcagttctactcaccccccagcactggcactgagccagctgcctccttccagagcaattaaaagtcttagcaaacagtcaaaaaaaaaaaaaaaaaaaa

SEQ ID NO: 7195 - DNA, 727 bp, Macaca Fascicularis
  misc_feature (1)...(727): n = A,T,C or G
acaggtgaaaattatatgaaataaaaattttgaagaaacacatnaacaagaaatcagtcgtctgcaaaaaagattacagtggtatgctgaaaatcaggaacttcnnnnnnnnnnnnnnnnnnnnnnnnnnnnagcaaatgaggaaattgagaaactcagacttgagattgagaaactgnnnnnnnnnnnnnnnnnnnnnnnnnnnnnnnnnnnnnnacgcttaaaagataaagcagcagatgccaaaaaaattcaggatctggagcgacaagtatgtgttcagggttacaaaactcttagaagaattgagagaagccaaagaaaaccatacaccagagatgaaacatttcgtgggcttagaaaagaaaattaagcagatggaaatgagacatgcacaaagagannnnnnnnnnnnnnnnnnnnnnnnnnnnnnnnnnnnnnnnnnnnnnnnnnnnnnnnnnnnnnnnnnnnaaaaatggaaaagannnnnnnnnnnnnnnnnnnnnnnnnnnnnnnngttccgcatagaactagactcaatattagatgttctccgnnnnnnnnnnnnnnnnnnnnnnnnnnngccagnnnnnnnnnnnnnnnnnnnnnnnnnnnnnnnnnnnnnntagaaactcagatttcataatgaccttattaaaaggcctaaaaaatggatgggattgtgccactgccaggacagcttatgaaaaacaagtgttccagtatg

SEQ ID NO: 7196 - DNA, 220 bp, Macaca Fascicularis
caatgtgggaaaacgtccaagtgttccaattacgttcagatgcatgaaagaactcactgagaagaaccctatgcatgtcagcaatgtgggaaagtgttatctcataagctttcaaagacacgtggtaatgcacgctgaacatggacctcataaatgtgaaatatgtgggaaaaccttttcctcaccctattcatttagaggacatgaaaggactcacact

SEQ ID NO: 7197 - DNA, 740 bp, Macaca Fascicularis
  misc_feature (1)...(740): n = A,T,C or G
ttgatcatagtccaacagggccagcttcccttgaggaccctttaaggaatggggtgaatgaaattgtgtcatttctatacaaacactgctctcttgatgctgagatgccaaaccaaaggatttctgaggacctgaatcacagagcatcaatcttacaaagtgttggtccagagtcatctcttccccaaccctggacactagtggcttcccacctggtccaaacctgcaccatccatcattgtgtagatgaaaaagccataggtcacagcctctttgctattctgttggagcagcctccctaagcggtccctctgaagccttggggtgcaggtaaatgctcattcccaagtagcaaagagaccacggagaagatgcgtgtaaagagatatatttttgtaagaggaatatgattaatacattccgcccattggaacctggccatgcaaaggaaggacacagggattagacctgtggcacccttccctgattccctcatctgtaggacttgggctgccccaggcccacccacggggctctgaatgtattttgtaccgtgttnnnnnnnnnnnnnnnnntttctagtcttctttcatgaagcagtggaggggttggcctcctttccactgggagtttgacactctctgcaagactcttggtccaagacctgggtcagttctttgctggtggtcccctctgaccacaagcttctgtctgaagattcctcaggtcaacaccatcat

SEQ ID NO: 7198 - DNA, 757 bp, Macaca Fascicularis
  misc_feature (1)...(757): n = A,T,C or G
aaatacagcagaaaatctactcnnnngcaacatataacacagtatgtgcttttttatatattcaatgttagcccaagtctgaatttagatttgactaaagcagcacataatttnnnnnnnnnnnnnnnnntactaaatagcgagcaaaattagaatttcttactcttattttatgctcttttaaatgccaattacagtcccttactggaattctaactgtaatctgcttcgcaatcaaactgctttgattgggcagtcaatattttattattagaattcagacactgttcttaccgtgtttgtttttaatcaagtattacctaaaaatgtacaaattagtgaaatggttaaacttctgcactttcttaattaccacagtcttcataccaagtattgagtacaggttacaattttgaagccatatgagtttatattgatttttttttttttttttcatttaaaaatccactaatggtgtgaaagagaccagtagattttcaatgggaaatgtacctagcaagctggttcttgcttatgtatagtgataaactttgtagctgcctctttaaccaagaatttgtaaacataactctaacaaatgtgagtttttaaggattgttatttactactttggattgtaattagaacaatacacatctgtcttccaagattttgtaaatatttttgatttttttnnnnnnnnnnnnnnnnnncataaaaaaaaaaaaaaaaaaaaaaaaaaaaaaaaaaaaaaagg

SEQ ID NO: 7199 - DNA, 1791 bp, Macaca Fascicularis
ctcttcatgctgcccccggttgccacagccaacctcagactcagcggtggcctcagcccctccccatgccagccccagtaaggcggccgtgtgccagcctgggccccgtgcgctgggtggccctgagttctgcttcctgcagctgcccctcggtaatgtggagcccacacagccagtgcccagcaccgttaagtcctgcaagcagtgggagtcccaggaagctccagcaggagggcacagccctgccctggcacctccctctcagtgacagctcccagactccccacctcccactcagctccacctcggaccccacctcaggctgcagggtcacctctcacctccatctttgcccgtaaggctcctctgtgaggtcctggccgtcctgtgctgtggctgtgtgagaaaagtccacggcaggggttcagccgcccccgctaaggggaccaaagctttggagggtgggggctggaaacggccctctccctgctccgaccgtctccacccgcgctgtgcccctcacatgtggaagcagaggtgcctgggcgctcacactgctccctctgcacagatccccagcctcagccacagtgtcatctcccagacgagcttccgggccgagtacaaggccacgggggggccagccgtgttccagaagcctgtcaagttccaggtggacatcacctacacggaggggggggaggcacagaaggagaacggcatctactccgtcaccttcaccctgctctcaggccccagccgccgcttcaagagggtggtggagaccatccaggcccagctgctgagcacacacgacccccccgcggcccagcacttgtcagaaccccccccgccagcgccaggactaagctggggtgctgggcttaagggccagaaggtggccaccagctacgagagtggcctctgacgctggcagacaccactaactgtatggaaatgatgacggggcggctttccaaatgtggaattatcccgaaaagttaacatgtcacctccacgaggccatcctctgtgaccgaaggcagctgctgcggacccgccctccctccgctcctgctgttgctgccaggcagcgaggcccagcccagcgccccgtccaccccgcggcagctcctcgcctcagctccgcacggcccgtgggaggagggccaggctcgggggagcctcctccagcccggccgacccggactcccggtcacctgacccctcagcaagaacagcctgcctggcggccttctggggccgggacccccggtgggcaaagtagccacaggaacagaccccgtccaccccgtccaccgcctccacgccgcacctggaggcctcctcgcgcctcgcggcccatgccccgcctccctggccgtgccgcctccgcctctgtgtagtcttggcctcctcaggctgcctcccgtcctctcgtctcacctgcgcctcccttgcctcatctggggcggctgtgggctctggcactcctccctggctgaggtggaaacagagagaccctagggcgccagagccttcccagcaggccaggtcgctgggctgggatcggtgttatttatttgctgttttaatttatggattctctacacctctgttcagggaagggcggcggccgcatcccctgccgtctgcccgtctcgggcggggtggggtctggggccaggacgccctctgaggacagagctggtggggctcggggcagctggtgagctactgtaaactttaaagaattcctgcaagatatttttataaaaaaaaaaaaaaaaa

SEQ ID NO: 7200 - DNA, 757 bp, Macaca Fascicularis
  misc_feature (1)...(757): n = A,T,C or G
gnnnnnnnnnnnnnnntgctagctgtcagggaaggagagtggctccatgggttnnnnnnnnnnnnnnnnnnnnnnnnnnnagggnnnnnnnnnnnnnnnnnnnnnnnnnnnnnnnnnncnnnnnnnncatctaggggtcccctgtaagagggtgactcttgaannnnnnnnnnnnnnnnnnnnnctctgagnnnnnnnnnnnnnnngatggcctgaagatgaaaatagacaattgggttatttgtaactggtggccatagtcatgcctgccaagacttaggtttattgggttgctagccaattccagtannnnnnnnnnattagaatattcatccagatttgtacattacccatcccttttnnnnnnnnnnnnnnnnnnnnnnnnnnnnnnnnnnnnnnnnnnnnnnngaaagttagtctaaattgcagagaaaaactcaaaaacagctgatgagactagaatctaagaacaggtatnnnnnnnnnnntgaaacataatttgccaagcatgnnnnnnnnnnnnnnnnnnnnnnnnnnnnnnnnnnnnnnnnnnnnnnnnnnnnnnnnnnnnnnnnnnnnnnnnnnnnnnnnnnnnnnnnnnnnnnnnnnnnnnnnnnnnnnnnnnnnnnnnnnnnnnnnnnnnnnnnnnnnnnnnnnnnnnnnnnncagctactcggaaggccatggcagaagaatnnnnnnnnnnnnnnnnnnnnnnnnnnnnntgagttgagatcatgcttctgcactccaacct

SEQ ID NO: 7201 - DNA, 762 bp, Macaca Fascicularis
  misc_feature (1)...(762): n = A,T,C or G
tccatagattcttagtatttccatggaacgtannnnnnaaaccttgggatagatgatccactgaaaccttttccagctctaagattttaaattgtccttttagattagacttgctgagtttaattcagtttgcataattttaaaatgtttctggaaagtgaacaaagttaccttacagagttttggatctttccnnnnnnnnnnnnnnnnnnnnnnnnnnagaatccttcacctttcaaggaattatttaacattgagcnnnnnnnctcaatagggcccaagcctttttattttacaatgtgagctccaagacacttactgatctactgtgaatataaaatgttattatagccttagcaaataaatgagcacagctctttgttcgctctattaaactgggtgataattatttagatgtgaatgttaggtcagttctactgtaataactaatcgtagaagttgtaaatttgtttaatggatgaaatgtacactttttgtattctgtacagctttgtcttttttaaatatgaagtacttaaatgtacttaccatgataggaaatataatgtgtgccttctaggatttgtgaagtggtttcatgaactcaaggaatttgttttccctatcctaactcaataacagggtttactctgattatgtatagaaccttagtttgagaaaatgaattttactatgtactgaatttagaggttgagaataatagtatctgtgttattcttagtacccactgataaattgtgc

SEQ ID NO: 7202 - DNA, 3312 bp, Macaca Fascicularis
tggatcacctataagaggactcagaggggggtgtggggcatccatgagaaagatgtcagaggaagaggagttttatctgttcaaaaatctctcttcagtgaagccgtgggatgggcctcagtaccacattgcccctgtctgggccttctacctccaggcagctttcatgggcactgtcttccttgcagggtttccactcaatgccatggtgctggtggccacagtgcgctacaaaaagttgcggcagcccctcaattacattctggtcaacgtgtcctttggaggcttcctcctctgcatcttctctgtcttccctgtctttgtcaacagctgtaaaggatacttcgtctttggtcgccatgtttgtgctttcgaggccttcctgggcactgtagcaggtactgcaggggaaaaggggttacgggaaggcaaaggttgctactccactggagggggtccttaaagaggagtctgggggaaatgagtctggtgctttttaaaatactggggtacaaagcaacccagactacaagtttggccaaaataggatgtttgtgtcttcactccaaatgtcagtccagtcctgtctctctgtgcttgctccacccaatctgtctgccactctgcctgccaggctgggtggggccctgtctaccccattatcctcacatttcaccacaggtctggtgacaggctggtcactggccttcctggcctttgagcgctacattgtcatctgtaagcccttcggcaacttccgcttcagctccaagcatgcactgacggtggtcctggctacctggaccattggtattggcgtctccatcccacccttctttggctggagccggtgagagtgcaaggcagcgatgctgacttaattagctcaggttgatgtgggtggaaagagagcttgggtataactatttaatctttgacctctactttttaaagagttgtagtatgaggtgaaagggcagtgggagacgagtgctagcgtttactctgcagttggaattgctgtagcttctcccagtcaggacagaaaaccccactgcttgaagcctttgggcagtctctgggttctaagtggagaacacaatccaggcatctcagctcccactgcactaactcttgtggagagtccagtgagcaagtgtttggtcctttgcaggttcatccctgagggcttgcagtgttcctgtggccctgactggtacaccgtgggcaccaaataccgcagcgagtcctatacgtggttcctcttcatcttctgcttcattgtgcctctctccctcatctgcttctcctacacccagctgctgagggccctgaaagctgtgagtggccatttgatagtccagggaggaatgggtttggggctccacatgagaaggaagagtgctctggaacataagatgccctagaaatgtccatagccagagagggtatctaaaagcagcaaaggaagtgggaggagggagaatgatggagatcccaaaggaactaggcccaggagatggggcagaaaagaggcattcagagtggacgtcccctcccccatcccatagaaaagtatccagaggccgggcacagtgacttaacacctatcatcccagcactttgggaggccgaggcaggcgggtcacctgaggtcagtagttccagaccagcctggcctacatcgtaaaacgctaaaatgcaaaaattagctgggtgcagtggcatgcgcttttaaccccagctactcaggaggctcagacaaaagaatcacttgaacccgggaggtggaggttcagtgagctgagatcgtaccactgcaactccagcctgggcaacagagcaagactccagtctcaaaaaaaaataaaataaaataaaataaaaaattaaaaaaattaaaaaaaaaaaaagcatccagagggccaggaaaaagagggatgtgatgctctctgtcttcaccccaggttgcagctcagcagcaggagtcagctacgacccagaaggctgaacgggaggtgagccgcatggtggttgtgatggtaggatccttctgtgtctgctacgtgccctatgcagcctttgccatgtacatggtcaacaaccgtaaccatgggctggacttacggcttgtcaccattcctgcattcttctccaagagtgcttgcatctacaatcccatcatctactgcttcatgaataagcaggtaaagctctctattcacattcctgtggtccagaagaccctggttcttcttgacttttaactcggagcaccctggactctactcaggtttctaggagtagacgagggaagccacaaaacccctgaggaggttgggaagcccttggtaagcacagggaggaaggcatggttatcaagatgagaaaatagaaccccagaggaaaagaacttgagtcaggaaaacgaagttgctccaaagaacaggatgagcgaaagcactttattgaaaaactcgtgcagcaaaccactatgggcacatgtttacctatgtaacaaacctgcacatcctgcacatatatcctggaacttaaaaaaaaaaaaagattcctctgaatttccagtcctttcatttaataagttcttaatcatttcccttccaacttttagcctgcatgagcatgtgtgaagcacagaaatcgtaccacatgcataaatctctaaaatatcttattatctgaaggtactgggggattgcctatcccctatcctgaaatctgaggtaataaacaccaaacaccaaaccctaagtggcaaaaaccctactttcagatggtattgtttcctcaatcccagaggtagactcaaaaataatttgaaacctccctggatagaacagaattggcagtcctttccagctgggagcacctgctagtaatggaggggcctctgttggcagtgcttttatgaagcaggatggtttgtgaatttacgaacagtgaggtctcagacttgaccagagtatttaggattaccatagaccctggagttgttctagactggaatctagatagttttgacgacggggaagatagattcagaaccatgtaagggcattctggtacaaagcattgtgcaaggctttggtgatacacagaatgaggtctttttccccatacttccttgtctgccaaggctatctccaattgtgcctttctctccagttccaagctcacatcatgaagatggtgtgtgggaaggccatgacagacgaatccgacataagcagctcccagaaaacagaagtttctactgtctcgtctagccaagttggccccaactgaggaccc

SEQ ID NO: 7203 - DNA, 707 bp, Macaca Fascicularis
  misc_feature (1)...(707): n = A,T,C or G
gctgagtatcttccaggagcctaaaattcagcagtgaacctaacaggctcaaatccttgcactcaaggagcaaatattctaattgagggagaaaaaaataaacaaagttaataagcaaaatattcaacatactagctgataggaagttctgtggtgaaaaataaagtgagaggaaaagaatgagagaaagctctaaaagtaactgaaggtttacatgaagaaatcgcatgacctagaagctgcccaggccttggcccagagtgagaggaagcgccatgagctcaacaggcaggtcacagtccagcggaaagagaaggatttccagggcatgttggagtaccacaaagagggcgaggccctcctcatctggaacctggtgacagacttgaagcccaagatgctgtcgggagcagtgccctgtctccccgcctacatcctctacatgtgcatctgacacgcggactacaccaacgatcccaaggtgcactcccnnnnnnnnnnnnnnnnnnnnnnnnnnnnnnnnntcctgaagaagaacaaagatgactttgagatgacgtcattcttnnnnnnnnnnnnnnnccgccttgttcaccgtctgaagcagtacagcagggatgagggcttcatgactcagaacactgcaaagcagaacactgccttaagaacttcgacctctccnnannnnnnnnnnnnnnnngtgacct

SEQ ID NO: 7204 - DNA, 805 bp, Macaca Fascicularis
  misc_feature (1)...(805): n = A,T,C or G
aagggcctgcatccccaggctcccaatagctgcctggtgcggcagcggcggccaaatcttccgtccttccgtggatctcccagggtgggggcagggcgggtcccatgatggcccccagtgccctnnnnnnnnnnnnnnnnnnnnnnnnnnnnntctggacccccaggaggcgggtgtcagggagacaggcccaacccacccccatttgcactgagaagagaagttttggagcattgcctcctagaataaagataaagagagtcaaatagagagaatggagagagagaaacgtatattatatattatatagagagagagggaggagagcgagagaaagtgaggacaccaagctgggctggcggctccaaagcacagccttccccgttccgtcccagcgggggctggtgttaggggtcccaaggttgccgcccacgtgcccagcnnnnnnnnnnnnnnnnnnngatggccacgcccacacccggcctttcagctcaggtccaccatgggggacggcccagcgcaggtgggggtgccagaggatcccgagtgggggccgtgcctttgcccagnnnnnnnnnnnnnnnnnnnnnnnnnnnnnntctggggagcaggggcctccccggcaacacccctaggggccttgagggtctggggtcccagccctgttgccaagtggccttgtccccagctccctcctccaggctggtgtgagtgtgcgtgcgttcgtgccgagcttctatttcatatgcaaatataaataaaggaagacagtttaaaaaaaaaaaaaaaaaaaaaaaaaaaaagg

SEQ ID NO: 7205 - DNA, 764 bp, Macaca Fascicularis
  misc_feature (1)...(764): n = A,T,C or G
tacagtgagcgatatgccccaagaagaacaaatggacttttgttcagtccttgacagatccctttcatgccatgctggatatgtggctgatggtcttctttggatatcaggtggagtaactaatacggcacaatatcagaacaggctaatgnnnnnnnnnnnnaaccagaataagtggataagccgtagccccatgctgcagagnnnnnnnnnnnnnnnnntggctgctgtagaaaggaagctttatgttcttggaggcaatgacnnnnnnnnnnnnnnnnnnnnnnnnnnnnnnnnnnnnnnnnnnnnnnnnnnnnnnnnnnnnnnnnnnnnnnnnnnnnnnnnnnnnnncctgttgactggccaaaatgaatctggagttgctgtccataatgggagaatatatttagttggtggatattcaatttggacaaatgagcctctggcttgtatccaggtactggatgtaagcagagaaggcaaagaagaagtattctatggacctacactcccttttgcttccaatggaatagcagcatgcttccttccagctccatatttcacatgccctaaccttcnnnnnnnnnnnnnnnnnnntcacaggattggcaccgtctgaaaagccaatgccatcatgaacaggaggaaaccatagccctgactgttggatactgggcatgaaaagactcagtgctcaatgcttccttgtcttgctttataggtcttgtattctgataaatttaagcaaaaaatnnnnnnnnnnt

SEQ ID NO: 7206 - DNA, 1856 bp, Macaca Fascicularis
cttttttccgccttcccgtccctcttagaggagctgtttcctgccggaaccaattatctcgacctctagatgattcgctacgactccaaaagagactgcaccgccccccttttcctccgaagcggtcggtgccttagcaactaaacctagcaactgggacatcgtcaggtgctgcgggtctcagccaaagggcgtcagaaactgcgctcgtagcgagcagtttccagcctcctgggtaagggagcagtctcctcccttgcttcggactccggaagcgtctcattccggtgaaagtaagagacagcttaggatcagaagcctttcgcggagacaaggctgacatgcccgtcctatatgacaggttactgaagctaaaggagatgtttaactccaagtttggatctattcccaagttttatgttcgagcaccaggaagagtcaacataataggagagcatatagattactgtggatattctgttcttcctatggctatagaacaagatgtgctaatagctgtagaacctgtgaaaacatatactctccaactggccaatacaaatcccttgtatccggacttcagtactagtgctaataacattcagattgataaaaccaagcctttgtggcacaactatttcttatgtggacttaaaggaattcaggaacactttggtcttagtaacctgactggaatgaactgcctggtagatggaaatatcccaccaagttctggcctctccagctccagtgctttggtctgttgtgctggcttggtgacgctcacagtgctaggaaggaatctatccaagctcctggctaaatacaaaaacttgcaatgggacaacgtactgcggctggacgaggtgcaggctaaactagggattagtctagaagaaatgttgttggtcacagaagatgcccttcatcctgaaccctataaccccgaggagatctgtaggtgtctgggaattagcctggaggaactccgaacccaaatcctgagtccaaacacccaagatgtgcttatcttcaaactctatcagcgggcaaagcatgtgtacagcgaggctgcgcgagtgctccagtttaagaagatatgtgaagaagcacctgaaaacatggtccagctgctgggagagttgatgaaccagagccacatgagctgccgggacatgtatgagtgcagctgccctgagctggaccagctggtggacatctgtcggaagttgggggctcaagggtcacgacttactggagcaggatggggaggctgcgcagtatcaatagtacctgcggacaagctgcccggcttcctagccaatgtgcacaaagcttattaccagaggagtgatggaagcttagcaccagagaagcagagtttgtttgctaccaaacctggaggcggggctttggttttccttgaggcctgaaaaaatgtaaaaaatctcagggaaactatttaggacacttaggaattggcaggactttctatgccacagtaaattaatcttctttctgttttgtattatgatgaatggttgctattatatcaagatatattttcaaagaaatgattgaaagctctctatgcttcataatgattatttttccatcttaaaatatggttttactattaagagtcaagatcatgcttggacagatcttttaagaataatttactgagaattattcctttgaagattttaaagatgaatggtaaaacacactcttaatactgattacatgaattggacttgaattaaatatattgttaaaattaaactgataccattgaattgtatgcattattcttaaatagagttcatttccggttaaaaaaaaaaaaaaaaaaa

SEQ ID NO: 7207 - DNA, 767 bp, Macaca Fascicularis
  misc_feature (1)...(767): n = A,T,C or G
ttgcaacatcactgttcnaaaggaacccattccactaaaacagatgcatcaggtggaaggaggaagagactcagaaaaaaaaatactgagccgggtgnnnnnnnnnnnnnnnnnnnnnnnnnnnnnnnnnnnnnnnnnnnnnnnnnnnnnnnnnnnnnnnnnnnctgagaccaatctggccaaaatgacgaaaccccatcgcggtagctcacacctgtaatcccagcactctgggagaccaagacgggtggatctctggacacctgaacttgtacctctgaacttaaacatttacaaaaaaatacaggcatcaagaaaaggcaaggcctttggagtctggcagacgagacttcgcatctgagctccactattctcccactaacataggtaaacacctggctccagcagagaatgccagacatgttcatccctgcctggctctgtgtaactgacctgaaattctccacctgggaaaaagtctgttttgtgcccggaggcagaatgaaaagcctagcctcttcctcataaggaagttgtggggaaaagagagagatcagattgttactgtgtctataaagaaaaagaaggcataagaaactccattttgccctgtactaagaaaaattgtttctgctttgagatgctgttaacctgtaactttagccccaactctatgctcacagaaacatgtgctgtattaatcaaagtttaatggatttagggatgtgccttgttannnatatgtttgcaggcagtatgcttggtaa

SEQ ID NO: 7208 - DNA, 2452 bp, Macaca Fascicularis
gatatcagcagtggaggaggcgtgacaggctggaagagcaaatgctgctgagcattctcctgttccatcagttgccatccaccaccccgttttctcttcttgctgcaaaataaaccactctgtccatttttaactctaaacagatatttttgtttctcatcttaactatccaagccacctattttatttgttctttcatctgtgactgcttgctgactttatcataattttcttcaaacaaaaaaatgtatagaaaaatcatgtctgtgacttcatttttaaatgtacttgctcagctcagctgcatttcagttgtattatagtccagttcttatcaacattaaaacctatagcaatcatttcaaatctattctgcaaattgtataagaataaagctagaattaacaattttattttgtacaacagtggaattttctgtcatggataatgtgcttgagtccctataatctatagacatgtgatagcaaaagaaacaaaagccaggaaaacactcattttcgccttgaatatgtaaatggggttaattttgtcctgtgccttatgtggaaaggaacttctttggttttccttttttgttctggtggaagcatgtgcaggagacatatcatccaaacataaaccattaaaatgtttgtggtttgcttggctgtcattttcaaagtagttaattgaggacaaagggtaatgcagaagtgatagctttggtttgctgagtcttgttttaagtggccttgatatttaaaactattcctgccaccatttcttttccttggccactttttccttgcgtctccctgcatgctgctttatttgcttctccctcccccaccacctcatggtatatttaagagtgaaagggacaaactagtaggtttgtcaagtttaatataaagcactgatgtaacttgctaggtaaacggaaagataagttctaactgcctactatccaatgtcagttaattggtgtcttccccctcatttgctctctgccctaaaacgtgtcccagatgccttcactggctgttttacttctatgttctgcttttcttcctctcttgttcccttcctgtctatccattgagcttatgaaatggaagagttaactgcatgcactagtgtttggagggtgttgtggtttgtctttctaattaggtgtatagcctattcactttcctagaataaatctcttaacctacatttgagtagtctccattttggcaactcctctagcagcttggtagcctagtacaggttgtttttttaaaaaagaaaaagcaggaaggaggagtgaattttattaacatgtttgccaaatgtattgagatttggcctctgaagaacactttttcagtgttaagttgtctttaccttaagattgagaaatactttagaatattattaattttaagtcctgtcttcacgtccttttggaaaacttgtgttaccatgggtttggaaaaaggacaacaaaaggcttttcgtgtaaagataagatctctagctgtctctaaccctgtccttttttcacagcattttttctagttttgcttcattgcttatcattaggatagggtaagttaagtttgctatgctgctagcatcctaagatgatacctttgttgaaagaattgtgaatagcatgattcatttctagcagaggctgagtttaggacagcagcttccattgagaagtctttctgtgtcgtgaatagcattttaatgacctcttggctcacataagcagacaacatagggacgtatctgctatgaaaatccacaaatttttcagatagtgccctaaaaacaattttatatgcctcactggttgttattcgtaggttgtttccacacttgactttatcattgtttactactagtaaaaagcagcattgccaaataatccctaattttccactaaaaatataatgaaatgatgttaagctttttgaaaagtttaggttaaacctactgttgttagattaatgtatttgttgcttccctttatctggaatgtggcattagcttttttattttaaccctctttaattcttattcaattccatgacttaaggtttgagagctaaacactgggatttttggataacagactgacagttttgcataattataatcggcattgtacatagaaaggatatggctaccttttgttaaatctgcactttctaaatatcaaaaaagggaaatgaagtataaatcaatttttgtataatctgtttgaaacatgagttttatttgcttaatattagggctttgccccttttctgtaagtctcttgggatcctgtgtagaagctgttctcattaaacaccaaacagttaagtccatcctctggtactagctacaaattcggtttcatattctacttaacaatttaaataaactgaaatatttctaaaaaaaaaaaaaaaaa

SEQ ID NO: 7209 - DNA, 717 bp, Macaca Fascicularis
actagaatactgacatataagggaagaagttttctaaattgtgaatgtctggttcttaattaaagattcttttttaaatattacagttaaaagctgctgccagttatccaagacattatccaccaaactgctttgtgatttatacagggactaatcaaatctggctactataacatggggcattgtaactttaaagtagtgttttaattacagtgatgtattttagactcacattttgtgattcaaatatgttataaagacattcttgcaccgtggtaaagaatgtgtgtggtaaatctccgtttatatgtagttggaaaaaattcactgaataatgttttaatgatagggtattatgatacagtgtaaaaaacaattggttcttcagcagtacagaaagtaaactatatatgtgctatcaggaaaccccttcatactgtgtataaaattgcaatctagtgaaataaactgtatgcaacagaccactttagtggctacagtgattgttaatgtaccactccttgtgcctctaggcaagttacattcactttgtaacctagcaggtcagttgccaaactgaaaatagacctcttttcaatgctacagtcaacttctagggcttcttgaccatctagatcaaatatgcaaacaacttaacaatgtaatgggataaaaatgtgtagaacatagctctcccttcctgagcgtctgtatcca

SEQ ID NO: 7210 - DNA, 673 bp, Macaca Fascicularis
  misc_feature (1)...(673): n = A,T,C or G
ctccaggagatggaggttcccggcggtgatggctcccggcggccgtagtggctcttggaggtggcggctnnnaggagatggaggcttnnggcggtggcggctcccggctgtggcagctcccagcggtggcgggtcctggaaatggaggctcccggcacaggcggcttccgggggtggcgactcccagagctgctgctgggtccgctgggtttgggctgctgggtccggggggctatgtggcccggcctccgctctcctgtgctcctccacaacccacggaaccatccggtctccgagcggcgctgctctggctcctggaccctgggactctgctctgtgtgtgcagcgggcagcgggcggcgggcagcgggcggcgggcagcgggcggcgggcagcgggcagcggctgcagcggctccatgattgagtagatgagacggaagaagaaaaaaagaactccctccatttgaggaaagaaggaggaggaggggaaggggagacagcaagcgaaagaggaaaaggctgtattttttttaaatgtaattctttaaaacttcagaatgtttgttattctactttcattaaaatgacgaacttccaatgtatctaaaagaaaacaaccacaaaactcagcaaataatacaggaggtaatttgaacaaatggtgaagttat

SEQ ID NO: 7211 - DNA, 719 bp, Macaca Fascicularis
  misc_feature (1)...(719): n = A,T,C or G
gagaagtggagtgactatttggagaatagcacccatacctgtgtacnnnagggctcagaagggcctcatcttccccagccctccccatctactcaccaattccgcttcctgccccaactgcaggaatgctnnnnnnnnnnnnnnncccaccatcgtgtgtagatgaaaggcatctttctgaatttcattctcttgaaggtgctggcaccccttggcactnnnnnnnnnnnnccttgggtctgtgtcacttgtaggtttctctgcctccaggttgcctcaacagnnnnnnnnnnnnnnnnnnnnnnnnngttgaggtgagggtaggctaccccagctaggaagcaggatcactgtgctaggtctgcccaaaaccagagggcagtctagtcctggggtaaagccctcagatcccagggcacactctttcccattccctccacccacttgcctgtcaccccagtcacctaagcaatcactgggcccagaggagaggagacagacatacactggctcctagacctaaagggtatgagctggagctaaggccagctagagcttccactgtcagcccccactgtcagccccactgcaccccccgggcctgctgggtgctgggcactagctagatgctttaggttgcttcagctgatccttcaactctgtgaggtggataccagtattctattttgcagatagagttggcccagagaggttaacta

SEQ ID NO: 7212 - DNA, 1940 bp, Macaca Fascicularis
acgaagggttattcttcttttgactttttctgatggtttaaaactgtgagaacacgcagctcacagtccacacggaagcaggcacgtggctcctgcctcactgtgggaggaaagatgttctcagaagaaatggccgagtttgcagagggtttttcggagggccaggcagtctgaacgcagcccagctggccttggtggagatggggctggcacggggggggcagttcttcctgatacaaatcctaacgccttcaacactgaccttccaaagaaacagctgctggacgttgccctgacagcacggagaaccccacttttgaggcaactctcgagggctttgtcatttatttggcatccgaggccccagctcacagggtctcgggtgcacgggaccctccagcccttcccactgctctgcgattctgcctacctcccggaaagggctgacacgcggcctgggcacccggccacagatgtggggtgaggacgcttcctatgaactgccgcagaaaccgtcacacacagcctggaactgtaatgagggctcatcacagggagcgatgagagacaccacagagccgcggggccgaccttaccagcaacacgcacgcgctcctgccccttaacgtccacaaagtcgcatggcgaagcccacagccaccagacaccatcttcgccaagatgcgggagcacgctgagacccccgatttcatgcggatgattccttgcgggctcagaagttaacatgggtccttgggaagctttgtaaacatggggcttttacatccaggtctgcggctccggcttccctgcgtcagagcggtgctgcccgcccagcaggctccaagaccgtctaccctgatctcaacgtgggacttgtctgcggctctggtttccctgtgtcagagccgcgcgtccggcccagctggctcccgggtctaccctgatctcaacgtggggtaaaggctgaaacagaaacagccaagtgtccagatggttttacattttagagacaattccagtttccagacctgaataatcagccacacgacctgcttttcacaacagcctccagccctgggggccgggagccacctctggtccctccagggccgggagccacctctggtccctccggggccgaggccaccgctggggtcttcccaggagtgggggtgactctggggcgtttcttggccccgtccctgctttgtcggggctgggacgccgtccccttccggccagccgtccctgggccgtggtcacaggaaggacgggggcccagcccccaccgcggccctctggatcctgcttaggcaaaagggcaggtccagtgaggaggaagcaggcagccccataatactgtccctgaaccaccaaggaaggaccaagcatgctttccctcccaaccgcaccctcgcctgcctccggctcacccccgggccgcactgtcctgacattcgtgaagccctccccgcctcacccacagccctggcgtgtcttcaagggttagcccaggcgctgtccccagggcgtctggcctggaggactctgaacaggcccgtggtgcagccagcccctccctggggaccagagccggcagcagcttgggagctgtccctggtgctccccagagtaggcctggtccctgcagtcctgcccacctgatggcccagcctttgtccagctcaagccctggccctcccgtgggacctgctccgtctgaccggcacctgccgcctggtgccgcctggccctgcctggctcggccgcgctctcctccacggctggcccagctgccttagcctggctcctgccaaggctctggcaactgggccaaagcaattttaccaaattagatgtggtcggaagcgagtcgttccacctggcaattttgttaaaataattatttgtttgaaaattaaaaaaaaaaaaaaaaa

SEQ ID NO: 7213 - DNA, 1313 bp, Macaca Fascicularis
acactcttaggacaacacagccagactgctctgttacaatgtatcttctgtaacaccagctagctcatatgattggcaaatatagcaataatgctagtaaaacagaaatgttgtatggttttatacaaaatttattctaggcaagtggagctggaatagtgagagtgaaataataatgagcccttgacctgggttactctccccggatctcctcactccctgccttgctctaagctcgtggcatgttgtggttactgcggagtgcatctgaagagcagtcacaacgagtctgagttctgctgtcttctgcattgtcataccaatgctggcttaaaagtcagcatttccattcaattgttttcagcctttataatatttcatggtgcaaagtctagctatcttgaactccctttccaagttattcaagtaatctctctaggtaacaatcactgtttatgttagtgctttgggtacacaattacataggttttgccgcacccccatttcctccatcagccttgtaattttatttttagtacatagttttgcagaatacagggtttttcaagaacacaagtgccgtgttgcaacagaaacacttttatcctctgtagagagaattaaggatatagacactgatattagtgttatatgacgaagcattcttacacagattattttctgataattaggggtcagtataaacaaaataatccctttgtcatagttctcatgggaaattgtaaatttgcatttttattatgtattccactttcttgtgagtttggttgacatatcagcaaccctcagttctgtcatgtccaatcactaacagattctgaaattgaaggaacttatatagattaatgctgccttatggggtcttgacttagcagccatctagcttcattggagattgagtcgcctttctatcttgccatgcagcctttttaaaagtctgatttctgtattgcagcccaatggagacagatctaaattcaaatttaaagatctctctaagactaattttctgcattaagaactgataatattcaaatacctattgcataaggttgttgtagatgttttataagccgaacacagtgcatgtcatgtaaaagtgcttgatgagggatacctgttactatcaagattcacagtggacaatgcactcaagttgggggccagtcttttctcatccttatgtccccaaattcaacagagctttagaaagtgaaagtaaaaaaaaaaaaaaaaaaaaaaaaaaaaaaaaaaaaaaaaaaaaaaaaaaaaaaaaaaaaaaaaaggccaca

SEQ ID NO: 7214 - DNA, 729 bp, Macaca Fascicularis
  misc_feature (1)...(729): n = A,T,C or G
ctgtggcatatacgtggaaaatatctttttataattaattttcaaagttgtaattttaaagaatttgggtgtatacctatgttaatgaaacaacagaagtacaaaaaagaatgtcagatacaaaaatccatcgtgaagaaaatctgttcttaatatatttcattatgatcgaaaaacataaaaactaacataggaaagtgaaagatcagttacttatattttgtttcctcttgtggtttaataaagtgaagtgtgtgtgtgtgtgtacctgggggtgggcagtgctctttttctaaaactattatgccgtatatatctgaattatgacctttttagtgtgtattaggatgtgggctggtttgcttttctcccgcctttgtaattttatgtatcccatctcctttgtgtgaattcatatattacagcaaaatacaagagacgtgggactgtttgcaataccatatggacatcttttaataaatatatgtaaataaaataaaaaatatttgtccccaccttttccccaaaaacaacagcaagacatttttgttagatattttatttttaatgttttctataatttaaaaatgtatagtctgccaaattgttgttttcataaccatgattttttttgaaaannnngttttatcttaaaatactgaatgttctgactttttatagatgtttttaattttgttttaaataattttaaattatggagctgaccta

SEQ ID NO: 7215 - DNA, 703 bp, Macaca Fascicularis
  misc_feature (1)...(703): n = A,T,C or G
gagccgcacccccttngnnnnntccagttgcggggctttctttgtcaggtgttggctggaaccaggactcagcctgggctggtctaggagcccagctgagccctcccatgtcttttccnnnnnnnnnnnnnnnagggaagagaaccagtaggtgccagcccaggcaagcctgtggcctgcatttgtgtggctgtgggcaggagctgggccgtgtgtctagctgggttttgctctgagaaggggagctgnnnnnnnnnncctctgcgtgctgtgtgtgctgtggggcggctcgccgcagcctgtgttaaagtgtttgctcttcctctgctgcctcctctcgaggcagggggtccttggctggctgaggcagggtcacctcnnnnnnngtcctctttggcctccgcagaatctgacccccttgggcctgcactccattctgagtggaaaggaggatgcagaggctggcctcttggcccccttgtgggcaagtggggggtgggggtgggtaaaactctggccaccagtttttggctcctgtgggcacnnnnnnnnnnnnnngtctgatgcctgacatctcctcctgtcttggccctggaacttgcagctgagagcatccctcaaccgcctcgtctcctccatcactcctgctgggccccccagcctggcactgggttgtgtgcctgcctctttccaccaactggcc

SEQ ID NO: 7216 - DNA, 640 bp, Macaca Fascicularis
  misc_feature (1)...(640): n = A,T,C or G
gcatctgtttctcnnnnnncccatcgtttntgacattcatgcagaactcgcccctgtctccaccaatgttctcagtatttgacatgcagctctctttctgccactggatccatgggttcaatccatttgtgaagctgtgatagtgtaactggaaagctagtgtggtgaaaattcctttattattttttgttaacatgctgatctttccctggacaaannnnnnnnnnnnnnnnnnnnnnnnnnnnncatgtacagcttcatcaactgtaaccatataaatataactggattattcttaaacaaaaagaaactaggggtttttttaagtgtaaatttattactagccaacagagttttaatattttgattgtccggttggtttaacaaagagcctagccgactttccttctgtaaagtcctccttgtaggcttttttaaagtactgtacatatttgcaatcacattgtgcatagattcttaatggtagatatgatttcttttgtcaggctacaacaatgaactgcaaattccttgtttgtaatgtaaatgattgaatacattttgttaatatgtttttattcctatgttttgctattaaaaattttataacatttccaagacaaaaattccaagtttatgc

SEQ ID NO: 7217 - DNA, 561 bp, Macaca Fascicularis
  misc_feature (1)...(561): n = A,T,C or G
aaagtcagtagaaccctctacctcaaaacttccttccaaaggcagctcagaagattagaaccagacttactaaccaattcccaccccccaccccctctctactgcctgcagtaaaaaaattaatagttttctatggaactgatctaagattagaaaaattaattttctttgatttcatcatgaacttttatttacatggctctaagactgtannnnnnnnnnnnnnnnnnnnnnnagtgctagcatttattgttacataataaagaccttgacgcatatgtgcgacttatgagcatatcaattgttgcatgtcatttttgcctttgtttaagcctggaacttgtaagaaaataaaaattcaattnnnnnnnnnnnnnnnnnnnnnnnnnnnnnnnnnnnnntgagagtatctnnnnnnnnnnnnnnnnntagttgggaaacttgctggtgtatgtgatgtgcttctgtgcttttgaatgannnnnnnntctggtctttgtctgtttttcctttgatgttcaagtcccagtctataggattggctatttaaatgctttactc

SEQ ID NO: 7218 - DNA, 728 bp, Macaca Fascicularis
  misc_feature (1)...(728): n = A,T,C or G
agcacagatgtgannnancggcaccnnntcaccacggagaagcgggaggtgctggcggaccaggacgcagaggctnnnnnnnnnnnnnnnnnnnnnnnnnnnnnnnnnnnnnnnnntttattgcaggtgcgttctcttgagagcgtggtggggcccatcttccctctccccaccctttagctagcccagcatggttctgaacaaaatgaaagttttaagggccatagaggggaaagaaaaaaaaagagagaaccagcacattacaaagcgaccatccccacatccattcctaggacgggccctcagggcggtgggtgctttgtgaggagggagcggcatgggatgttagcaccaggtatttacagaacagctcgagagnnnnnnnnnnnnnnnggcaagtccaatttgcagagtggccaaatgagcggtccccacccagccaaacctcagaaagccaatcggatggttgcagaacagcagccagtgggatgcgagtgttgcccactgtcagtccccttctgtgagtcggccccctcgaccccctcnnnnnnnnnnnnnnntcaacgccgcaattcctcaacgcccctcagtccttctggaatgcctctcttggcacccctgccccaacaggctgctggnnnnnnnnnnnnnnnnnnnnnnnnnnnnnncatgcaacggcaaagggcatgctcttctgcctgggggagggcctcttgtccctcccagca

SEQ ID NO: 7219 - DNA, 2119 bp, Macaca Fascicularis
  misc_feature (1)...(2119): n = A,T,C or G
ctccccggctccgggcgccgaggcggcgtccaggaggcgtcttctgcaaaggttgcctggcgctgtccaacatggaggaggcaccggcagcgggcgttacctgcgagcaggactaactccctcctggcgttccgggaggcagtgcctggtccggagtgcggggactcgactgcctgcacgccccgaggcggaccccggctctgactgctcgcctggccgcgggcttctcaactaggacgcggcgcgaggagggagcgcggcggccccgagtctccctgagccatgggcaacgaggcgagcttggaaggggaagggctcccggaagggctggcggcggccgcagcagccggaggaggggctagcggggcggggagcccctcgcacaccgcgataccggccggcatggaagcggatttgagccagctgagcgaagaggagaggagacagatcgccgctgtcatgtcaagggcgcaggggctgcccaagggaagcgtccccccggccgctgcggagtcgccttccatgcacaggaaacaagagttggatagtagtcattctccaaagcaatcaggaagacccccggaccctgggcgtccagctcaacctggtctcagtaaaagtagaactacagacactttcaggtcagagcagaaattgcctgggaggagcccttccactattagcttgaaagaatcaaagtccagaactgattttaaggaagaacacaaaactagtatgatgcctggcttcctctcagaggttaaccctttaagtgctgtctcctctgttgtaaataaattcaacccttttgatttgatatcagactctgaggcatcccaggaagaaaccaccaagaaacaaaaagtggttccgaaggagcaagaaaaacctgagggaatcacaaaacctccgtcacagcaacagccacccaagccggttcctaagcagcaaggacctggtagggatccacttcagcaggatggccctcccaaatcaatatcttctcagcaaccagaaaaaattaaatcacaacctccaggtacaggaaagccaattcagggtcctgcccagactcctcagacagaccatgcaaaattgccacttccacgagatgcatccaggcctcagactaaacaggcagacatagtaaagggagaatcagttaaaccctctttgcaaagcccatccaaaccacctattcagcaaccaactcctgggaaacctccagcacagcagcctggacctgaaaaatcacagcctgggcctgcaaagcccccagctcagcccccagggctaacaaagccactggctcaacaaccagggacagtgaaacccccagtccagccaccagggacagcaaagcctccagctcagcctcttggtcctgctaagtctccagctcagcagactgggtcagagaagccttcattggagcagcctgggccaaaaactctagctcagcctcctggagttgggaagactccagctcaacagccagggccagcaaagcctccaacccagcaggtggggacaccaaaacccctagctcaacaatctgggctacagtctccagctaaggcacctgggcctacaaagactccagctcagcaggctgggccaggaaagattccagctcaacaggcaggacccgcaaagccttctgcccagcagactggcccaacaaggcttccttcacaactgcctggtccagcaaagcccccatctcaacagcctagctcagcaaagcccccatcccaacagcctggctcagcaaagcccccaccccaacagcctggctcagcaaagcccccatcacaacagcctggctcagcaaaaccctcagctcaacagcctagcccagcaaagcccttggctcagcaatctacaaaaccagtaagccaaacaggatcaggaaaacctctgcaaccaccaacttctccataactctactaacctctatgcttctagcannnnnnnnnnnnnnnnnnnnnnnnnnnnnnnnnnnnnnnnnnnnnnnnnnnnnnnnnnnnnnnnnnnnnnnnnnnnnnnnnnnnnnnnnnaaaaaaaaaaaaaaaaaaaaaaaaaaaaaaaaaaaaaaaaaaaaaaaaaaaaaaaaaaa

SEQ ID NO: 7220 - DNA, 711 bp, Macaca Fascicularis
acctggcatagtgacagcacatggtgtaagctgacacaagtataattatcaagtaaatattagcttcttctgtttcttcatttaatgacagtctttttggagggagcacctactctgtgccatattctgtgtgagtgtaataaaacagatagtcggaattatttatctaacagttctgtaatgccattcctgaatgagagaatgattaaggcactaataagaatagggattaaatggatgaaaggagataatgattatattacaggtaataaaagttgtgatttgctgactgcttactatgtatcaagcacttttctttgtgatttatattattacctgattaaatccatttaatgtctgtggaataaatactgtacagaagagaagattgaggcacatataattcaattgttgaaactcacatacacatttgaaaatgcatcaagattgaaaagggggaagctatgcataaatcttacttttatatctgcgttgcttatttacaaactgaatttttagccatatttatttaaatacagttctaaaacattgtttctctttatgctgcttctttgttcaaatgtttggaagtggtgatcgatattcgtgaaatgtcataaattggaaaatgaataatctacatgtaatattaaataatgaaatgataaacattatataaaacatgctattattattgtattttatgtatta

SEQ ID NO: 7221 - DNA, 704 bp, Macaca Fascicularis
  misc_feature (1)...(704): n = A,T,C or G
gaggttttcaaaattcagattacaaaaacagtctacaggctcccacaccaacattttattatgaaaaatttcaaatatatagaaaagttgaaagaatcgcatagtgaacatccatatacttaccataccacgtttatagtttttaaatagcatctacagtttgatcctgaaaggtcatcatgttcagccaattattattattattattattattattattttgagatggagtcttgctctgtcacccaggcaggagtgcagtggtgtgatctccgctcgctgcaacctctgcctcctgggttcaagcgattccccttgcctcagcctcctgagtagctgagattacaggcacctgnnnnnnnnnnnnnnnnnnnnnnnnnnnnnnnnnnnnnnnnnnnnnnnnnnnnnnnnnnnnnnnnnnnnnnnnnnnnnnnnnnnnnnnnnnnnnnnnnnnnnnnnnnnnnnnnnnnnnnnnnnnnnnnnnnnnnnnnnnntgtgcctggcctctttgtagtttttttgnnnnnnnnnnnnnnnnnnnnnnnnnnnnnnnnnnnnnnnnnnnnnnnnnnnnnnnnnnnnnnnnnnnnnnnnnnnnnnnnnnnnnnnnnnnnnnnnnnnnnnnnnnnnnnnnnnnnnnnnnnnnnnnnnnnnnnnnnnntgggcctggctaatttatttgttttcttatttacttagtagag

SEQ ID NO: 7222 - DNA, 2743 bp, Macaca Fascicularis
aaaatgctaatggcgcctcagggaaggtcctcctcaaagaaaaggatggggctgaatcgctggaaacggttcacaaggaagccgagtccccagcatgcttttggtcctgacaatgtggaacactggataaagagagtggagaaagcctcagaatttgcagtgtcaaatgcattttttactagaaattcagatttacccagaagtccctggggccaaatcacagattggaaaacatctgagcaaatagaggatcatgatgaaatctatgcagaagctcaggagctggtcaatgactggttagactccaaacttaagcaagaattagcaagtgatgaagaaggtgatgctaaaaacactgtgtcaagtgtctctcttgtgccggaagccaatgaccatttgaaatatgacaagtttgatgatttatgtggctatttggaggaagaagaggaaagtaccaccgttcaaaaatttatagaccatctgctccataaaaatgtggtagattctgcagtgatggaagatcttggaaggaaggaaaaccaagacaagaagcagcagaaggatcctcgtcttaccatggagatgagacataagcaggtaaaagaaaatcgcttaagacgtgagaaagaactggagtaccagagaatacaaaagaccctgaaaaaatcggccttcttggaggctcagtgtctggtgcaagaagagaagaaaaggaaggctctggaggccaagaaagaggaagaggaaccaagaacctgccagatgcttgtgaattcacctgttgcttcccctgggactgaaggcagtagaagtgactcccgaaattgtctttctggacgcaaaaggaagccaaagcaattgatgacaccacatcccatactaaaagctatggaagagagagcaattcaacgggctgaacgtaggcgaatcttggcagagaagaagaaaaaacaagaagaagaaaaattggcccagttaaaggcccaagaggaggaacgtcagaaaagggaggcagaagaaaaggaggcacagcttgaaagaaaacgagaagagaagagactgaagaaaatgaaagaacttgagaagcagaagagaattaagaggaaccagcagctggaagcaatagccaaagaacattatgaaggtgtcttgctaaggaaaaaaggtctagagccttggaagatattgagaatgcaaagcaaacaaaacgtccaggtggcagaagaacattactgtttgttcctgcagaggaaatatctgctgacctggttccagtgtagtcaggaaagtctggctagaaagatggcccaggctgatcaattttattcccaaatactgcttaagagagtcatccggagctggctacagtacatgactgatctgcaggaagaagtaagaaaattttgtgtacgttttcttcagaagaagatcttcagggcctggtttaacatggtcagggaggtgaagatcgattctcggggcaagcatgagattgcagcggagcacagtgacaggaggatcctctggatcacatttcggacatggaagaagtttgtaaaatttatgaaagaggaaagagtaaaagaagaaaggcgacagcaacttcgtaggaaggtagttgaaattcttccagactttcaggtgcctggaagcgaccatgagctgtaccagcaatcagatacttggtccttgagtaagacaagtcttttgtgaaccaatgaaccagatcagtgtaatacttaggacaggaagctcgactggtccataatatgtgtgttatctccacccacccacccacatacatacatacacctggtttattctctatgagctacttcttagatcaaaggaattattttgagaatttttatttccttctttgacttttcctggattgctagtcattcactgtagcatttatcacagtgggatcatccaaaggaatattgtagagatcctctgttcaaatatatcctatatatttttagcatagtaaactttaaaaaggacaagtgtttgcctgactgagcctgtgaagaaaaacgtgtccatatagcttaacatgagttgttgataaatgtgaccttaattaaatagaaataaaaagtagtgagtacttagaaaaggaaaggaggccaaggcagtcagtcttctagtacattagcatcactgacaggcaccctaccagaccttgtccatttgaacctcccctgatggcagaccatgcatgaaaatgttctctacactgctgctgcagaggatagccgcttatcctgatttcagagaaaccgagttcccagagatacttctcttccatgcaccttgataagcatgcaggaaattctaaaaggtagtaactctatcatgacagtccagcagttcattaaattatctgttcatgttcccaaccgcaactgctgaataatacactcagtttgtcttctagtactcagctcagtttgatctagatactgagatacttatcttgaattcaaagaatgttttcatctttaaggtgctataaagacttataaaatgctctatgaactgttaagagaattacctgctagaaaaataatttttcattataaaatacgtttattatgacaaattcaagtagcccataagtgcatatggtaaaatgaaagtcctgtgcagtcctgagatgactactctcatggtgtgctgaaaatttgagttggcaaaataaaattctatggttaaaagaaaaaaaaaaaaaaaa

SEQ ID NO: 7223 - DNA, 2177 bp, Macaca Fascicularis
tataggtgcctggccgggggagcagcctttgcgccgcggtgggttcctgcgagctggtgcagagggaccccggcgggccggccccggggcacatgcgacgacctccgcccctgggcccgacgacggcctcagggcctgaaggcaatgtgcgaaacctgcgaaagcggcaggctccagggccaggcgccgcgggaggctgcggccctgaggctggggggcgcggggagaataggcaaaagaggagaatggtggcccgggccacccctgggagaggcgaggtgaaaagtgacaagtcggttgcggcatcaggggctggaaaggccgcaaggcgtcgggtggaggggcgcaggggccaggtgagcccgtcagaccggcgaggcctagaagcagcaaaggaggctgaactccccttgcaaacggaaagacacaccaaggaaaaaagaaaagttactgaagcctcaagtgatgatccacagccagggtttgacctggtaagaaaggaatcattaaccagttcggaatctttccaaacagtggagtgcttgcggtctttgggtaaggaaggtatagtagaaggtattaaaagaagaattcgaaataaaaaactgaaaagcttagaaaacccacctctcaaaataaccgaaaatgaggctacacaaaatattaaggttgaattccaagatgaactgtacaagaatactctaaaatattcttgtaacatcttgtcacctgaagtagaaaataattccgtttttaaattacgtgattgcaattgttttccccattccaaggattgtaatgatgaaaacaacctgccatatgagcctgatggtggatgtatgcatgtagcagaaaatttctcaaagaaagaaaactttagaagtcttgcagaaaagagtgacacaaataatattcctcaactcttacaaactgaagaaaatgtaataggagtaaataagttactaccagaagagagtgatttataccaaagtaaaatcaatggcttgcttccctgccttcaacgtgaaaaaaataaatattcaatagaggagagcagtgttgggcgaaaacccaggaaaaggatgaagttgtctgaaaaagcggatgaaacagttactcagatgaacttctctaatgagtataacaagtctgagttgatgttgcaagaaaatcaaatgattgctgatggtaaagaagcagaggctaaaagtcctttaaatgttttgagaaaagtaagccataatacagtctctttgatggatcatttattaagtgtcccagaaatggtagaaaaagaaacaagttctgaacatcatgtaaatgctgtgtttcagaaaaccatcgaaccacttttgaaagaagaaacagagaatgcttcagagcccttaggatatgaaaacatggcgctgaaagaggattttaaatcgaaaagctgcatagggaaatcacctgagtaccatattgaaaggagatcttcacgggaagatttaagaagtgactctgaagaattgaagttaagctgtcagagaacaatacctatgactggtaaaagaacttggccctattattcatgtgctagaatatctgcctggtgttggaaaaaggcttccttgccagaatcaagttactttcttcctgggtctcagaaaagttgtaagaaagttgatgtccctaaacaccaaacaaacaagacccacttaaccgactccaaattattattacaaagttccttaacagaaacaaacactgaatcttcaagtaaagaaaaattagattctaatttgaattgtttgttttcagtttctgcagtagaacatactttaatggttataaaggaacctataatcaaggatgataaaaagataaaatcagaggaactgagcagaagtgggtcagaggtaatttctaacactactgaagatactcaattaaccagtgatactcaaagcttaacaggaaataaaaaaagagatagaggaaatttaacaaaacttaatttgacagcagcttccaaagatggtcaggaagcaaataactctacaggcaaaactattcatcgaaaagcatgtgttaaacaaacatttgtagttccagacttggttaaatattgaacacaggacgactgactaattttaaaattcctttacttaagaataaaacaaaaaaaaaaaaaaaaa

SEQ ID NO: 7224 - DNA, 748 bp, Macaca Fascicularis
  misc_feature (1)...(748): n = A,T,C or G
ctagcaaagagaacagttattgttcccagccattgtcaccttgggtgatgcaccagatagcaggcagatgttggttcatggccttcgtcctctttcctcctaaaataatattggctttaccatcttaactcagctgtgggttttttgtgggttcttgcttgttttttggcatgaattgtcatctttggtgttttttttttaacccccacccctcaaaaaaggcctccaggtatcaagatctcatattaggattttctgtccttaactttttgagcaaaatctggaaaatgtgaaagcatatttagattttatatactatctgaaatgtgatttgttaagattcttaaatttgggcctcttagaataattttgaatgagatctaccgactcacttgtgagaatatttttcgcagatatctttgggccttttcattagaaagctgtttgtccccctgttggtacatttggttacctcattttgccgtttgtttccgattgtgaaagctcacaggggtgtttttcggaatcatttgctgagtcattttctcaaatcatattccattgtatcagttaacatatagttttaaatgtatgtattataaatatctgtaaccaaatcatttgaaggcttgataaatttttaacaaagtttgtacattttttatgaaagttactagtaatgctttactaagtagtgcaatgaatttttatttttaatccnntgtgcnnnnattttggagttgagagg

SEQ ID NO: 7225 - DNA, 711 bp, Macaca Fascicularis
gaactggatagtatctaaatgcatatctggatgaatggctccgtaaacaacatgagaactacacatctgaaacattttatttccatagctgaggtctagagacctacatacgcagctggatgctcctgtaaaacgtcaatgagaagctgtgtcatggccacaatttcaggggtcttcattctcacttttctaaggtgcaacagctcagactcagtgaataatactgacttctgaagacccagcacaatgggtcaggaatatcttattatgtgataattgaagagcaattgtttactttcattgtcttttttaatacagaaaaatattatgattttaaagactcagttttaaaccacagacctttttctagtagcattcccaatagtcctcaaacaattggtcagtgaattattttaaattatatttactaagagtcataaggagctttagtttaatcaaagtagaaaataaaaagggtgactaataaatttatctttgtccctttatatagcctttccatgcataagcatatttatatgcagatttacagaggtggtttgatagagactctttatgtgttttatatgtttggccatgatatgtatacaggtttactttcaaatgaagttaatagtgatagttgggtatttgtcactcagtcaaataataattgtatccttattctattcttattcaattgtaggtgcctcg

SEQ ID NO: 7226 - DNA, 702 bp, Macaca Fascicularis
  misc_feature (1)...(702): n = A,T,C or G
cgtgtgtcttctccccatcctgctcccaggacgccaagtccctcgcagagggcagtccagtgccctgcagaattccccggggctggagcaggccccgcggcgagtaggcgctgagtacacagctgaatgaatggcgtagcaactgtaaacggggnnnnnnnnnnnnnnnnggcgcgcgctcctggcagtgggccgctcactgtcgcgtgcgcgggtttgatctcgttgcaggttccgggggagggacacccctccaccccgcctgccggcggtagacgnnnnnnnnnnnnnnnnnngagaccggaggataacgagacagacttacaggcagtgggaaggacgggggtcccgcgagggccgccggtgggcagttctgtggccggctcggcgcccccggaccccggcgttcaggaccctgtgggagaccttcccaccttcccagtggtttccaccccgcgaattgcagattatctcccgaatcccagggacttagcggtcgagtgggcggaggggtagcgtggctccgagcgccactccgggctgggggcaggttcccggcgctctcgccccatcggggcagagagtaccgaccacgctgcgggacgcggctggcaaggccctggccctgccggggcgcggacgccagcgcttagctcagccccgggctaggagtggagacgcngccctgctgcgcgctccggc

SEQ ID NO: 7227 - DNA, 744 bp, Macaca Fascicularis
  misc_feature (1)...(744): n = A,T,C or G
ttcccatccagagggggcccaggatgacccaacaccctcaagctcagccccaagctcgggccagggagtgaagcctttgtccccaagcaacagagtgagggtttgtctctaaccctgtgggctccagtgaaaggaaaatgggatgcccacaggagagcacccgagttctgagacagatctacggctcccagcctgagtccccatgagtaacagggacgcacagaggggcatgctgcctgcctatagggcactcacggaacgcagctgcatgctgtggatcctgaagccggtcaggtaaccaggtgcgaaggtgtggggaagacctggagggaggcctccccagatgccaaccagccggggccacggatcagaagtgcttctgacattaacaggacacacgtaagggtgccttggacatctgcacagcgcacacaaccaagcttaggagcccactgttaagatgcccaagtgacatggacaagtttctccgctgcaagccaatgagatctgctgactgtcagagcatcgcaggaccgccgaaggattctggaaaatgcggtcccgggtggccactgtgtgctgaccttcacctgcaggttcgacttgaaggaaacttctcgagggttgggtggagggtggggtagtgttgaagaggaggcacaattgtaaccattttgttcaaccatgggtgttttctttatgcattaatttgtatttttaaantatattaccattaaaaaattt

SEQ ID NO: 7228 - DNA, 723 bp, Macaca Fascicularis
  misc_feature (1)...(723): n = A,T,C or G
acagagtacatcatgattgattccacttagatgagaggtatcataagggaacctcctggttgtcagggagggtggggaaaaggagcatgaagaaatcttcttggatgcaggaaatgttacatatcttgatctggctggtaatcacagcagtgtattcaaacaaaattttatcaagttatgcacaagatttatgcaggctgggtacacgctcacgcctataatgccaacactttgggaagccaaggcagaaaaatcacttgagcccaggagttcaagaccagcccaggcaaggtggtgagatctcgtctctacaaaaaataaataaaaaagcattagccaaggatggttgtgcgtgcctcagctacttgagaggctgaagcaggaggatcacttgagcccaggaggttgagactcttaccgtgttactgcactccagcctacataacagtgtgagtctcttaacaacaacaacaacaaattgttcactttgattttgcagattcgtttgagaagaaatgatatctttcccttgtattgcctcttccaatccatgaacgtaattgcttgcttcattcagttactcatatctatctttcagtaaagtttttataattttctccataaattcttggcatcagtttattgaagtcttgngaggaaggagagacaaatgcttaagaagtcattaataaatgttttcggccggcacgggatacatgcctg

SEQ ID NO: 7229 - DNA, 744 bp, Macaca Fascicularis
  misc_feature (1)...(744): n = A,T,C or G
ccagccacaatccannatcatnnngatgatcccacaactgggacagaggctacatctgccctagggaggtccttcaaaatctgtggagcaagaaaggatttggggaagcttggggactgactccagcgcctcccaagaaccatcaccaccactcagccaatctgttctgggccctgattttgccacacctccaacctgtagcccattctctgaccccaaggagtggcagaagatcccttcactcagagaagcaagactgatattagcttgttgagtgtaagagacacaaatgaagaacaaagacctggcgaaagcagcaannnnnnnnnnnnnnnnntatgtggagttgataagaaaggggagccaaggctttatatgtctaaagaaaatattcagtagctgtaaacattcaaaatccgcccagtgatagcccttgtgcaccagcagcaagggctgccacgggatagagtacccatctacaaagacctctgttacataaacactgcttcttacaggaaacaaacctcttctgggctctcctnnnnnnnnnnnnnnnnnnnnnnnnnnnaagtaaaaagtctattttctagtgtggtcttgttcagaagaagccagatttccaatattgtttttcccctctactcagaagcccctgccccttcccttcagaaaatgatggcaggcaatcctctgagtttacaagcagagactcacaccaacccaaactagctgggagtcagaacc

SEQ ID NO: 7230 - DNA, 174 bp, Macaca Fascicularis
tctcttctcgtgtgggggggcctgcgcgagtctcccctttgtgcgcaagcgcgcgggggcgttagggggcgcaggggcaaaagtgcgcagaggggggagaggtgtgctcgcgagtccacgggataaaaaattctgtgatgagaaatcccgtgttctcgaggaggggggtgcacc

SEQ ID NO: 7231 - DNA, 754 bp, Macaca Fascicularis
  misc_feature (1)...(754): n = A,T,C or G
ctgtgctcactgacgcagctnttnctgtctatgcccctgtgcnnntggaggcaggcagtgaggtgctcctttcccgggcccccaccccgtctccctcttcagccannnnnnnnnnnnnnnnnnnnnnnnnnnnnnnnnnnnnnnnnnnnnnncccagaacgcatctatttccatcaatgtaacaagctcggatcagggacctaattggtttcccagtggtgggtaatttctcattccaaatattaatccgttgtttttctggcgcccagcccagcccgccgcagtactgtactcgaggtacgttcctatgcaaccgagagccccggcaaatacttcatgagcttagcagcctgggctcgagcagctatgcaaatgcgcttttcatctggcgtgcggggctgatgggaagataagaattgtttctcccggagaaagatccatcatttctccagcttccaagcccccggcacctctgctcagctnnnnnnnnnnnnnnncacctcccgccgggggagtcaggggctgatcaatccagctattgtacccaaaccggtgnnnnnnnnnnnnnnnnnnnnccggctgctccttccccactgagatgtgggcacaggtcggatttgtcagggagatggcactaacacgactcaagctcagtcccagaacctcagctgatgtttataataatcgtatgtactgtgcaatttaggaggggaaaaaaggctgtacaggcgttaactctaaaataaatttctat

SEQ ID NO: 7232 - DNA, 936 bp, Macaca Fascicularis
  misc_feature (1)...(936): n = A,T,C or G
gagaaaggtataggccnnnnnnactgagagccaaacagagcccagggagactccactatgggaaacctcattgctctgtacaaagtactagctaaccagaaaggtgattccaggaggagttagccaaacaacaaaaacaaaaaaatgtgctgtcaaggtttcagctttaagatatctttggataatgttatttctatttttatttttttcattagaagtgaccaaattaagatggtaagacctctgagaccaaaattttgtcccatctctacccctcccaactgcttaacagaaaggatcatgtcccccttacgttgaggtgaccacttaattgctttcctgcctccttgaaagaaagaagattgtgtttttgccactgatttagccatgtgaaactcatctcattacccttttctgggtttgaagctgctgtctctagaagtgccatctcattgtgctttgtatcagtcagtgctggagaaatcttgaatagcttatgtacaaaattttttaacttttatattattttgaaactttgcttctttgggtttgtggcaccctggccaccccatctggctgtgacagcctctgcagtctgtgggctcgcagtttgttgatatcttaaaatttctttccctacccagtccccattttctggtaaggtttctaggaggtctgtttaggtgtacatcccgcagcttattggcttaaaatgttactctcctttgatgtggtctccttggggccgattgggagaaagagaaatcaatagtgcaactgttttgatactgaatattgacaagtgtctttttgaaataaagaaccagtccctccaaaatatatacacacacacacacacacaatgcaagcccacctagataattttaaatattctggtagccacattagaaagnnnnnnnnnncaggtgaggtttc

SEQ ID NO: 7233 - DNA, 726 bp, Macaca Fascicularis
  misc_feature (1)...(726): n = A,T,C or G
gcagccctcnaagagcaatgttgtttttatgcagatcattcaggagtagttaaagattctatggcaaaactgagagaaagattagacaaaaaaaaaaaggagagaaaatctcaacaaagttggtttgaaaattggtacaaccaatccccttggcttagcaccctaatctccaccatcttaggacccctcatcctgctcacgctcatcttgactttcaggccgtgcatactcaaccgcttactcacccttattaaaaatagattaaatatagtacatgctatggttctgacccaacaataccagaccctcaggactgaagaagaggctcaagattgagcctctgacacaaaaagaggagggaatgaaactaggcctcataaaacttaaaaaattaacaccagatggccatggatagccccccaatgttcccggaactcaaacagaaaaacaattcnnnnnnnnnnnnnnngggggtccagccctaaacagttctaggaaagtatcgcatgaggtccagccctaaaccattccaggaaagaaacccataagctcaagccccgaccaatcagaaccagacaccttgctcaggccatagccagacccaatcatcttgcgccttaagctttgtttgaacttcgcgccaaaagctgtgtttgaacttgtgtttgcctatataaacagcctgtaataagcgttcggggtcccaggggccaacttagagcttgg

SEQ ID NO: 7234 - DNA, 717 bp, Macaca Fascicularis
  misc_feature (1)...(717): n = A,T,C or G
aaatcaccacatgcagnnnnnnnnnnnnnnnnnnnnngcagtgaatgagccaagnnnnnnnnnnngcacgnnnntgacgaggctggaggggatgccatgccttgtttcctctcctacnnnnnnnnnnnnnnnnnnnatagtcttttcagtaccatgttctttgcatttctgcactttttgttggcgatttcactannnnnnnnnnnnnnnnnnnnnnnnnnnnnnnnnnnnnnnnnnnnnnnnnnnnnnnnnnnnnnnnnnnnntcatggactcagtgtctgttacatcagcttcactcaggcatgagtgattgtggtgttggctgtgagttcaatgttttattatgccagagaatctgtaggtcctgtaggtcctggaacctaaggctgggttgttgaaaccaccactccaaannnnnnnnnnnnntaagctgttcttttcccaatgctaacggggatgctcacttttaggtgtagaaagaannnnnnnnnnnnnnnnnnnnnnnnnnnnnnnnnnnnnnnnnnnnnnnnnnnnnnnnnnnnnnnnnnttcctctaagcaaacgttcttaaacatttctcttatagtgaaaaaataagacaatttgttacaaatctttggtannnnnnnnnnnnnnnnnntaagattggaacttttacttaccttaaaatcacttggcttggtttcctttaannnnnnnnnnnnnttagagagtaa

SEQ ID NO: 7235 - DNA, 756 bp, Macaca Fascicularis
ctttcatttggatcaccatatggagggagggagggaaggagaaagagagagagaaagagagaagcagagagagagattggacttatgtgcttaattattctaggttcagggaaaaggacaagatgtctaagagatcatttgatcacttctttcttccagtgtcagttccatagtttaatctctcctgttccagttgctcacagttggtcacttcaaaggtctcagtgtgccaggcacatgcttccgcatgtcccagtggtatgtcaggcctgaagtgggcttttccacaccaaccctctccattctggcatttctggtagcttcaactgacttctacacctactcactgcttctctttgtggagcaagaagggtgaagaagcaactctgaattatggctctttaacttctacaactgctaccctgatgttggtcaaatcaatgttgatctagtatggggtcctctacatgcctagttcctccccaggaaacttgaagcccattctatccttaacaaggttgcagtggcaccatttactcaccaaaaggagatgaaggaccggttggaaatcaggggccctggaaaatagagactttggagagaaagaagaaacaaatgaaagcccagccagcaaaagacactctgtgaatagtttctctatgctactcctcctgggttccactaccttggagctcacttttctcgaaagttttctagcatcatcaagtaagtttcttaaagaacgagtattcttct

SEQ ID NO: 7236 - DNA, 754 bp, Macaca Fascicularis
  misc_feature (1)...(754): n = A,T,C or G
agatcatgccactgtactccagcctggctgacggagcgagaccctatccataagtaaataaataacactatgggctgatcccagagaccctgagcttttggctcttagcattctttggtgggatttcctagttagcactgagctgctcttgtgatttgagcatttctggacgggcatggaattggagatgcacagggtttgtgccttttccttttggatcacacgtctcctgacgtgaggctgagctcacagagccggcctcgaggtgcgctctccccagctgatgagttgtttctgnnnnnnnnnnnnnnngcatctccaggacttgtcnnnnnnnnnnnnnnnnnnnnnnnnnnnnnnnnnnnnnnnnnnnnngggaacccggcccggcagggaagaggccagcgtgaaggacctgggctcttggccatggcattnnnnnnnnnnnnnnnnnnnnnnnnnnnnnnnnnnnnnnnnnnnnnnnnnnnnnnnnnnnnnnnnnnnnnnnnnnnnnnnnnnnnnnnnnnnnnnnnnnnnnnnnnnnnnnnnnnnnnnnnnnnnnnnnnnnnnnnnnnnnnnnnnnnnnnnnnnnnnnnnnnnnnnnnnnnnnnnnnnnnnnnnnnnnnnnnnnnnnnngaccnnnnnnnnnnnctgctgtcgggtctgacggtcttcttgttaaacaacacgatttacataaaaaaatcttacacatctgtccctggaaatactnnnnacaaagtcctaaaaaata

SEQ ID NO: 7237 - DNA, 754 bp, Macaca Fascicularis
  misc_feature (1)...(754): n = A,T,C or G
agagcagtgcatggcctggccatgcagaacaaaacacaactcagaaatccctcctaagccctcggcagtaaaactnnnnnnnnnnnnnnnnnnnnnnnnnnnnnnnnnnnnnnnnnnnnnnnnnnnnaataaatcaaggatgccannnnnnnnnnnnnnnnnnnnnnnnnnnnnnnnnnnnnnnnnnnnnntgctcatttgtgtcgttgtaggctttatcctgtggataaacgcagagtgaacgagttcggggagtcctacgaggagaaagccacgcgggcgccccacacagactgaaggccccccgggctgccgctggccacgtgcgacttgaattgtccatgagtatttttggaagcatttggtggaattccnnnnnnnnnnnnnnnnnnnnnnnnnnnnnnnnnnnnngacatttctcagacatctcccacgtccctcacatcagatttggagctggtggcgctcacggtgcccnnnnnnnnnnnnnnnnnnnnnnnnnnnnnnnnnnnnnnnnnnnnnnnnnnnnnnnnnnnnnnnnnnnncggcgcgcgagtgtccgggggtcggccatgtcctcacactggcaggtgcgggagccctcacaggcaagggggctgtgggagttccatttcaggtggttttctaagtgctccttatgtgaatttcaaacnnnnnnnnnnttcattccgcgtggactctgggatcaaaggctctttcctcttttgtttgagagttggttgttttaaagctt

SEQ ID NO: 7238 - DNA, 106 bp, Macaca Fascicularis
agtcaggttcttgtgccttacagtccggaatgtcagatggtgggtgcagatcggaagaaagagaaaagttcatctcagcgtgtgggtttccatccaccccacatag

SEQ ID NO: 7239 - DNA, 1777 bp, Macaca Fascicularis
gttactgatatagccaaggtgggacgctgctggagggagctagaagggatcagccagccatgcctccagttcagagagataaccaactggctggcaaagtaacaaatgaaaagtaacctgactctattgacccgcttaaccctgcacagggggaaggatggaaatgagcagctgtttgctttgaaacagtggaacagttttgcagccttagaaaatggcatgtaacgtacctaaccaaagacagcggactctgtcaacaacaggagaagctctatacgaaattcttggtctgcgtaagagagcagaggtagtgagtgtccattcataggcctgagcaagcaccaggtcccacagagacagctatcactatagtaggagagctcccacaaccaaatggttggaaccacacagactgtcagctttggtacagcttctgaggagaatgaaaagaccgatacctttaccaggcatagagaaaagcagttcctgatgccattagaaagaaaaatcatgaaatatgctgatgatgaaacaaaggaaatacaattcaggtctcattacaagagagtgagcactggattcagggaggattggatgaaaatgctcagggcaggagaaccaaggtagaaattttttgcagaaaaagcatttcagccggttcctttaggatcctctttggaatagaaggaagtgggcatcaaaaaaagtcaccaacccttgactttgcttctttttaatgacttgattatgaatttgggtgaactaggagagagaagtccttctttacctgaaatgtagcttctttcaggagtagcctcaaaccagcatcaagtatgggactatttgctttgctaacccacctccgtatgtccatgtgtatgcatgactgtgatgtagtacttgattcttcaagttcattctatccagaaatgaaaaaaatttaaaagtttaaagaaagatgagagctcacagattcgcagcaccaggaatactttatggcctctgggcaatgcctttgtttaaagaagctggggtcagacctgccattgtcccgctccaccttacagccaagatcctcctgtcattctctcccattgttctctctcatagttatcctggagtacagacttcatcactgaatcctcaaaaaaacctagacagccaaataaaagaattacttgataattcagacagtggcccatttttatcagaaccgctaaaattaggaacagtttacttttctggactatattgtactctgattcttttgatcaaactgaaacagaaattccaggtcatctagcatcagagaccagttaaaggcttccacacacgttttattccctatgaaatgcagtgctaagtaatatccaggtattaaccaccctgactctagctcagaggaaggggtcttcaatcatgtgaattgtgcagactcctagactctttaaggattgggagctcagagaggacagaaggggctttcttgaaacctgggacctcttgctgtggggacctataggtggccagcccagtactcagtcactgacagaggaccagaagagacagcaagataggggagtatcttcaacatcctccactgggtcaacctaactgaacttttcctttacagtgggaaaaccaaacctaggtgaattgaacttagatatccccaatccagtgtttcacacttctctgaacaacctcagtctttcctgtttaaaattagattaaaaactccaccaggtcatttcagtagaaaaaaaaaaaaaaaaaa

SEQ ID NO: 7240 - DNA, 2696 bp, Macaca Fascicularis
  misc_feature (1)...(2696): n = A,T,C or G
tttctgagtgattcacacatgagactgggcgctgtggccagcagcacaccagcccccacatgccagtccccgacctgagagctgatggggctgcctggcccagcacccccaatcctggaacactgacctcaagctccaccactggcagctgggttggtacctccccaccaaggggctctcctccggaagactgggctgggcccaggagccaaggctgggagcaggaccagggccactggacccctctctgggtgactttctgggtcccactttactcagcctctgtagggctgcccgagtccccttagccacccacaggaaggggctcagacattactggggaggcccaccccacaatctgccccagaaagcaaagccagaagagcaccccctcccggccaccctccctgcagctcagtctgccctgcaccttgacaaacggctggagcttggtctccgccatggtgggagctgcgcggtcaggcccgggtggggacctgggtcgctctttaagtctccctgtgcgccccgccctccctggccaaggggcccgccccgtggggccacctaggcgggcagatgaagctgcccagcgcgcagagctggctgcctgagcaacaccagcctggccctggggtatctgagccagagggtgtgacctcagggtgggggaatggtgtggggggctgccttggacttgagtctggtgcacacagagatccacccacccagtgcggagtgtgctggcagccagcgtggtgggtggagaccgggggcggggcacagggagaacctacaggccagaagggtgcagggagtgtcacctggggagggggtagctctgggtcgggaccacgtccaccgtgaacctagctcagaacctgccctatggctctgccttcggcaaataccccttgtcagggctcccagcccagaaaaccagtgggtgtgggtgagcaggagaaatggtgcccagcctagcttcggttccccatctgcagcaccggagcattgcaagggtggtaggcccacctgggggagccgccccttcccagctaccgagcagtcaggcagggccctccccgctcagggcggggctcaaattccagacctgcccgcaacagggcggggaggccagcctggctttggtgtttggccggcagtgcaggtctccaccccacctcccatccctcccactggctctcagcacaggtttcttacccccaccccttaacctttaaaaagaagcagcaggagcggggtagaagccacagcctgcgtggctgggagaaagcagccaggggacggtgctggtccacaggtgtgagcctgctctgagcttcctggtgtgattggaacccacagttcagtctggccctttggggtcgtcaactgcgcctccatcccacctgggccctgatgctttggggggcagccccagggaggtacaccgaggggagactccacctagagacccggggtgcccacaagattggcctggccacacctcccccaggcggtgtggtgcctcacgagcccggacggggcagctgaggtggcactgctcgcctgctcaccttctccccagggccttggtataggccccacgcccgtccccggcgggaccgaactccagtgctgccccagccagcccagcctgacacttctctggataccacgccagtcagggctcctggacacacggagccttggaaatgccacgtggctcccctatcctttggtgtcctgagcctcagtttccctccatcctgcctccacctcgattccaagacctaatattttggctttctcgtactgtggttatagctccgttcgctggtttcccacatccctggcaggcacatggccaaccacagaggagtcccaggcccccagcccagctctgctgcccgggcatcccgtgttttcaacactgacagacgcaccctcacaaacccacaggagaaacgacagcgcggacagaggctgtgaaccggtggctcggaaggaaaaagaaaatgccaagatacaggaagaccgttcacctcatgcccgtctcaagaaacaaaccaaacaagactcggttcatcgccgcagcggccccactgcgttctgtgggtgtgggctgtggactgtggagcagcggtggccgtcctacactcccctgtgcccttgcccacctgggaatcagcccagtggcttctttattttttggtttaatcaattcatttatttactggaaacggggtcctgccatgttgcccaggctggtctctacctcttgggctcaagagacccgcctgccttggcctcccacagtgctgaggctacaggcatgaaccaccacgactggtcggtttctctgtgaagggcaagtgagtgctggctgccccactgtgtggcatggctccgtggcacggccaccgccgtctatgggagactgcagttgtgtccagggaaaaggacggaaaaggtgactccatgcgtgcccactgcagggagggcctgagattaggtagatggcctggcttgtgtccccttacatttaaattcttaggctggctgggcacgnnnnnnnnnnnnnnnnnnnnnnnnnnnnnnnnnnnnnnnnnnnnnnnnnncatgaggtcaggagctcgagaccatcctggctaacccggtgaaaccccgtctctactaaaaaaaaaaaaaaaaaa

SEQ ID NO: 7241 - DNA, 358 bp, Macaca Fascicularis
cagaccttggcatcatgggaagctggttctacctcttcctggctcctttgtttaaaggcctggctgggagccttcgttttgggtgcctttctcttctccaaccaacagacaagactactcttcaaaggtggagggtcttcatgaaacacagctgccaggaacccaggcatagggatgggggcccggaaaaaggagggcacactggaggaggggaggagccagtagggagatgctggctttacctaaggtctagaacctagcagggcagtataggcagaggcttttccatcccaggcccattcttgacagatggggggagggatatgcaatagaccagctggcaagaaagacatgtgtt

SEQ ID NO: 7242 - DNA, 772 bp, Macaca Fascicularis
  misc_feature (1)...(772): n = A,T,C or G
tgactagccaaactgctacagtatgcaattnnnattacaannngtattacggggggaaagtaaaattatactttaccnnnnnnnnnnnnnnnnnnnntagtgcactgtgctctttccacgtnnnnnnnnnnnnnnnnnnnnngtgccattgaacctcggtatatttatgatttctttcaatgttaaaaatagacatagtgttgccctttttcttaaagcctcaatgaaattatggaaaattgcttaaaacatgaatacatcatcacagtagaatgtattatgagagcatgtagtatgtatctatnnnnnnnnnnnnnnnnnnnnnnnnnnnnnnnnnncccccagatttgtgttgaacgaaaacattgtggattggaaaggagaannnnnnnnnnnnnnnntgaagttgtgagattaatgttttaaaagctttacacctgtttacaatttggagannnnnnnnnnnnnnnnntttttcatatgtttaatgaaaactggcttaagatatttgtaaatagaatcaagagcaaaactgcacaaacttnnnnnnnnnnnnnnnnnnnnnnnnnnnnnnnnnnnagtaaaaatacttactattctaaaaaaatgagaattgaagacttagccaggcagataagttttttcatgaacccgtgtggaaattattggaattaactgagccaaagtgattatgcattcttcatctattttagttagcactttgtnnnnnnnnnnnnngtttacaatacatgcataacttgtagctataaac

SEQ ID NO: 7243 - DNA, 1047 bp, Macaca Fascicularis
  misc_feature (1)...(1047): n = A,T,C or G
tgagcaacttttagtagaatgaactttcannngggatctgagccttgtcnnnnnnnnnnnnnnnnnattaaacttcaattatgaccaagaaaggatagactgacccctacaatttgtataaatattgaacgtgtctatatattagcatttttatttaatgacaaagcaaattaggattcttgctttttatctctttttttaaaacaatatactgtgaactttgtaaggaaatatttatttgtatttttatgttttgaatagggcaaatggaatgaggaatggaaattgtaacatgtagtatatctagatctatatgcttttccccataggaagaaattgacttctgcagtagtttttggatgctctgacttgtgcaatttcaatacataggaggttatgtaatgtaatattttacataaacaattactatcagttgaaagttcaggccatgctttaggcaaaagcaggcagcctcacatctttatttttgttacatccaaggtgaagagggcaacacatctgtgtaagttgctttttagtgtttttaactgaaaagccgttttccattttgcttaatnnnnnnnnnnnnnnnnnnnnnnnnnnnnnnnnnnnnctctcaaatggagccacattcggggaatttgtggtatttttaagaatggagttgttcctgctgttatttgatccaaacaatgttttgttttgttcttctctgtatgctgttgacctaatgatttatgcaatctnnnnnntttcttatgcagtaaaattattacacaaactagcatgaaaatgtcaaattgctttcttaatcgatgattttcaagnnnnnnnnnnnnnnnnnnnnnnnnnnnnnnnnnnnnnnnnnnnnnnnnnnnnnnnnnnnnnnnnnnnnnnnnnnnnnnnnnnnnnnnnnnncatagaattgcactacagtgttttccaagttcagagaacagatgaatagatccacactgagaggaatttgattctctggactcactttttgggggcgagatctgtgtagtgtttaagtcagtaattgta

SEQ ID NO: 7244 - DNA, 3477 bp, Macaca Fascicularis
  misc_feature (1)...(3477): n = A,T,C or G
gatgttttactagtcttatgatggacttccaggaacagaaccccaatttaaatagcattgcacctataggaaatgagctttcagcttatgacagttcaacctgtgactattcaagaactaattaagtagcaagtcaaacaggttgtcaacaccatgtgtcatggatctttgatgtcacttgagagtatcaaaggtgaatattaagttcttgaataccaactttaagtgtgtgtttacacaaggaaattatatccctttctcctcagtacattcagtatcatattcctttctctctaatacacttggtgtagaattctttccagattcagtagaggccttgatgatgatgatgggcctttgatgttgaaaactggactctccatgtttcctcgacccaaaggaagtggaagacaaagtggtccaaagggttctcagccttccttctgcctttttgcccctccatgtgcagtcagacatgtctgtgagtcagctactggagggagaggacagagataggttggtatggcagctatgcaggcgagagtgatttctactaaaaggtctttccagttggcctctgtgagtctggacgaagtgagtctgctgtcctctgtcttcgacagtgtgtgctcataatgttgactcttggtctctagaagagcttgaaagactaggctattttttaagaaattattttcccacattgcctcaaagctaaatatactatgttttcattctctaaaaactgataatcccaatatatatggtaattttgaattattaagctatttagtctccatgctggttaaaatgggaaactcctgtccctgtgacagaagttagttggaagttaaaataactattatagttgcttcttttaaggatataattgacactatgggaaatacactgtttggctttggtgcagaacctgaatgatcaatttgccaaaagactgattcactgaagactctcagccaaatatcttaaattgagctgggaaagttcttggggtgggtgagggagtagcagatacagatttaggagtctgtaaaagtatgagtccataaatccacaaaaatagaaaagacaaccatgattaagagaaagcccattcattgaatatataaaatgttgcagaaactgcaaatctgagaaacaacaactctggcaaagtcagaacaaaaccaactaaaagtaccaaaacagtctcaataatttggtgaattagtcattcaatagagtgacctggttttagtcctgtccaagggagggaggactgaccaaaaatagcacaaagaaatctggtcttaaaatccattgctcttttttcttcaaatggtggtgtactggttcagtctttcaggagtgttagtacagtcaaccctctgcatccatggattcaaccaaccacaggttgaaaatattcaggggggaaaaaattccacaaagttccaaaaagctaaccttgaattggccccccaccaagtatttcattgaatccatacaaatgaggtgatgtgtggcattataatagctattctgagtaacctagagatgatttaaagtttacaggaggatatgcttaggttatatgcaaatactacaccacttcctctcagggacttgagcatcacaaattttcgtatctgcaaggagtccctggaccaatccccaccagataccaagggacaactatactaggattctatcacttaatttttccacccagttatgctcatggttaaaagtggactagaagaaggccaggtgtgnnnnnnnnnnnnnnnnnnnnnnnnnnnnnnnnnnnnnnnnnnnnnnnnnnnnnnnnnnnnnnnnnnnnnnnnnnnnnnnnnnnnnnnnnnnnnnnnnnnnnnnnnnnnnnnnnnnnnnnnnnnnnnnnnnnnnnnnnnnnnnnnnnnnnnnnnnnnnnnnnnnnnnnnnnnnnnnnnnnnnnnnnnnnnnnnnntcaggagttcgagtctgcagtgagctgagattgcacccctgcattccagcctggggaacagaatgagaccctgtctcaaaaactttttttttaattaaaaccttaatttctaaaacttaatttcaaaaaaagtggccagaagctgggactttccgtatgagatttaaatttaagcatcagtatattacttgaaagtaggggtaacaaaaacatttctaaacagtcccccaaattaatttagacaggattatttacctatttctctactctaacctgggttttaatagttaatgtactagaactttaattgcctgataaaatgttccttaaaaccctgtccataataccctaagccttattgagcaggttaacctcaactttacaatgatcttagccactaaatcttctccagtggtgattgctcagtaaacgttaaatggattatgtacaaagatgaagataccgagataaataaaagacttccctacagccaccactatttaaggaccgtctgcaggttttctgcttattccactgtcatcacctctctactgattgaccttgcttctttctctcccttactacctgggattcatacattttaaatagaactaggttttatgtgccacaacttctttatcatgaactggattccctagaaaggaagtttaactaaattgtaaatgctgaggtacttagctttgttttcaggacatgtatttcagcttattggaagtagatacatttcactatcaaagaagagacagagattatagtcctgtaattgtacatatattttattcagaggagcaaagtctatttttaaaaagagccctgtggtcaaagtagggcacagttggtaaaggccacataataaatattaactgaaatcccctgaaatagctctgattttatgagaaatgtgttttttctagcaacctctctctcagttgtttaacttcatttttagaaagtctgtcacactggtgtatcacagatgcatgtaacagggcctaggcgtctcatacaagaagattttaataatttgatcacactaatttaggatttacaacattaccaccgaaccaattagtttttgcgtagtaactaaagaaagcatttctcagggaatataaagtgtacacacataaaagggaaaaacatttaaactattttaagggaacaaatggtatttaagaacattcgtataatgtacatgtttactaatcacaagaatatctcaagatttggtgaagattctccctagcagtatttcacttggcattttgtgtgcactagaaagggcaaaacattcaattatgaatatgtgtcactgaaccaaacccctcctatcgaatttgcctgaataattgacattttgtggtcatcaaaaaattactatagttttttttgttttgttttgttttttgattttgagccgagatcgtgccactgtactccaggctgggcaacagagtgagactccgtctcaaaaaaaaaaaaaaaaa

SEQ ID NO: 7245 - DNA, 737 bp, Macaca Fascicularis
  misc_feature (1)...(737): n = A,T,C or G
aagaaagtgtggtcaagatgggacttttctaacaggtggnnncnggtggggctgaggtnnnacaaggaccttgaaacggctgcctctttgccagtgacttgtgggtgatcagccagaaatggccgggggacctcnnnnnnnnnnnnnnagggccagaggccaggagggcgcctcagggccaccagctgcacagacctnnnnnnnnnnnnnnnttagaagaagaaaaaaacatttaaaaactccttcttgaatttaattccctggactggaacagagttggaagcagcggcgtaactggtgcctgagctagctgcacagccaaggatagttcatgcctgtttcattgacacgtgctgggataggggctgcagagtccctggggctcccagggtcattaannnnnnnnnnnnnnnnnnnnnnnnnnnnnnnnnnnnnnnnnnnnnnnntttccaccagttcaaaggcccttggtatgtgtgtccctgnnnnnnnnnnnnnnnnnnnnnnnnnaagaggcagagttcaggattccctcaaaatgccctgcacactgtaggttttcaaaccatttgactcggtttgcctccctgccctttgtttgaaccttacaaaccctggataaccccagcttctagcagctggctgtcccctctgggagctctgccnnnnnnnnnnnnnnnnnnnnnnnnnnnnnnnnnnnnnnngagttcttgagcaagccctcccaggaggaccca

SEQ ID NO: 7246 - DNA, 678 bp, Macaca Fascicularis
  misc_feature (1)...(678): n = A,T,C or G
actgtggttccagaaatgaacaacacagataaatcacttccctcaaaggggttgcattctactagggggagagaagcaacaaaaaataagtcaaaaataaaaaataaaagataaataatgaggtaatnnnnnnnnnnnnnnnnnnnnatgaaataaaataaagcaggttagggggatttgggagaggaggttgtgtgaaacaggatggaggactgagctggtcatatgcaggcaaggttctcagcgaagtgaggaataactggggaaagagcattcaaagcagtgggactgcatggcaagagctctaaggcctgagttcaccacagggctagagagccctatggtgaacaaaaacgacctaacctcaaggagcttacagttaagaaagggggaaaaaatgaatctcaatcaaattcatcacgctcaaaatgcaaagctacannnnnnnnnnnnnnnnnnnnnnnnnnnnnnnnnnnnnnntgattatgttagaggcaagggtcggggtggggtgatggaacgttatctaaatttggttttcacaaagataactggataactcttgactgctgtgtaaaggctgatagtctaatctcagaacagaatgcatgacgtgcaccactgctgggaatgagagcaaaccaaaagtgggctctgtctannnnnncaacgggcagc

SEQ ID NO: 7247 - DNA, 767 bp, Macaca Fascicularis
  misc_feature (1)...(767): n = A,T,C or G
tttaannnnnnnnnnnnnnnatcagtgntacgtttnnnntatatnantgtgaaaatcagatgaatgataaaagagtcccctgcaaccaattgaaaagtgttctgtgcgtctgttttgtgtctggtgcagaatatgacaatctaccaactgtccctttatttgaagttggtttagctttggaaagttactgtaaatgccttgcttgtatgatcgtccctgtcacccgactttggaatttgcaccatcatgtttaagtgaagatgctgtaaataggttcagattttactgtctatggatttggggtgttacagtagccttattcacctttttaataaaaatacacatgaaaacaagacagaaatggcttttcttacccagattgtgtacatagagcaatgttggttttttataaagtctaagcaagatgttttgtataaaatctgaattttgcaatgtatttagctacagcnnnnnnnnnnnnnnnnnnnnnnnnctttgcactgtaatgaggaaaaaatggtataaaaggttgccaaatnnnnnnntatttgtgccgtaattatgtaccatgaatatttatttaaaatttcgttgtccagtttgtaagtaacacagtattatgcttgagttataaatatttttttctttctttgttttattttaatagcctgtcataggttttaannnnnnnnnnnnnnnnnattgcagttagcccccgaaaatgaaatccgtgaagtcacattccacatctgttcaaactgaatttg

SEQ ID NO: 7248 - DNA, 809 bp, Macaca Fascicularis
  misc_feature (1)...(809): n = A,T,C or G
tccccctcctccactcccagagaaaaagctcattaccagaaacattgcagaagtcatcaaacaacaggagagtgcccaacgggcattacaaaatggacagaaaaagaaaaaaggtaaaaaggtcaagaaacagccaaacaatgtcctaaaggaaataaaaaattctctgaggtcagtgcaagagaagaaaatggaagacagttcccgaccttctaccccacannnnnnnnnnnatgagaatctcatggaagcaattcggggaagcagcataaaacagctaaagcgggtggaagttccagaagccctgcgataaaaacacgatctctagaagaggatgcagaactnnnnnnnnnnnnnnnnnnnnnnncatcgtgagatgtttctaaaataacttcttcaattcaaaatgatccctgactttaaaaataatctcgcccattaattccgaagagaatcttaagaaacnnnnnnnnnnnnnnntctgtaaatatgaacataaatttattttttatgttgtgagatttgtattggcaagaagcaattaatttaaagatgctcttcctatctctagatgtgttggtaactccgacttgtaatgagttcatgaaatgtgctgttatttttgtaatctcaataaaatgtggattgaagttttttcccttttttttaagccaaactaatatttttctgtgacttgatnnnnnnnnnnnnnnnnnnnnnnnnnnnnnnnnnnnnnnnnnnnnnnnnnnnnnnnnnnnnnnnnnnnnnnnnnnnnnnnnnnnnnnnnnnnnnnnncatctgtcaggtgt

SEQ ID NO: 7249 - DNA, 773 bp, Macaca Fascicularis
  misc_feature (1)...(773): n = A,T,C or G
gttacagaattccagtgttatagtgaagtgtaatgaaaaacatnnctaggtatgtgcttaaccactgctgtaaaagagacaagtctgcatttatttgtgcaggaaaccagctatttaattgttctaaagttttagcatttaaaaatcgtatgaaagtctacatcagctgaaatcgtcctagcttcataatcacttggagggggacttggaaggtaagaaagatactgcattttctcatgactctccaagcccacttgaaaagtcacactgaaaggatgcaaatagccgtctgcgattttggcagccctccggattgtggtgtcaatatgttgtacctggacattcccaaatttaaatttggcaatgaaaattccacaaagatttctgataactttgagctataaataccttaaaaataatagattgatgattttctttatttcctagagaatttattttataaatactttgtttacattttagattgtatttgtccttatttaatttaaaatgatgaatctagtctgaatcagctgttattccaagctatcatgcttaagctatgtcaacagcatttatttgtactaatgctaatatttccatcaaaatttgcctgtggaatatatacagttcttaattttaaactgtcagttcttgagatatactgtatgaagctattgtcagcttctctatttcaaaatgcaatcagcatataactatattgatattagaaaatatttgttttttaaaatgtatcgatngtatgataaaaa

SEQ ID NO: 7250 - DNA, 709 bp, Macaca Fascicularis
  misc_feature (1)...(709): n = A,T,C or G
ggactgtctgcagggaggaaggacaaggaccagcctagatctggcctgcaggacagaggccttagtagctcaggatctttccctgcccctcctcaggaacagaggcagctgaggtggtagcagactcctgcaggtttagagacagacagnnnnnnnnnnnnntcctagctcttcctctcactagccgtgggattactggtgggtcacagaacatctgtaaaatgagacaacaacactgatttcactgcggtcttgtgaagatcaaaggggatctgtcgtaatgcctggcatgcagtaggtacttaatagtagctcttgttgcaaaaccaagccatgaacatgtatctgactttctataacccccttccttggggcctccactcatggggcatgggaagttgtttttttctttgtttgttttaatgcagttgacttttgttgttgttgttgttgtgttgtagcaaaagtaatccatgtgattgatgtttattatgaagaaaacatttaatacagatgaaccaagaacagggaatgaagttcatccttaatcccagcacccagagataaaccactgttaacattttggaatnnnnnnnnnnnnnnnnnnnnnnnnnnntacatatatcttatttgcaaattggggttactggtgcaattttctaacctgctttttctcccnnnntttaacagccatagtgtatccatgttc

SEQ ID NO: 7251 - DNA, 525 bp, Macaca Fascicularis
  misc_feature (1)...(525): n = A,T,C or G
atccctctcccactcccccattttcctaaagggagcatttagcagccacatctggatctctcggagaggtcttcctcttccctgtgcttcctttccagtttattttctttccctctgaaacagtcctatatctgactcctacattaaaagtctacttctttaaannnnnnnnnnnnnnnnnnnnnnnnnnnnnnnnnnnnnnnnnnnnnnnnnnnnnnnnnnnnnnnnnnnnnnnnnnnnnnnnnnnnnnnnnnnnnnnnnnnnnnnnnnnnnnnnnnnnnnnnnnnnnnnnnnnnnnnnnnnnnnnnnnnnnnnnnnnnnnnnnnnnnnnnnnnnnnnnnnnnnnnnnnnnnnnnnnnnnnnnnnnnnnnnnnnnnnnnnnnnnnnnnnnnnnnnnnnnnnnnnnnnnnnnnnnnnnnnnnnnnnnnnnnnnnnnnnnnnnnnnnnntgctgtgcccagacttaaagttttcctttatacgtgtgttcatgctgtaaaaattcattgaattatatacatgattt

SEQ ID NO: 7252 - DNA, 669 bp, Macaca Fascicularis
  misc_feature (1)...(669): n = A,T,C or G
acggagttggggttcagggcttagaaacagcagcggtgggaagccggaatcactgatttgggaaggtaacaagcgtggtagagcaaatctaggaaaggggaatgtgcatagtccgtgtggtttcctgaacctacctccccagatggttacactatctannnnnnnnnnnnnnnnnnnnnnnnnnnnnnnnnnnnnnnnnnnnnnnnnnnnnnccgagctcgagctctggcgagggcatcaggatcctaatctggatgggtnnnnnnnnnnnnnnnnnnnnnnnnnccccttcacatggtggatgatgccccatgaccctgtagaaattgaatcctgctcacaacattgttggccttcgtactaacctnnnnnnnnnnnnnnnnnnnnnnnnnnnnnnnnnnaagcatttggctactgtcaaaagaacagaactttgcctactgcacacttgctgtgtnnnnnnnnnnnnnnnnnnnnnnnnntttgtttccttgagagatgtgcgtgcgactgtggcttttcccaatgtttctgacnnnnnnnnnnnnnnnnnnnnnnnnnnnnnnatgcgattgttatgaggttaggcgtggcagctctgtacagnnnnnnnnnnnnnnnnnnnnnnnnnnnnnnnaaattgagataataaactgagnnnnnnncctg

SEQ ID NO: 7253 - DNA, 627 bp, Macaca Fascicularis
  misc_feature (1)...(627): n = A,T,C or G
gcaacaccacccatggttcggactnngnnnnnnnnnnnnnnnnngagattgcagnnnncttccctgnnnnnnnnnnnnnnnnntngtatgaggaggaagagcccnnnnnnngctgtggccctgtgcgctatagcccagagggaggtgtccactatgtnnnnnnnnnnnnnnnnnnnnnnnnnnnnnnnnnnnnnnnnnnnnnnnnnnnnnnnngacttttctcttagacgtatagtctaaaacattctccnnnnnnnnnnnnnnnnnnnnnnnnnnnnnnnnnnnnnnnngggcaccaccacctgcatgagagcctagctcactgcagcacatcctccagaatctagctttctatctacctcttctatggaatgttcatggtggttcagaagannnnnnnnnnntctttgctgnnnnnnnnnnnnnnnnnnnnnnnnnnnnncttgccaggccannnnnnnnnnnnnnnnnnnnnnnnnnnnnnnnnnnnnnnnnnnnnnnnnnnnnnnnnnnnnnnnnnnnnnnnnnnnnnnnnnnnnnnnnnnnnnnnnnnnnnnnnnnnnnnnnnnnnnnnnnnnnnnnnnnnnnnnnnnnnnnnnnnnnnnnnnnnnnnnnnnnnnnnnagag

SEQ ID NO: 7254 - DNA, 665 bp, Macaca Fascicularis
  misc_feature (1)...(665): n = A,T,C or G
aggccccagtgccgctgtctgagctcgtgcacccggtctcactcccgcctgcctccctggacgtgccctcggggaagacctgctgggtgaccggnnnnnnnnnnnnnnnnnnnnnncagccgctgcctccgccctaccacctgcaggaggtggacgtccccatcgtggggaacagagaatgtgaggagcagtaccagaacgagtcctcaggcagcaacgacagggtcatccaagacgacatgctctgtgccgggagtgagggccgggactcctgccagcgtgactctggaggccccttggtgtgnnnnnnnnnnnnnnnctgggtccaggtgggggtagtgannnnnnnnnnnnnnngtggccttcgtgactaccccggcgtgtannnnnnnnnnnnnnnnnnnnnnnnnnnnnnnnnnnnnnnnnnnnnnnnnnnncccagaccctagctggggtgcggtgggtctgcatgatccaggaggccccgtcttccttgtggacacccctgctgctccccagtcccagcctcaccctcccgcgggtctctgccccgagacccttctgctgctctcagcctctcaaggctctgtgttttcctgccggcagggggctcagggagcaggggagggtccctcagagannannngggagtgggaacagaatcc

SEQ ID NO: 7255 - DNA, 646 bp, Macaca Fascicularis
  misc_feature (1)...(646): n = A,T,C or G
nnnnnnnnnnnnnnnnnnnnnnnnnnnnnnnnnnnnnnnnnnnnnnnnnnnnnnnnnnnnnnnnnnnnnnnnnnnnnnnnnnnnnnnnnnnnnnnnnnnnnnnnnnnnnnnatgcgtcaccatgctgggcaaacttttgtgtttttagtagagaggaggttccaccatactgtccagactggtcttgaactcccgacctcagatgatccgcctgcctcagcctcccaaagtgctgggatgttgggattacagacgtgagccaccatgcctgaccagaagcattttcttttcaaagtgtgtgcatagagtcgggaggccagcctgggcaacgtagtgagttaggaactgtctctacaaaaaatacgaaaattagccagggtgtacacctgtaggcccagctacagactgaggcaggaggatcacttgaacccaggaagttgaggctgcagtgagctacagtggtgccaccgcactccagcctgggtgacaagaccctgtctcaacaacaaaaagctgggagggaaagggagcagcttcatgaactgacactggacattcaggcatatccacagttaaacatgagactcactgtgtgcttgctcagtagatgtctgccccacaaaatagaagccttcaattgctgctg

SEQ ID NO: 7256 - DNA, 750 bp, Macaca Fascicularis
  misc_feature (1)...(750): n = A,T,C or G
ggattggagggnnnncaggtctagacttnntcagtgggacaaaccagagcagagagcaggacgggggacaagaaatccagtttcccaccaccttggactcctcccataacctgggactttcactgacttcttcccacnnnnnnnnnnnnnnnnnnnggttctctcttgacccctccggggaaaaggactcgcctccctcactgcaggctcagccttccagggcgagagggaacaggagagtgtgtgcccatgtgtggcaggatggaaggacagcgggctcccgcctctaggcttggggctctgccccgattgttccccaaggctgccaagaaggagccctagctagctttcctcctctcccttcctggaagggtgctgcaccaacaggcttttgaccaactaaggcaaagaggggatttgaaannnnnnnnnnnnnnnnnnnnnnnnnnggagcctttggatatttttatatacgtttgaaaagggggttgagagaagaaaccaaaggtcggttgtactaaatgtatatatatagatacttctataaagtgactgctgaagacaagcatcctgtcgtggaggcacttgaggacgggctgagacagggaccataactcttcacccctcttcctccctctatcctgcctcagcnnnnnnnnnnnnnnnnnnnnnnnnnnnnnnnnnnnnnnncctactcacatttctactcattgctttattaatagtaaatgctcaatnnnnttgtagctg

SEQ ID NO: 7257 - DNA, 739 bp, Macaca Fascicularis
  misc_feature (1)...(739): n = A,T,C or G
aaaagataggacannnnggaacagctggcaacaccaaggaaaggatttaaggagagagatnnctgtattgaagaatttaacattaccctagaaacagcaagagcatcatcagcccgaggaaaatctacctctgatgtggagaccaggcttaagaaaatcccctagaacccagagaaaaagtgcaaaacaaggaaaatggccaaagagaacatcctagatatagagatcagacaatgagaatccagagtcttgttaagtgataaaaggaaaatactaacagaacgtgtgtaacaggaacaccattttagaggaaacaagaagaaaagtttcctaaactcgaaaagtactacaccagaagtgggcagtactcactatgttcaggggaacaaaaagataaaaactgaaaagcatcagaatattttttgtgtgaaggaaatttgtaaggtaggagaattaggtcatttattacagcacaaactgcatgtctatctaaatagacatttaagtgcaaaaacatggatattactcgtagttttactggaaaaccatacagatgttttttatgaatgtatagaatgaatcaaagtaaataactgatcaacaggaaaactaggaaatttgtgagctggttgtgaggcagtggctcctattatgtataattttagtgcgacgtgctgtgttaatgatagctgtcaaacaatatgttagcatttgaaaggaaatatgtatactgggagca

SEQ ID NO: 7258 - DNA, 764 bp, Macaca Fascicularis
  misc_feature (1)...(764): n = A,T,C or G
tcagagtagccccggngaaaaagcgatantannnnnnnttagtgttacattagtgtgatgaaagagaaaactgcctggaagcttccatgggtcactagttagggacagagcagcacaggtgaccagannnnnnnnnnnnnnnnnnnnnnnnnnnnnnnnnnnnnnnnnnnnnnnnnnnnnnnnnnnnnnnnnnnnnnnnnnnnnnnnnnnnnnnnnnnnnnnnnnnnnnnnnnnnnnnnnnaagcaaatannnnnnnnnnnnnnnnnnnnnnnnaggaggnnnnnnnnnnnnnnnnnggccggtgtccacgccgctgccgtgtctgacggctcctgataggcctggctgtcgcggggcacagctcgatttctctctgggtccttaaccttccagtagctctctgcagtccctcatcggctggcctgaccgtcctgccatagctcccaggtctcctgggctaagcagctcatggcatttttgggggacaggagtttatgtcgatttgtaactacaccattcnnnnnnnnnnnnnnnnnnnnnnnnnnnnnnnnnnnnnnnnnnnnnnnnnnnnatcacaaatannnnnnnnnnnnnnnnnnnnnnnnnnnnnnnnnnnnnnnnntcagtctaaacnnnnnnnnnnnnnnnnnntaactggctattttgcaaagactcaaaacagattagagatcttaatgaaatgatctcttaaatgaaatgatgttctttatttcacgaaatcatcaatcttaagcacgaggga

SEQ ID NO: 7259 - DNA, 716 bp, Macaca Fascicularis
ggaagtggggacaggggccctctcctgggggccattggtgctaatgagggggatggccttgatgtgggtgctcagcatgcctcccccagtattggcccggggcactagggcaggcagggtggagcagcaggtgcagtatcggtgggaggacgggttgctgggaataggacgagggggccaggccaggacaagggggtgccagagccatgaccactaccccgcccccaccacccgcctctccatctcagtattgcccctcccatcactcataacacacatacctcatccagcctcctccctgctcagacttggggagggtgggggaggagctcctgccccttctcctggtggcgggtctgcagagctgggagagggcagggcgtgtgacagagacaccgtccataaggaggacagtaactcctgccctgggaactcctgggcagcggggagggggacactgcccagaggcgctactgaatgtatgagaagctggtgctgggctggggggaggggagttgtggccagacacagggaaggaggtaggtctcttccccagggaggggtgggaccggcaggggtgactagaggggctcctactcctgccccacattgacaatcagtatgtctgttatgtgcgatttttcaccccgttgtgttttgggtcaggattttaaagaaagatatttttatggtaattgttgctcgtctatttacta

SEQ ID NO: 7260 - DNA, 709 bp, Macaca Fascicularis
cttttaattgacacataataattgtgcatatttaatgggtacattttgatattgtgatacatgtatacactgtatatgatcaaatcagggtacttagcttatccatcacctcaaacaattatcatttcttttttttccttgttcccacactacacagatgtaacaatgatcatttctttgtgatgagaacattcagaatcctcttttgtagttacagttgaccctttaacaatgtggggttatgagcactgacaccatgtgcaatagaaaatctgtgtataacttttgatttctcaaaaacttaactactaatagcctactgttgactagaagccttgctgataacataaacagttgattaacacatattccatgttatatgtgttatatactgtattcttacagtaaagtaagctagagaaaaaagttatcaagaaaatcataaggaagataaaatgtatttactactcattaagtggaaatggatcatcataaagatcttcatccttgtcttcatgttgagtaggctgaggaggaggaagagaaggggttggtcttgctgtctcagagatggcagaggtggaagaaaatcttgaatcactgacactacctctccccaactccccagcagcagtgtggagtggagcatctctgggcattggggaagggacagcacaacaattgtgaggcatcaattcagtgatgtcct

SEQ ID NO: 7261 - DNA, 757 bp, Macaca Fascicularis
  misc_feature (1)...(757): n = A,T,C or G
gacttaggcatagctccagtcttnnnnnnnntcnnnnntcttgttcagcttttacttctaatccaacaacannnnnnnnnnnnnnnnnnnnncagannnnnnnnnnannnntgaaccatcatccctgctctcctctcagctccctccaggcctgagcaccggttccttttatcccgtacgtcataaagtcacactattgggaaacctgtgcttccctctccannnnnnnnnnnnnnntcagtgtcggaatgtataagaatgcttgtaaatattgtaatatacttattaatatttgaannnnnnnnnnnnnnnnnnnnnngggaattaactcnnnnnnnnnnnnnnnnnnnnaatgatcaacaagtacattgatttaacaatcttactagattttaattcttaagtnnnnnnnnnnnnnnnnnnnnnnnnttatgtaggnnnnnnnnnnnnnnnnnnnnnntaaagagattctnnnnnnnnnnnnnnnnnnnnnnactctgaaatttttaagccttttatttttctaactatattaatataggactggattttaggcatcatataggaaacacaaaacttgttgnnnnnnnnnnnnnnnatatagcagaaaatttcgtacatgcaaaactgctaannnnnnnnnnnnnnnnnnnnnnnnnnnnnnnnnnnnnnnnnnnnnnnnnnnnnnnnnnnnnnnnnnnnnnnnnnnnnnnnnnnnnnnnnnnnnnnnnnnnnnaaatgttttccattaaagtct

SEQ ID NO: 7262 - DNA, 1548 bp, Macaca Fascicularis
gagccaccgcagcagggccgggcgctgggcgggctgctgcgctgggtgggcgccaggatgggcgagccccgggagccgctggcccccgccgtccccgcggaccccggcccagcctcgccgcgcgggggcaccgccgtcatcctggacattttccgccgtgcggacaaaaatgatgatgggaagctgtccttggaggaattccagctcttctttgcagatggtgttctcagtgagaaagaactcgaggatctctttcacactattgattctgacaacaccaaccacgtagacaccaaggagctgtgtgattctgtgtgattactttgtggaccacatgggtgactatgaggatgtcctggcctccctggagaccttgaatcactctgtcctgaaggccatgggctataccaagaaggtttacgagggcgggagcaatgtggaccagttcgtgacccgcttcctcctgaaggagacggccaatcagatccagtcactgctgagctccgtggagagtgcagtggaggccatcgaggaacagaccagccagctccgacagaaccacagcaaacccagccacggtgtggcacagacctggtatggaagccccactcgcgcctctgcccccaaccacaagctcatggccgtggaacaaggcaagggccttccatctgccactgaggatgcaaaggaagagggtctggaagcgcagatcagccgcttggcagagctgattgggaggctggagagcaaagcactgtggttcgacctgcagcagcgcctctcagatgaagatggcaccaacatgcacctgcagctggtccggcaggagatggccgtgtccctgcgcccgtatctgcgggggactgccggagcgaggagctgcttccacatcactgccgtgaggctctcggatggcttcacctttgtcatctatgagttctagggagacggaggaggcatggaagaggcacctgcaaagtcccgtgtgtaaggcgttccggcacgtcaaggtggacacactgagccagcctgaggccctctccaggatctcggtgccagctgtttggtgcacggtgggacgggactgacagcctcccagcggcccgcggaggagcccacccctggccccttctgcttgtgaaggacatcccctgtgttctagaaactggtgcagaggctgtgttttcaacccgtcctccacacggtgtttctctgctgtgacgtgaaggaggcctcccctgcccccacccgagaaggcagagcagtctctgctgcccggtcctggtgaagcccaaggttgtgggtgaagggggcggcttcctggggccagcacccccacctcctggtcctggcctctccccgacccctcagacggccacgcatgacccgcactcaccacgccctgccctcttcagtgacattcttctacctggtaggagttaggaccctgtagtgcccaacctagccaggctgccgccactgggcccaggcgccgaataaaccctggttgggaagggcaaaaaaaaaaaaaaaaaaaaaaaaaaaaaa

SEQ ID NO: 7263 - DNA, 631 bp, Macaca Fascicularis
ttccaaactgcgacatcaaggcaattgctacacagaagagccacatccaggatagaaaggaccagccagagctcgttcagctagtgtatttcataatcatcaggaaggagccagtagcggaattaccatgtggacactgagaccacgttgcaccctttgtttttctaaatggagtaggaaagaaagatgctaaaatgtgatcttgggaggagtcccccagtccccactaaaaggatgagaaaaaaaaaaaaaaaaaaaaaaaacagagctcccaaccgctgtggtcatggcaatttcccatcaaaactgcccatgtaaacacaagctgctaaaagtgaatgttaagaaggaaggcactggtaagtgggtgatcctgacttcaatcccctggagctggagaggggttttcccacggcctttggtttaatgtgtctgtaaactcaacaaacctcccttccctgaggtaatctgcaaaaacatcgttttccagtccccacagaccatttcgaattaaacctcacccccaaaatcattcaatgtaacatttgccttattttgagaagaaacaaatgttcccatatgattcccagtcattgagagaatccagaggcagctctctccgctgctactt

SEQ ID NO: 7264 - DNA, 2694 bp, Macaca Fascicularis
acattgtagcaaaatggcgactgtcattcacaaccccctgaaagcgtaagtaagactaaaaaatgtacatattccgcgtggtttcaatatgaaaagaaaggcgccttctgcgtggcgagcgctgccagtgcttgcgcttgcaggcgcctccagccgcggcggggcttctctcttctttcagctcttacttcttttttttcccccaacgcgcagaaatgtcaggagatgcaattaacaagaagaaaattgttacatttgtgttctgctaaattgcagagagagcgagagataggggttgccggcggaggagcccggcgctcgagcgctctacagcaggggggtcgcgggagctcggggacagcgcggtccctggagtcccccgcctcgcgggcagggagcgaggctccgggggcggccgggcggggggcgagcgtcgggccgggactgcctcagtgcacttggccgagccctgcacccccaagcccgcggcccccgccccgccgctgggtctgctgggtccggcggacgcaccgcggaggctccggagtttgcagggcgctcttcgccttccgatcgctcgcggggagtttgtgcaaaccttccggagttgggagcaccgcgggggaagcagcgggccccggatctcggaggcgctccgggcgaccgcgcgtgtgtctgctcgtgtgtttgcgagcaacctggctgtagtggattaacgactcgggttaacttggggtggatttggaggcagggaagccgcaggtcttatgaatggtgttctcgccacctctgggtgaggcgccgaggcaggcggagaggcggttttggggctcctggcccgagggggcagcgtctgctcccggccgggcgaggggcaggtgcctctggccgccccggggagactttgagcgcttgtccagatcctggacagagtggggcgggccgggcgagcactcgcgggggccagccccgggtccaacagccaatttctgcctgcctgcctgccttcctcctccttttcatcctggcttccttccttccttccttccagtcggtggaactgttaagccgccaagtccgctcgcgatcgcggagccaagggtggcctcggaaaactagtgtcgctctgaaaggggtgctattgggtgatgtcggcagagggtggctccctccgtattcgaggtgggctgggggtccgcaccccttcgaccgggacttccccgcccggacgaagccgcaggcaaagagggggagagggaggtgcgggccgggtagggggcggttcgtgccgaattctccctggtgcgtggccactgtcgaccctgcttcttttaattcagcgcattctcgtcttcacccctcgccactcctggagttgaaaaccaggttcgctcccggagacggtaggggggttcctaacgcaaaggaatgcacagggagaatcagacgtgtttgcaccagctcgtcgcccaccagaaatagggaaacgggtaggaatgccccaggtttcaaagatatttatatgaaagctgccgttaagaggacgttggaagctgaggctgagcagataggagctcccggcttcagttctgcctcggaagctcggatacactgcacttgaacgccacagcgtttcatccaagaaagaaaatgttttatggcagaataaatgggcgtaacttcgccgcatcctcgctgccggttgctttcgctgcaacaccgctgatgctgtctctaccgaacccacaactgatttgcagtttccccatatccagccgaaatcacataaccaggctgatgccacctggtaaactcaagttagagaatctatttcacatgtgcaccaggtttgtttcctactggaaaagccgtaccctagttacccgggagcccgctttcgcgcgggcgggcgcagtatctctaagcttcagtgttcccctgctcgctccagggtttttttggatcacagtagggtgcgcgtttggggagggagtctgtgtagggtggggttaagggtgggggaagggacagacggggggaaagaaggtggcggaatcccggctggttaggggaattagttctgaattgtactttgtataattagaaacagttgcaatgtgatgtatttgtaattgtgccgccacacgcatgcacacactagcatacacacaacgcccctgcttgctttttctaggtgggagttgagtggtcatttataattagccattcctttctgcttcccagaccctttccctgggggtaaaggggtgtaaacaatacccctgaccagcccagcctctcacaccctggacagtttttaactcctaatgcaggagcacacacgttgttattgggagacggacaccatctgccttttttgtttttttttaaacaacttgtttaataaaacatcttatatatttcatttgtttttaaaagttgctgatcaggaaacaatacaaacgtgaataaattatgcatgggataaattagaacaaagtgcagagacacatccagccgaagggatggtggtggtgcagggaggaggggtagcggagagaatggtttggagagctatgtttttatcctcatgtgtccctcccgacaatgaaacagagctgaacgacattagcattttctctgtgtgcgttctgagtctctctcttccctccaaaaaaaaaaaaaaaaaaaaaa

SEQ ID NO: 7265 - DNA, 709 bp, Macaca Fascicularis
  misc_feature (1)...(709): n = A,T,C or G
gaaaacgatgannnntggtcccttcccagagtnnnnnctgactgaactcatgtcacagggagaaagactgaagcctgctcacacacctggacaggttttgcannnnnnnnnnnnnnntgtgagcccaannnnnnnnnnnnnnnnnnnccgtgtgttcttcaaacccactgaattccnnnnnnnnnnnnnnnnnnnccccctgaaatcacccgcacttccccattgcatctgtaccccatttcgtggtggggcggtcattttgatttcccccatgcatgctagtgaatgtgtattccatttttaatctgcttttatgagctgacttttcagtgacccttcagataagggaaagttttcccatggcccctgcatcgcaattggtaaggtccaaaatgtcaaatggaaaattccagaaataactggtcgtgannnnnnnnnnnnnnnnnnnnnnnnnnnnnnnnnnnnnnnnnnnnnnnnnnnnnnnnnnnnnnnnnnnnnnnnnnnnnnnnnnnnnnnnnnnnnnnnnnnnnnnnnnnnnnnnnnnnnnnnnnnnnnnnnnnnnnnnnnnnnnnnnnnnnnnncagctacttgggaggctgaggcaggagaatcacttgagcccgggaggcggaggttnnnnnnnnnnnnnnnnacgccactattccagcctggatgacagagtcaaacaaaaaatcaaaaaaaaaaaaga

SEQ ID NO: 7266 - DNA, 755 bp, Macaca Fascicularis
  misc_feature (1)...(755): n = A,T,C or G
ccaggtgtnnnngagttactaggactggaaggctatgagagggactttgaaatttcacaatttgtggtcatgtcaacaaatccagtgtaagattcatatttgtgtnnnntgaggtactttagatgaacggtaaatattcagtagaaaaacccacgtatttattatatgatccatgttttcaagtctatgtgaaattgggtaggtgtggaataaacttttttttttaattttaagctttttattctagaatatgtattctattcacaagactcaacaacaaaaaaagtatcggccnnnnnnnnnnnnncacnnnnnnnnnnnnnnnnnnnnnnnnnnnnnnnnnnnnnnnnnnnnnnnnnnnnnnnnnnnnnagaccagtctggcccatatnnnnnnnnnnnnnnnnnnnnnnnnnnnnnnnnnnnnnnnnnnnnnnnnnnnnnnnnnnnnnnnnnnnnnnnnnnnnnnnnnnnnnnnnnnnnnnnnnnnnnnnnnnnnnnnnnnnnnnnnnnnnnnnnnnnnnnnnnnnnnnnnnnnnnnnnnnnnnnnnnnnnnnnnnnnnnnnnnnnnnnnnnnnnnnnnnnnngtatcaaaagatgctgtgagaactctctcttgttgctgtcctctgtcaaactcagaactattccatgcaggtgtcattgcttatggcttggggttttgttgttgttgttttcttggttttgcttgttttttgctttttcactgtatgcctttcaagtttctaatgcaag

SEQ ID NO: 7267 - DNA, 715 bp, Macaca Fascicularis
  misc_feature (1)...(715): n = A,T,C or G
gatgctggtgctggatgcggagcagcgggtgacggcagccgaggcactggcccatccctacttcgagtccctgcacgacacggaagatgagccccaggtcnnnnnnnnnnnnnnnnnnnnnnnnnnnnnnnnnnnnnnnnnnnnnnnnnggaagcgtnnnnnnnnnnnnnnnnnnnnnnnnnnnnnnnnnnnnnnnnnnnnnnnnnnnnnnnnnnnnnaggagacggctctgtgaagacctctgagcnnnnnnnnnnnagtgaggaccaccttcaccttccacctgagaggggaccctcgttgccaccttgaccttggctggggnnnnnnnnnnnnnnnnnnnnnnnnnnnnnnnnnnnnnnnnccatggaccctcctccccatgcccctgcctctgctctcgggtgcccatcctggaggagcacctgaannnnnnnnnnnnnnnnnctggccgacctggggatggcctctgatgcctggagccggggcccccttgcccggtgccctcagaaacctcggagctggtggggctccaggtcaggccctggcctctgagccctgcctgnnnnnnnnnnnnnnnnnnnngaacagagggtgggcgcagggcaccaactnnnnnnnnnnnnnnnnnnnnggcgacgtcactggaccttcctgcacccctgcctggaatgtaaatcagcnngtgtggcnnnnnnnngtggctggaatgaaa

SEQ ID NO: 7268 - DNA, 591 bp, Macaca Fascicularis
  misc_feature (1)...(591): n = A,T,C or G
gggnnnggaacaggaccgggacagggggaggtctcccctcccattttacaactcccccattctctccctctccacaggatgaagctgatcccaagcggcagaagacagaaaatggggcatcggcgtgagcccnnnnnnnnnnnnnnnnnnnnnnnnnnntctctgggcctggaggtgggggtgggggcagacannnnnnnnnnnnnnnnncctggctccctgctctgggccctgcaccagagctgccaccctcttctttctccccagccttctcatttccgcctttccagacactgcgccctccaccctcactctgccattgttccacctcctgacctnnnnnnnntgagctccccagctggcccccaattgctcctctctctctttgctctctttctccctcccctaccagccccatccttcctctggtagcctctcccacctaacctctgcatcccccagcctcatgtcctgccccatccctatcctgcctgacccctggatctccctcagatcccctctnnnnnnnnnnnnnnnnnccggggtggggccggggttggggccgagccccacagctgcccccctcccctc

SEQ ID NO: 7269 - DNA, 795 bp, Macaca Fascicularis
  misc_feature (1)...(795): n = A,T,C or G
cccannngnnngctccagatgaagatccaggaagatcccannnnnnnnngagacaaaccctccannncagctgtcaccgtggagcnnagcaaagaaacacnnnnnnnnnnnnnnnnnnnnnnnggccgcatccgannnnnnnnnnnnnnnnnnnnnnnnnnnnnnnnnnnnnnnnnnnnnnnnnnnnnnnnnnnnnnnnnnnnnnnntgagcgataaatgtctccccacatgcaggctgccctcgcagctgcagnnnnnnnnnnncaggatggtggggacagcagggggctactgccatccagaagttacagctggattgggaagaagcagccagatcccccgctgttctcctcactcatcttctttctctttctgaagctggagagcagaagcccccatctttgaaaagctcctgaatgcaactgaattnnnncnatggcagggtgagggaacatttgcgtcaggtgagagatgccagcagttctttgggaaattcaggcccaaannnnnnnnnttatccaatacatttatttccaacattagctctaattagttcatttccaatcccagaacacacaaagggaatcaggtgagagatgccagcagttcctgctcctnnnnnnnggaagtcaggcagagcccacagagcatggtccatcgagagtgtttnnnnnnnnnnnnnnnnnnnnnnnnnnnnnnnnnnnnnnnnnnnnnnnnnnnnnnnnnnnnnnnnnnnnnnnnnnnngaaaccagggccctcttccttcatctgatgcagccactcctaggnnnag

SEQ ID NO: 7270 - DNA, 2291 bp, Macaca Fascicularis
  misc_feature (1)...(2291): n = A,T,C or G
atagggagcaggactaaggcacgcttgtacctcccaaccacagttatatcagtgcaggcctagtgagctgccagaaatctcacccacacgaagtaaaatggagacccttaatatcgtgtggtatccagagatgtcaaatgaggaacctgaacttctagtccacctggtcaaataagattcagagttttatcacataataccaaaaatggtcaagtttcaacaaaagtcatgtcaagagccaggaagatcacttgaatgaaaaatgacaatcagtagacactaacaagttaatgatagacatgttagaattatgtgacaaagattgttaagtagccatcataaacgtttcaatgagcaattatgaaaatgtttgaaataaaaagactctaagcaaagaagtgagataaagaaaaaatggaaattttaggctgggcgcagtggctcatgcctgtgatcccggcactttgcgaggccgaggcgggcggatcatgaggtcaggagttcgagaccggcctggccaatatggtgaaactctgtctctactgaaaatgcaaaaattagccgggtgtggtggtgggcgcctgtagtcccagctacttgggagactgatgcagaagaatcgcttgaacccgggaggtggaggctgcagtgggccgagatcatgccactgcactccggcctgggcaatagagtgagactctgtctcaaaaaaaaaaaaggaaattttagaactaaaatacagtaaccaaaaatttaaaaactcacctcaggcacaacagcagaactgagagaacagaggaaagtatcagtggatttaaagatataatagaatttactcagtcttaaatacagagagaaaacagactggaaaaaaagcagagactcaggaaatctgtagaactgtaataaaagatctaacaatataatcagttcaggggagagagaagaaagagtgggcctggaaaatctttgaagtattaatggctgaaaattcacaagtttagcaataagtatgaacctatacattcaacgagctgaccagacccccacaagcatgaaaccgaggaatccacaccaaaatacatcacagttcaacttcggaaaactaaaaatctggagactagagaggaaaatcacaccttacctatagggataaaaatcaaatgaaaacagatttttcaccagaaaccacagaggcacaatgtttttcaagtattgaaataaaagaatttttaacccagggaaatgacattggcagaataggaagccctagtctcttgttctcccacagagacatcaactaaacatcaaattacaaaccaaattgcttttgtgagaattgcagacactatttaagaggttgtagcaccccaagtgagcgcagagaagagacacatcagagtggtagaaaatttttgacatttcacccacccgagccactcccactgcctcgcatggcaaggtgtgatgaggaaaacaacactcagccctcaggttttccctcaggagggaagaagagtgggctgtgcatccaatgttttagcttttcatggtgctttccaagggcatggtttctgtctcatgagactcagagtactgactggaattagtagtttggatgctagattgggggctgctgaggacaaaggtgagcactggagcttgctacatcaccagagagactaatactgcaaacagtcagaggaacaagaggttgcaatctctaaagaagaagcaggcgaaaacctcgctctatgcacaagcccagagaaagtagcatccccagaaaaagtttgagacaatcccagaatctctagttatgctaaatgatgacgatcttcttttatacaaagccaatcctcaaagactcctggaggggactgttttttcaaatggccacatctcaacaaaagatcacaaggctataaagaaagagtgaaacatgtcctaataaaaagaaactaacctccagaaaccaaccctaaagaaatggagatcaggccaggcgagnnnnnnnnnnnnnnnnnnnnnnnnnnnnnnnnnnnnnnnnnnnnnnnnnnnnnnnnnnnnnnnnnnnnnnnnnnnnnnnnnnnnnnnnnnnnnnnnnnnnnnnnnnnnnnnnnnnnnnnnnnnnnnnnnnnnnnnnnnnnnnnnnnnnnnnnnnnnnnnnnnnnnnnnnnnnnnnnnnnnnnnnnnnnnnnnnnnnnnnnnnnnnnnnnnnnnnnnnnnnnnnnnnnnnnnnnnnnnnnnnnnnnnnnnnnnnnnnnnngtctaaaaaaaaaaaaaaaaaa

SEQ ID NO: 7271 - DNA, 718 bp, Macaca Fascicularis
  misc_feature (1)...(718): n = A,T,C or G
gcagtgagagatgcattccagaagccattatcataaagccgtcagacatcnnnnaagagaggatagattccttaattattttgcacatctgcgtcagtttgttcttacaccccttggatctttgagcnnnnnnnnnnnnnnncaaccagtatatgtcgtagatgtgtccaaaggaattgttaacatagttaaggatcccgatgccagcgggaaaacctttgctttcgttggtccaaataggtacctccnnnnnnnnnnngtgaagtacgtctttgctgtggctcacagattgttcctcccattacccttgccactttttgtctatcgatgggtagcaagagtctttgaaataaacccatnnnnnnnnnnnnnnncaagggataaagtggagcggtgaccagctcccatcctgaagccacccaggggctgccaaccctcagtcaactcatgagccctcaaaaagnnnnnnnnnnnnnnngcgcannnnnnnnnnnnnnnnnnnnnnnnnnnnnnnnnnnnnnnnnnnnnnnnnnnnnnnnnnnnnnnnnnnnnnnnnnnagcatgggcaacatggcaaaactccatccctactaaaaactacccggnnnnnnnnnnnnnnnnctgtagtcccagctacttgggaggctgaggtgtgaggatctcttgagcccaggaggcggaggttgcggtgagccaagatcatgacactgtactccaa

SEQ ID NO: 7272 - DNA, 728 bp, Macaca Fascicularis
  misc_feature (1)...(728): n = A,T,C or G
aggagggagctcagaggcacgggtagtggctggccagaggcacagctgctgaatcccccactctgatagtggcaaggcccagctgaaaggagactccttcttttctccacagactttggaatgggaagaagggatcacagggagattctgagtggcccagtccatggtagccgcccagggtgggggaaatggcactgtcccaaccttccccactcaagtgatcccagaagccaagctgcatgtggagtgggtctcacggtctatcttcaagatgagaggtgacagcagcaaatgcagttgtgccccaataggggcttcggtctggtggggagcatgtgggggagtgtcggctccacaggacatctaccacacatcttcccattccccaaccttccttgatgtttgctgagcacctaataggttcccaggactgggtaaggtgctttaaagatattattttaggccgggagaaannnnnnnnnnnnnnnnnnnnnnnnnnnnnnnnnnnnnnnnnnnnnnnnnnnnnnnnnnnnnnnnnnnnnnnnnnnnnnnnnnnnnnnnnnnnnnnnnnnnnnnnnnnnnnnnnnnnnnnnnnnnnnnnnnnnnnnnnnnnnnnnnnnnnnnnnnnnnnnnnnnnnnnnnnnnnnnnnnnnnnnnnnnnnnnnnnnnncaggaggttgaggctgcagtgagctatgattgcttcactgcacnnnnnnnnncaacag

SEQ ID NO: 7273 - DNA, 746 bp, Macaca Fascicularis
  misc_feature (1)...(746): n = A,T,C or G
catgctgcagtgactctaaatctgtggtnnncagccttggcgaacacctgagtagctgctacaagctggccgcagcccagcgannctgatgtggttggtccagcagccagggcatcgggacttttcgaagcttccaggtgactcaccggcagctggggatgcgaagtgtcaggaaggaaggtcagaagtcccaggatgcacttgaaaagcctctagctccaccagtgaccagctcctggccggactcctggcctggactcagcatctggcaggctctggtctctcaccctcagggctgggggattcttcacatggtcatcaaagacttggccagttccgcctctcctgcggccatccttgtctcacccagcatcgcataacccatcagttcaccagcaaacacggtgaagagatgctggtgctgggccctgtgctgggattgagggttctctggccctcatctggcgatgagagaaagagggaaacggtgagctctgtgttccgtcggggggtagcgacaagtctggaccagataaaagtgactcatgttgttaattagcagcttagggccaaaggtggcccctggaccagtggcctcaacatcacctgggaaaaagttagaaatgcactttcccaggcccacctcagcctcctgaatcagagcagccctttggcaaactgtactgagaaccaaccgcgtacatcaccgagcgctgtgaataagacaagctttgagaccttgaagg

SEQ ID NO: 7274 - DNA, 631 bp, Macaca Fascicularis
  misc_feature (1)...(631): n = A,T,C or G
gtccacactgacgatcccatagctgttccttgtgacatcacagaagcaggaaacggtgaccgcctgtggctcgcaggcatccagttcttcttggtgttggggtcagtctggaagnnnnnnnnnnnnnnnnnnnnnnnnnnnnnnnnnnnnnnnnnnnnnnnnnnnnggcagccgctccgacccggcctctggtgctcgctcttcactggctgtgcnnnnnnnnnnnnnnnnnnnnatgtgccgacccctgtccgcttggctcagccctggcgccactccattcagccaagtgggctgggcgggagctctggaaaaaatcattctaagacataaactaaaagaataatctataatatggcacgacaggattctatctcagaaaaaaaacaactgaaaatacgtaatacaaagtcctgnnnnnnnnnnnnnnnnnnnnnnnnnnnnnnnngtatacatgttgagaaaactgaagagccctgtaatcctgaggaggaggcctaatccaaggagggagaggctcccggtcctgtggacacacacggtttgcctgcttctgcccatttaggannnnnnnnnnnnnnncttcaggaggcaggagggtgaatgagtttctaaggacaatctaatcaca

SEQ ID NO: 7275 - DNA, 750 bp, Macaca Fascicularis
  misc_feature (1)...(750): n = A,T,C or G
tggcagtattcataattnnnnnnnaatgcattctgtaggtannnnnnnnnnnnnnggaatgtttnnttagactttttggatgtgcagcagcttacnnnnnnnnnnnnnnntnnnnnnnnnnnnnnnaagaaagcttacaattgggccctgtaccatcccaagtcctttgtagctcctcttgaacatgtttgccatacttttaaaagagtagttgaataaatagcgtnnnnnnnnnnnnnnnnnnnacaggttataannnnnnnnggagtttaccggcagcatcaaatgtttcagctttaaaaaattagggtacaagtttaatgtttagttatagaaattttgtgcaatatgttcataacgatggctgtggttgccacaaagtgcctcgtttacctttaaatactgttaatgtgtcatgcatgcagatggaaggggtggaactgtgcactaaagtgggggctttaactgtagtgtttggcagagttgccttctacctgccagttcaaaagttcaacctgttttcctatagaatatatatactaaaaaatttcagtctgttaaacagccttactcaattcagcctcttcagatactcttgtgctgtgcagcagtggctctgtgtgtaaatgctatgcactgaggatacacaaaaataccaatatgatgtgtacaggataatgcctcatcccaatcagatgtccatttgttattgtgtttgttaacaaccctttatctcttagtgttataaac

SEQ ID NO: 7276 - DNA, 735 bp, Macaca Fascicularis
  misc_feature (1)...(735): n = A,T,C or G
ggacaacatagcannnnnnnnnnnnnnnnnnnnnnnnnnnnnnnnnnnnnnnnnnnnnnnnnnnnnnnnnnnnnnnagatacttggganncngaggtgggaggantacttaagcacaggaagccaaggnngcaatgagttgtgattgtnnnactgcactccagccttaggcaacagagtgagaccctgtctcaaaaaaaaaaaaaaaannnnnnnnnnnnnnntgccatcatcctgctgaaacacttcaatggctttccattgcagctagaataaaatccaaactatttacaatggactggctcctgctccctctccagtatcattcagtcagttctccnnnnnnnnnnnnnctccagccagaccttctgttcctcaaacttgccaaccattttcctggctccaggcctnnnnnnnnnnnnnnnnntctgcctgtttgcccctannnnnnnnnnnnnnntctctctcacacccttcagcccttgactcacactgccctcatcagagatgccttccccaaccctcatgtctcagaaggcctcctcgacttacccgctgtcttaccaccagagtgtttcattgttatccctaatccacagttattttgtgtatattgtctatttgtctgtcttctgacactgtaatataagcatcactggggaacaacctttgcctgtcttgtttattgttacatccttagtcccttacacagtgtgtgaaacataagggatgcttg

SEQ ID NO: 7277 - DNA, 752 bp, Macaca Fascicularis
  misc_feature (1)...(752): n = A,T,C or G
gaaaatagcatcagcatctttagtnnnnncnnacagcacagactattttaatctaggcttattgtctttcgtagtaagatacagtcttagaggctagagccaacctctttttctttttttgtctgagtnnnnnnnnnnnnnnnnnnnnnnnnnnnnnnnnnnnnnnnnnnnnnnnnnnnnnnnnnnnnnnnnnnnnnnnnnnnnnnnnnnnnnnnnnnnnnnnnnnnnnnnnnnnnnnnnnnnnnnnnnnnnnnnnnnnnnnnnnnnnnnnnnnnnnnnnnnnnnnnnnnnnnnnnnnnnnnnnnnnnnnnnnnnnnnnnnnnnnnnnnnnnnnnnnnnnnnnnnnnnnnnnnnnnnnnnnnnnnnnnnnnnnnnnnnnnnnnnnnnnnnnnnnnncatgcctggccagccaacctctttttcatgtggagtgttaccttctttagtannnnnnnnnnnnnnnnnnnnnnaaaatagacatagtccttgttatgtagcgtatagcctggaagaggaagtaactgaataatgannnnnnnnnnnnnnnnnnnnnnnaatataatttaagattgtaatgagggctccagagggtgacgtcttagagcctagtcatggacaataaagaaggcttcnnnnnnnnnnnnnnnnnnnggccgagtgttataggatgattggggttggccgggtggagagggggtactagagcaggagatggcaaactactgcccataggtcaaatctggcccaacacc

SEQ ID NO: 7278 - DNA, 747 bp, Macaca Fascicularis
  misc_feature (1)...(747): n = A,T,C or G
acgatgctctaatcatactgcatttgatttgattttgcacagtgaccctgtagccacatgagaaagcactctgtttttgtttggtctcagatttatctggttgagttggtgttttgtttggggttnnnnnnnnnnnnnnnnnnnnnnnnnnnnnnnnnnnngacaacaccgttgaggtcgttaggatcaacgatctccacaatctctttttagtctctgttacatgaagttttattccaattacttttcatggaatgacctattttgaacaagtaattttcttgacaagaaagaatgtatagaagtctccctgcaattaatttccaatgtttacattttttaactagactgtggaatttctacagattaatatgaaatggagctcatggtccgtttgtgtgttagatatgcnnnnnnnnnnnnnnnntttgtcttttaaacactagttggaagctctcaatnnnnnnnnnnnnnnnnnnnnnnnnnnnnnntggggcagggggagcctcaagcacaatctagctgtcctcctaaagactctgtaacgcccgctcccctcgcgttctcccagcggtcgggaggctgtgctggtggtcgtgtagaggtccttctcctttcacatggtgcagagagcgaggacctctcctcctcgttcagttgcgcttcagtattttcacggatatgaatgtaaaatatataaatatataaacctgcggctttaacaactgtaatacaacctttgaatta

SEQ ID NO: 7279 - DNA, 723 bp, Macaca Fascicularis
  misc_feature (1)...(723): n = A,T,C or G
acagcccatgggccactannnganntnntctgtagtaagcgctttgtagggctggctccaactgcagtagccaaagaannnnnnnnnnnntcgacattttaatgcctgnnnnnnnnnnnnnnnnnnnnnnnnnnnnnnnnnnnnnnnnnnnnnnnnnnnnnnnnnnnagaaagtagcttcaaccaaagctaatagagcccaagtttctgcaggaggtttggtgctgagctgtcctagagcagttgtttatctgagtgttgctatcccttagccatgctttcttggctttgttctcgcctgttcttaggcatagcctgannnnnnnnnnnnnnnnnctgctcgctttagtctactccctagtcatgtggaacaacatagtctaaaaaggaagatgtggactggggagttaggagacctgatttctattccctatgcttctactaactagcctcgagatcttaaccgctctgtgcnnnnnnnnnnnnnnnnnnnnnatggggatagtgttaattgccctacctacctcacagggttgttgtgaggataaactgagacaatgaattcaaagtacgttgacaagtaagtgctatgcaaattgtaagaaatggaaacaatcatgttaaaggcaatggaatggacattggcagaagggttaatggattgtccagccctttctctgtgtggcttaaannnnnnnnnnnnnnnctttatacatttccactt

SEQ ID NO: 7280 - DNA, 2381 bp, Macaca Fascicularis
  misc_feature (1)...(2381): n = A,T,C or G
actcccacctgcacccctaaagtagcagtccccactgcctgccccaggagtacctgctgcagttgccccgccgcagaggccacagctttttggtgacagccaaattccatttccaaaagccagggactgtgtgcaagggtggcagacaaataggtggctagaggttgccagcccccttagaggtcgaagaaccactttctgaaagcctcagtttcctcatttgaaaagtggagatgatatgacccacgttcatggttgctgttgggaggaaccactgaacaataggccaaaaggcagaggcatccagctcagggcctgctttgtcaggggaactcgggcacgtgggaggccacgaaacttcgtcaagaaatacatcaagacacaggctttggagccagggcataataatagtgcctacctcaaatgagtatattcatgcaaagtacttagaatcctgccaggacatggtaagcacccaataaaagggaactataaaagtgtgtgtgtggagaaagcgtgtgcacttatggactgcagcagcgtggggagacatgtgttaaacaagcacatcagggtactgacatgcaactgatcattgcatcagggtatgtgtgtgtggtgccgtgcgtgggtttatggtaagggtgtcagagcatgggctgtaagggtgactatgtttgtgactgtctgttgaggtgtgtttctgacactgcccctggtgtgtggtgtgtgtctgtgtatgtgtctgtgtgtgtgtgtttgtctgtgtgtgtcaggatttgtactcctggtgactgcatatgaccatatccccagggaattcatggtggccgccttcacccagaaagccctgtggggtacagctggtctccatataaagaaggttcgatcttgtttattactgcaactcagtggagcagagagaccttgtagtccagagcaagaagtaagggggaggtggaagaaggtgaaggatccatggggcaggcacctatgccctggacttccccctattaagggcctgccttgttaagcccagcagtacagcagccaggagggccaaagctcctatttgtgggcacaggaggacaccgtggtccttggaggccgggtgcagggcctgatggaggggcacagtggcagagttgtctgttctggttagttggcagaggaagaggggaagaagattccctgcctcttacccagcacaaggggcaaaagcccccatctgcaaggacatgagtactccgattcagagaatcacttggccagacagtgagccacattcccagaccattcttccctctttgagaccccaggcatccccaagggctcaaagacaaggggcccagatccaggccttaattgactcctctctgtgaggccacaggttgtctaattccagtgcagggagtttactgcttcccactgtggcccttttcccaaacagcagaaaatactagaacattccttcttaggccaagtaggaggtcttcccttccccccttgcagtatctctcccttgctccctgggttactaattcccagttctcagcatgctttcaagtcagcccatcttcctggtcacactccagcctgtcaatgtccttcatcaaatagggtccccagaacaagacctgatatttcttggttaatgttaggaacaggtaacctgagcttgtaattatgagtcctagagagctgagaaatcgcattcccagtgatgccggggcgcccaccttttgcagcatcgctgtgttcagtactgccctctgcaacccatcctcttttgagatgctcttctgcttaccagcaacatgaccgtgggcaaattgcttccttgcattgcctcagtttctccatttgccaaaggaagggtctgtgtcactgatctataccagtgccattcagtagaaccataatgtgagccaaataatacgtaatttaaaatcatttctttgtcatatgttaaaaaaaattaaaaagaaacaggtgagattaattataatagtatattctatttaactccatacatctaaaatattaacaggtagtcaatataaaacttaatgacagccgggcacagttnnnnnnnnnnnnnnnnnnnnnnnnnnnnnnnnnnnnnnnnnnnnnnnnnnnnnnnnnnnnnnnnnnnnnnnnnnnnnnnnnnnnnnnnnnnnnnnnnnnnnnnnnnnnnnnnnnnnnnnnnnnnnnnnnnnnnnnnnnnnnnnnnnnnnnnnnnnnnnnnnnnnnnnnnnnnnnnnnnnnnnnnnnnnnnnnnnnnnnnnnnnnnnnnnnnnnnnnnnnnnnnnnnnnnnnnnnnnnnnnnnnnnnnnnnnaaagcaatactccatctcaaaaaaaaaaaaaaaaaaaaaaaa

SEQ ID NO: 7281 - DNA, 748 bp, Macaca Fascicularis
  misc_feature (1)...(748): n = A,T,C or G
cccaaaggagactggctcaggatggctgagtgcagtgttatttatttcccgtgccgtcagtggagcctgctctgcctcctgttctctctggtgtgtagctcactggattcagagcttatgcgcagccccagggcaaacccagggtacctggctagtgactgaaagaacatttcttctgttccgggtggaacagtcacagattctagagcaggggccctgacacttggtgagcagcattcactttgcctttccctgaagcaaatcattaacatccagcacacggcggttgtgtcagctctgcagatggagcctggcccatgtggctgctatccccagggctcagcgtccctgctctgagatccaccagcaagtccttagccaggacagatctggtctcctgccctgactggcaccagctaggactagagactgagtggtctgggactcagagaagcagccagctccccctttcctctctccttcgttaaaacttcaagttcccgccgggcgcgcnnnnnnnnnnnnnnnnnnnnnnnnnnnnnnnnnnnnnnnnnnnnnnnnnnnnnnnnnnnnnnnnnnnnnnnnnnnnnnnnnnnnnnnnnnnnnnnnnnnnnnnnnnnnnnnnnnnnnnnnnnnnnnnnnnnnnnnnnnnnnnnnnnnnnnnnnnnnnnnnnnnnnnnnnnnnnnnnnnnnnnnnnnnnnnnnnnnnnnnnnnnnnnnnnnnnnnnnnnnnnnnnnnnnnnnnnag

SEQ ID NO: 7282 - DNA, 2158 bp, Macaca Fascicularis
gacaaagatcttcctgcggagaagtactttgtggagaggcagcccgtgagcgagcctcccacagaccaggtggcctcggacatgccgcgcagccccaccctccgggtggacaggaaacgcaaagtctcaggtgacagcagccacactgagaccactgcggaggaggtgccagaggaccctctgctgaaagccaaacgccgacgagtctctaaagatgactggcctgagagggaaatgacaaacagttcctctaaccacttagaagacccacattatagtgagctgaccaacctgaaggtgtgcattgaattaacagggctccatcctaaaaaacaacgccacttgctgcaccttagagaacggtgggagcagcaggtgtcagcagcagacggcaaacctggccggcaaagcaggaaggaagtgacccaggccactcagcctgaggccattcctcaggggactaacatcactgaagagaaacctggcaggaaaagggcagaggccaaaggcaacagaagctggtcggaagaggctctcaaacccagtgacaatgaacaaggcttgcctatgttctccggctctccgcccatgaagagtctttcatccaccagtgcaggcggcaaaaagcaggctcagccaagctgcgcaccagcctccaggccgcctgccaaacagcagaaaattaaagaaaaccagaagacagatgtgctgtgtgcagacgaagaagaggattgccaggctgcctccctgctgcagaaatacaccgacaacagtgagaagccatccgggaagagactgtgcaaaaccaaacacttgatccctcaggagcccaggcggggattgccactgacaggggaatactacgtggagaatgccgatggcaaggtgactgtccggagattcagaaagcggccagagcccagttcggactatgatctgtcaccagccaagcaggagccaaagcctttcgaccgcttgcagcaactgctaccggcctcccagtctacacagctgccatgcccaagttcccctcaggagaccacccagtctcgcccgatgccaccggaagcacggagacttattgtcaataagaacgctggcgagacccttctgcagcgggcagccaggcttggctatgaggaagtggtcctgtactgcttggagaacaagatttgtgacgtaaatcatcgggacaacgcaggttactgcgccctgcatgaagcttgtgccaggggctggctcaacattgtgcgacacctccttgaatatggcgctgatgtcaactgcagtgcccaggatggaaccaggcctctgcacgatgctgttgagaacgatcacttggaaattgtccgactacttctctcttacggtgctgaccccaccttggctacgtactcaggtagaaccatcatgaaaatgacccacagtgaacttatggaaaagttcttaacagattatttaaatgacctacagggtcgcagtgatgatgacaccagtggcacttgggacttctatggcagctctgtttgtgaaccagatgatgaaagtggctatgatgttttagccaaccccccaggaccagaagaccaggatgatgacgacgatgcctatagcgatgtgtttgaatttgaattttcagagacccccctcttaccatgttataacgtccaagtatctgtggctcaggggccgcgaaactggctactgctttcagatgtccttaagaaattgaaaatgtcctcccgcatatttcgctgcaattttccaaacgtggaaattgtcaccattgcagaggcagaattttatcggcaggtttctgcaagtctcttgttctcttgctccaaagacctggaagccttcaaccctgaaagaagtctcctcaaaaagcagaggggagtgttgaagtgaaaaaaacagataacaagaccagaaagacagataacaagaccagtaaaacagacctgtagaaatgatttaagcaaaagaggactggtaaacctgaactaccatcaaagctacgagagatcctacacacccagatttaaaagataataaaaacttgagggcaaaaaaaaaaaaaaaaaaaaaaaaaaaaaaaaaaaaaaaaaaaaaaaaaaaaaaaaaaaaaaaaaaaaaaaaaaaaaaaaaaaaaaaaaaa

SEQ ID NO: 7283 - DNA, 733 bp, Macaca Fascicularis
  misc_feature (1)...(733): n = A,T,C or G
atagaattaagagagagattttatccaaacagaaatatctgtaatttttataattcattcagtaattctggaatgctatatataatatntaaaagactttttaaatgtgtttgatttcatcattgtaaaaaagggatcatctcagagagaacagcaatattcttcatattttaaaaaatgctctagagtaacatttgaagtaattcgctgtagtgtatgccagtcctagaaataaatttttaagtttctgatgtctgtttctaatacactaaccaagttttcaaaatatatttacaaagatgcatctttacccattattttaaaatgattagggaggatcattgcttcaggtaacaagttaatttttcaaatattaggcccttacagaactatttagtcaaaaagagatattcctttaaaatacataacccaaagctttcagttaaacatgatatatcacaaatgctattaaaatgttaaagcaagaggaatgcaaatagcattaaatgatgaccaaaatgtaaaatattgtagatttcaaaagctgtgtatctattaggtgggataccaaatgtaaatgatgtaactaatgttgttttttcactttttgctttttaaaaaagactaaaaacgttttgatattatacaatgtatttgtttcagataaggtcgttttcatttagtatatataattaatgtgtgtataagtttaagtaaatttctgtaagtaaaa

SEQ ID NO: 7284 - DNA, 2310 bp, Macaca Fascicularis
  misc_feature (1)...(2310): n = A,T,C or G
ataaatgtaaatttttaaaattttagaccaaggaggtacttgttgttctgccttaattgcaacttctgtttagaaagaaaggatcttttggctttaagatggaatcaagaggtgatagtagcaagactcaagtcctgaagataaaaacagaaagggccaaaagctcaccttctcggttaatcaggcaggtatggaggtggtggaaatcctcaaagataaaaagtgcctgatggcagcaaccaaggggagaggaagattggctgagcccctggagtgtgtagcaaggagaccattggtagccaagttagaatctgagaagcggccctgtagctgaacactagaaaagcctttgcgtcaggtattcccagttctaacatttatttatcaccttctgtgtaccaggttctgtgatcattgttagaaggaataaaatagtgacatagcctcctagagaacctcagtatccagtaggaaagatgggcatataatgaataattatattaataactttaataaaatcccctaccacctccaagaatataaactccatgagaacatagaacatgtctattttgtgtctagcactgagtggttgctcagtaagtatttattggataaatgaatttgtttagccctttctagtttactgtatgccttcacagatatctcgtttaatattctactttccttttctattcacccactttgtgatgtaagcaacataaataatagtatccatagcaatgatagtataagataataaattgagttaaatagaagttaaaatgataaacggagaatagagtaaaataggagcttttgtagctacatcttaatcagataaggagttgtatctctgtccaggatctagagtaattacatgcttaccgcccttcctcttgtttctctgttttttggggttttttgtttttttttttttttgagactgagtctcgctgcattccagactgggcgacggatcaagaccttgcctcaaaaaaaatctagtctctcactatggtgaattacattgattaaatttcaggtgttcaaacaaatttacattcctggtataaaccacttgatcatgatttattaacctttttatatattcttggatttgatctctgctaatttttaaagaattttccagccaggtgtgnnnnnnnnnnnnnnnnnnnnnnnnnnnnnnnnnnnnnnnnnnnnnnnnnnnnnnnnnnnnnnnnnnnnnnnnnnnnnnnnnnnnnnnnnnnnnnnnnnnnnnnnnnnnnnnnnnnnnnnnnnnnnnntggacgcggtggtgtgcacctgtgattccagctacttgggaggctgaggcgggagaatcgcttgaacccaggaggcagatgttgcgttgcggtgagccaggatcacaccattgcactccaacttgagcaacagaccaagactccatctcaaaaaaaaaaaaaaaaaaagaattttccactctgggagaccgaggtgggaggatcgcttgagcccaggagttcaagaccagcctaggcacaatctagtgatacctcatctctgcaaaaaataaacaaaattagccaactgtggtgacacaagcctgtagtcccagctactccagaggctgagatggaaggatcacttgagcccgggaggtcgaggctgtagtgagccaggatcacaccactgcactccagtcttggtgacagagtgacacctgtctcaaaaatgaataaatagggctgggcaccgtgatgcatgcctgtaatcccagcactttggaggccaagacgtgtggatcacttgaggccaggctgggcagcatnnnnnnnnnnnnnnnnnnnnnnnnnnnnnnnnnnnnnnnnnnnnnnnnnnnnnnnnnnnnnnnnnnnnnnnnnnnnnnnnnnnnnnnnnnnnnnnnnnnnnnnnnnnnnnnnnnnnnnnnnnnnnnnnnnnnnnnnnnnnnnnnnnnnnnnnnnnnnnnaaagcaaaactgtctcaaaaaaaaagagagagccggatgcagtgcannnnnnnnnnnnnnnnnnnnnnnnnnnnnnnnnnnnnnnnnnnnnnnnnnnnnnnnnnnnnnnnnnnnnnnnnnnnnnnnnnnnnnnnnnnnnnnnnnnnnnnnnnnnnnnnnnnnnnnnnnnnnnnnnnnnnnnnnnnnnnnnnnnnnnnnnnnnnnnnnnnnnnnnnnnnnnnnnnnnnnnnnnnnnnnnnnnnnnnnnnnnnnnnnnnnnnnnnnnnnnnnnnnnnnnnnnnnnnnnnnnnnnnnnnnnnnnnnnnnnnnnnnnnnnnaaaaaaaaaaaaaaaaaa

SEQ ID NO: 7285 - DNA, 721 bp, Macaca Fascicularis
  misc_feature (1)...(721): n = A,T,C or G
cttatttagtanntcatttaactttattgtggcttttacatagaaacatattcagttgtacttgttttaaattgtatacaagctgtacataaaattagcgaaatgaatcatttcttatatcttattcatgaannnnnnnnnnnnnnnnnnnnnnnnnntgcctttttgaatnnnnnnnnnnnnnnnnttatcatttatctttgtaatgtgaacctgtttcacagtgcactttttgccataacctgtcttaatttactttttctgaagtttggagtgataatttttagtggaagcaatttgtaatttaagttggtgattttattatatatagaaaagattttttagttaaacttctggacttgagcttcctatttaaatttcttgttaatatnnnnnnnnnnnnnnnnnntaggtttattccatggaacaaaaattaaaaatgaataagctatcaatatataatttaaatacaagtttaggctgggcgtgnnnnnnnnnnnnnnnnnnnnnnnnnnnnnnnnnnnnnnnnnnnnnnnnnnnnnnnnnnnnnnnnnnnnnnnnnnnnnnnnnnnnnnnnnnnnnnnnnnnnnnnnnnnnnnnnnnnnnnnnnnnnnnnnnnnnnnnnnnnnnnnnnnnnnnnnnnnnntacttggcaggctgaggcaggagaatcgcttgaacccagtaggcagaggttgcagtgagccnnnnnttgtgccac

SEQ ID NO: 7286 - DNA, 725 bp, Macaca Fascicularis
  misc_feature (1)...(725): n = A,T,C or G
caccccaaaaagaaactccatgcctattagcagtcactcccaattcttcccttnnncagcccctggaaattagtaatgtactttctgtttctatgattttgcctgttttggacatttcatttaaatggaattatgcaataatttgtggccttttgtgtttggctttcacttagcatcatgttctcaaggctcatccatgttgtggcatgtatcaactccattcctttttatggctaaatgatgtttcattgtatgagtgtgtaccacattttatttatccattcagcaattaatggacaggaacaatggcttttaagtattaaattgtaagttcaacattaaatgtatccacagttattgataatgtcaagattatacatggtgtgaacagaatgctgtgtagaaatgatatgtaaattatttgtcagcatttcatgtaagtgtgattattttctaaggacccttctagccctggttttaagaaatatgtgaatgtagtattttcatcaataaagtttaatgcattaagcattagcttaaaatttgaatgaaggcagatgtgaagatatttgccacatgttgtaataatcatgttttgaaattatttcaatatgaagtatttgaaaaatgtcaatacataaaggaaaggaaatgagtataattaagtcaatatatttttaaagcaatttttataatttagcagacactgcatcttaatataagta

SEQ ID NO: 7287 - DNA, 2470 bp, Macaca Fascicularis
acctttgctgatggcggcggcggtggcggcggctttgctggtggcgctcggcggccggagccggatcctgtagccgggtgtgggcccgcgtcggtccttccctccttcggccctctctcttgtcttccggagtgtggctggcggagccgggatggcggaacgaggcctggagccgtcgccggccgcggtggcggcgctgccgcctgaagtgcgggcgcagctggcggagctggagctggagctctcggagggggacatcacccagaagggctatgaaaagaaaaggtccaaactcctatctccttacagcccgcagacacaagaaactgattcagcagtacagaaagaacttagaaaccagacacctgctccatctacagctcaaacttctgctccctctaagtaccaccgaactcgatccgggggagccagggatgaacgatatcgatcagatatccacacagaagcagttcaggctgcactggcaaagcataaagaacagaagatggctttgcccatgccaaccaaaaggcgatccacatttgttcagtctcctgcagatgcctgcacgcctcctgacacatcttcggcctctgaggatgagggctctctgagacgccaagctgcgctctctgctgccttgcaacagagcttacagaatgctgagtcctggatcaaccgttcaattcagggatcgtccacttcttcatccgcatcttctacgctgtcccacggagaggtcaaaggaaccagtgggtctctagctgatgtatttgccaatactcgaatagagaatttctctgctcctcctgatgtcactacaactacctcttcctcctcctcatcttcctcaattcgcccagcaaacattgacctgcccccctcggggatagttaaaggcatgcacaaaggatccaacaggtccagccttatggatacagctgacggtgttcctgtcagtagcagagtatctacaaaaatccagcagcttctgaacactctgaaacgacccaaaaggcctcccttaaaggaattttttgtagatgactctgaagaaattgtggaaggtagtagtaaaaataccaaaaacatatattcattaaataaatttatcttaagcagttactgcgtgtcaggtactataggattaaagaatgaacaagacacaattcttggttcaaagagttcatcattctctgctcttttttccctaatgatcatctgtattttagatcttagatgaaaattaaggagggagggaggaagagggaagaaaggcaaagagataaccatgaaacatataactgtctttggaaataaactctttgaaattaggaactatcccaaatacatgattttatgagttatttatatttggcattttcttggatgtggatatcaaattcaacctcaaaagtttgcctactctttttttcatataatgtagtccttttgtgaatcaaccaatcgctacatatatttctgctttctacaagacggcgtgttcgatggtgaaaagtttcaaagatttataaaaatacagttatttccttcatgtttacagtttagacaggtgctaaaatatatccatgtgaatagctaagtattaaggatctatcagccaatataagcacttctgagaagggaagaaatcagttccatctgggttaggaaaggcttcacagaggaagttaacagtgatttattccttcagtaatttttaaattatggatgaaatcatatatctaggatttaatagggaaggggaatgggtgtgagtatggataaaatgagaatggccatttgataagtatagaatgatgacaatagatctagacaaatagatctacctaagaaaagcttttgttgaaagagctaagccttggtagctttgtagtctgtttttatgtcctgagactaatagtaataggttttgatcacatcagcttgttaatagaattaggtacattggtagactagatctggtcttagcccaatttatgccgcagaaagcaacctgacatatgaagttaagatgagtatatgtttctttaggaatcactaaactcattgaatggtggatgtctttcatgatgtactgatgttcaagatgcccatgccagcaaaagcctctccagtgtttctagcattggtattgaccaggcacgtgaaggtcagggtttaacaggaatcttacctgaaaaaattgcattggcagattagaactaacaactttccattaattaccaatataaatgggcagtagttgcttgtttgagtaattgttacacttggaaaagaaaaataccagtatgtctttggaaatctgaaagagcatgccccagaatctgcattgaagcctaatggacaatggtgataatgtcagctttcatggccagaaacaatgcctactctatacatagtctgtccaaacaaataaaatacttatttagaaaaaaaaaaaaaaaaa

SEQ ID NO: 7288 - DNA, 720 bp, Macaca Fascicularis
  misc_feature (1)...(720): n = A,T,C or G
agagattgagaagatacagtgggacacatggacctgtgtcctggggcccacctgtgagggaannnnnnnnnnnnnnnnnnnnntaactgacgtaaatgctgccagtcttaccaaagactgttcccttttagccactggagatgattttggttttgttaagcttttctcatatcccgtcaagcatcatgtcatcctctgctttcacaatcctgagttctaaatcatagaaaaaaagagagacggaaacaatcaaacgtcaactccgggaacctccccgtcaattcaattttacattccatttatttatttattttaactaaagagtgaatgaatgacagggttttgctctnnnnnnnnnnnnnnnnnnnnnnnnnnnnnnnnnnnnnnnnnnnnnnnnnnnncttctagactcaagcgatcaatccacgtcagcctccccagtagctgggattatgtgcataccaccatgcccaactattttttttactttttgtagagagggggtctcactgtattgcccaggctggtcccaaactcctggactcaaaaaatcctcccacctgggcctcccaaaatattggaattacaagcatgagccaccacacccagctgacattctgtttgttaatctacacattgtaannnnnnnnnnnnnnnnnacaaatatttaaatttacctccctgtacagccgtttatcctagtccaagaagacatcataa

SEQ ID NO: 7289 - DNA, 742 bp, Macaca Fascicularis
  misc_feature (1)...(742): n = A,T,C or G
cacnnnnnnnnnnnnnnactgggcagtgccctcaagccaggatncnnntagcaggggcctccccatcagactcagggaagggatgccccatcaaagtgacaaaaaggtggggtgtgggcaccatggcatgaggaagaaacaaggtccctgagcaggtgcaagtcctgacagtcaagggactgctttggcatccgagggcctccagtcacctcactgccacatattagaaatgagacaatcaaagcccccccggggtggcacacctatccgtctgctggggtggggcatccacatccaagactggagcagcaggctggccacactcgggccagagagagctcacagccgaagctcttggagggaagggctctcctcgnnnnnnnnnnnnnnnnnnnnnnnnnnnnnnngaccaggggccaggagcatggtgaagccaagtggcagacgggagctaacctggatgggggtttggggaaggagggtgtgtgtagcagagaacttatgggggcctccttgcctttctcattcttttgccctgcatcctgtcatttctgttcttgtccctcatacatcctgggagaaccgggctccagactttgttccctgnnnnnnnnnnnnnnnttgttaggttagggttagatggggagagacagggcacagaggacctgtctccctggctactctcaccttatggctctagtgtgtgacctacagagcatgctccacaagcccctgcctcacc

SEQ ID NO: 7290 - DNA, 1323 bp, Macaca Fascicularis
  misc_feature (1)...(1323): n = A,T,C or G
ctaaaatacnnnnnnagccaggtgtggtgcatnnnnnnnnnnnnnnnnnnnnnnnagggtgaggcacaagaatcnnnnnnnnnnnnnnnnnnnnnnnngcnnnnnnnnnnnnnnnnnnnnnnnnnnnntctcaaaacaaacaaacatgccgcacaggacagtaccttaannnnnnnnnnnnnnnnnngagagggcctcttcttgcctgggctgtgctccccagagctgatctaattctgtatcgagatgctgctcccatggtcttgccacgcgcttgaagctctgggagccttcttaccgttcagactggggcgtggttttcagaaccactcggttgactactgaaaaccaagtgagccttacagctcttatcgctgggtaaagtgatcttgcctggtgcctcttggtcttagctcaattttccaggttgtcctggccaggccttgctgtgttacgctcagtgcctctttccactctttccccgccagcccctccctccnnnnnnnnnnnnnnnnnnnnnnnnnnnnnnnnnnnnnnnnnnnnnnnnnnnnnnnnnnnnnnnnnnnnnnnnnnnnnnnnnnccctttctgtgtcccattgtcctagttatgttctgttgtttgtgtaatgcccaaatttttctgctcgtgtggccttgaaaagtaggccagcctcagagactgctgagctgaaaatggaactgagtaatcaggtgagctggaagggatgtgggggcggggcagaggagagacatgggttttgaaggcagtgaacaataaaaccttagggaggtggcaccgaggccttagcgtatgaggagctgaaatgtttcggtgttgttttcttaccagccacaagcannnnnnnnnnnnnnnnnnnnnnnagcatagagtnnnnnnnnnnnnnnnnnnnnnnnnnnnnnnnnnggcaggggctggcctttctgtacccagaggtcaagcannnnnnnnnnnnnnnnnnnnttggttggtgctgatgccaaaaatacagaaggtgcttgctagcttttccttggtacatttttgggggttgccagtcaacaacttttctttagaaaaatgggtaaagtaggctgggcgcggtggctcaagcctgtaatcctagcactttgggaggccgagacgggcggatcacgaggtcagnnnnnnnnnnnnnnnnnnnnnnnnnnnnnnnnnnnnnnnnnnnnnnnnnnnnnnnnnnnnnnnnnnnnnnnnnnnnnnnnnnnnnnnnnnnnnnnnnnnnnnnnnnnnnnnnnnnnnnnnnnnnnnnnnnnnnnnnnnnnnnnnnnnnnnnnnnnnntga

SEQ ID NO: 7291 - DNA, 745 bp, Macaca Fascicularis
  misc_feature (1)...(745): n = A,T,C or G
acagaactgtactgttttnattnnnnnnttgagcacatgttaaactaagcttcatattagagtgatgtcataatgtaaaatgtttgcattgtgnnnnnnnnnnnnnnnnnnnnnnnnnnnnnnnnnnnnnnnnnnnnnnnnnnnnnnnnnnttagactttaccacagaaatattggaacnnnnnnnnnnataagattaaaaagtatccttcagaatggagcttgccttgtgcttagaaataatatgttgaactattttgcaatatactattttaaatctaaattctgtcacttcgctgcctttttaaaatagtgtggtgtttcaaatattgctagagctattttcctgaaatacatttgcaaaataannnnnnnnnnnnnnnnnnnnnnnnnnnnattgattgaaggaaatgactgtactgcgattcaaaagtaaacttattttattatacagattatttcttaaaaactctatttataccttaacatgaaatccatgaccacaccaaacttggttattcatgatttttcctgttaaatataaaacactataagttaaaaacagtaatgccaacgttgaatttatttttgaggtcaaagaaccagttttctttatatttagatgaggattattaagtccatataacatgtatgtttacatatattatacatgcaaattaggtgttttcatttgtgttttgcttatgaaatgtcactttaaagttcaattctngagcatcaataaa

SEQ ID NO: 7292 - DNA, 1680 bp, Macaca Fascicularis
agaggaagggtgccccgggcaggagaagcagcttgaacaaaggcaggaccatgcaagccaaatccaaggagttgctgcaggtcatttaatttggctgcagcaaggagttcctcatgtgggggacttttcagaaatgatcctggtggaagcacagttcaattcctaaagggccttggatgtaacagcaaggagtttggattctttcctgagggtgatagcagtgaaataatacaaaatgggatttttactcagattagtagattagaagggaaagattccagatctcaagtaatgaggaactgcaatgatccacctgagtgctgaccagcggcctgaattaaggctacagccttgcgaatggactcaagattgtgaaaatagagaacagcggcaccaggaaaccagtctgaggtcacagagtgggagaagttgttttccctgcatttttaatctgtgtaaattatctaagacccctagagaacatgggaaagaaatactgggagcaacactggtggactcgtgaatgcttaagacctagtgctggtggtaggtcacaccagaatctggaattgtatttctttccccataattcaatcatgctattcaaatgttcctgacatagtctagccagggctcgccaagaatagtttgaggcctctgcaagggctgatcggctcaagaccttatatgggattttcgttgctggcaacatagtcaggccctgggcccccttaagaacaccaggctgtttaattatattggcttcttcctctggcactgacactgagtttaataattctacctcagtagagcccctgctgagaaacatacacacgcacttacactcatacttttgttcgctcccaattgtatagagaggcaaaaatcaaagtggagctattaaaaatgaccatgcagcacaagtatgttgtaacatttttcagtgttataactgctgattatccaaaacttttcctctcattattacagtgtccgttggttgaaaggaaaaacatttctgctgtgatgctcctgagctatttcttcatttatgttaattaaatatttgtttatacttatgattaagccctaattaccaactagacatctgatgtttccaaatactgaaccttatatggtcttctataagtaactagcttataattatcacaaacttttgtgatattacaagaagaatgaggaaataaatgagtaagtatattaggagaaggataagaaacaggtttcattatgaacaaagatttagagattaaaataatgataacctcactcaatctctttgtcaattattaggagcaaagttggaggaaaacttgtctacactccatgtggttcttttcttcccaagacactcttggctcagccaaggcaatgcagaagctgccaagtatatgtggagtctgtcatagttaagggatgtaagtatggatccagagattctctgcaacagaaagactgttcttgacaatcactgcataatagtaaagatgcagtctgtgacattgctgtacctaagtgttttgaatgtttcatattcacatttacattagagaattgttatcccagttaaaaataatatatcagggtctaaaatttacaaataaattaaatttatatggtgttcaaccaaaaaaaaaaaaaaaaaaaaaaaaaaaaaaa

SEQ ID NO: 7293 - DNA, 720 bp, Macaca Fascicularis
  misc_feature (1)...(720): n = A,T,C or G
gcatttcaatgcattgnnnnnnncaatagtgaaaaaagcatttgctgttattcacatatcaaacacatgnnnnnnnnnnnnnnnnnnnnnnnnntggttnnnnnnnnnnnnactcctttgtgtccattaaaaccattttcctcatatctaaagtgaatcttggtatctgtgatttatgtttaatacagagatgggaaacagtgagtaatctaatactagtcaagttacatgtattcttaaaaaaannnnnnnnnnnnnnnttagggtgatggaaattatactcaaatctgaaattgtaataaggctcctttctgaaatttaatgacccattcattttttttaggtttagcttaatgtttttcctctttgtaataccaannnnnnnnnnnnttaataacaaatggtaactatataagattgcattaaatagtcttgggctattttttggtgagctctttgatttggtaactacattccaaaagttaattctcagttacgtgagtttaaatggcatccatagctgccccttcacacaaacaggtgttcaataatagggcttattagaaagaccctggagaccaagaaacttcagttctagtcctcaatatagaagtagctaacaattttggataagtcatttaacttctagtctttggtttccatatttataaaatggagaccatatcctatctactttaataagnnnnattaaaatgttta

SEQ ID NO: 7294 - DNA, 665 bp, Macaca Fascicularis
  misc_feature (1)...(665): n = A,T,C or G
agattactttagtgnngattcttaggcagttttgtaaccctttatcctcaatagccttcattttgtttttaagattttgcttttgttgttgttgaaaaagggtttcactctgtcacccaggctgtagtgcagtgacacaattacagctgattgtagcctcgacctttccagctcaagtgatcctcctgcctcagcctcccaagtagttgggaccacaggtgtgcatgccatacccggataatttttttaaaaattttttgtggaggtgggggtctccctatgttgcccaggcagatctcannnnnnnnnnnnnnnnnnnnnnnnnnnnnnnnnnnnnnnnnnnnnnnnnnnnnnnnnnnnnnnnnnnntgtgcctggcctttcttttttttaacctttttatttaacttctctcttcactgcatcccagtccatctacagaaagcaggtttgaggtaaaaacaaagaccttcactatattttgctttgacaaaaggaaagaggaagaatttctattaaaatctatcacttgagtgatgtcatttaagtcctgttttaggagataaaaatagcttttgggactggttaaagtcccccagaaactataatacagttaagaacaacttttgttttaactcttatcactttgtaattttgactcaatcc

SEQ ID NO: 7295 - DNA, 741 bp, Macaca Fascicularis
  misc_feature (1)...(741): n = A,T,C or G
tagctgtgccggaggttcaagcgcctgggctgcaggaactagtaggggcgcgcgatctgtagtggcctccgtcttccttgtacctcaggacgcagaaacccgccccgctttcctccagacctcaccgcccgaaagaccnnccaagaccctctnnaggcgccnnnnnnnnnnnnnnnntcgcagctctacagnnnnnnnnnnnnnnnnnnnnnnnnnntcaggacggctcccgagagaggtgagagcagcccctaaaactcaagcaggaaaggcgtttcttcctaagcggggttgggagtgccgcgcgctgccagcagatggcgacagaggatgagcctgcnnnnnnnnnnnnnnnggaaggcggagccgaggcgagnnnnnnnnnnnnnnnnnnnnnnnnnnnnnnnnnnnnnnnnnnnnnnncccagtcctcagttctctaggnnnnnnnnnnnnnnnnnnnnnnnnnnnnntttccccgactgagtgttggggaagctggagtggttagtgggggtgtcaagttgggaagctgaacgttcacttccttgtgctcctctgagaaccatctgttggtctaaagnnnnnnnnnnnnnnnnnnnnnnnnnncttggggccatctcaagggctaacaagatctcnnnnnnnnnnntctctgtcccttgtggtatcctggattattgtgaaaatgtatagggattcctggggaaggcataaggattaaaatataaaatatatagg

SEQ ID NO: 7296 - DNA, 1692 bp, Macaca Fascicularis
  misc_feature (1)...(1692): n = A,T,C or G
ttgtggcagcatgacgtgttctgcaactgtgagtagttcttgggtatgtgggagggtggcgtgagatgagcgtgggcagaggcactctttagtcatgcgccatgttaagatgcttaggtgccattctgctttatcatgtgtttactttttagaaggattacccaggtgacagtgtggaggagtagtagaaggaacaggaatggcagctgggaaggcaggaagttactgtaacagtttggttcagcttataagggcctgaaatgggacagtgttgtggcaagcatccaggggtaaagtggaagatggggcatggaataaattgtctcctcctctggcacacagctcctccaaccctcatagtctctgaagtgctaagtacctttttgtatgctagtgagatgactggtggctggggctcctggatagcctctggatggggggctggttgccaagggaaccaaccatgtgattagaggttggaactttcagcccacccctgaaaggaggggagaagggctggagattgacttaatcatcaatggccaatggttttatcagtcatgcctatggaatgaaggctccctagaaatccctgatctgcggggtagggtttggagagctgctggttggtgagcatgtggaggtgccggggctttggggagtggtgctcgcctagagggcacagaagctcctcaccccttccccataccttggcctatgcatctcttccatctggttgctgttcctgagttgtatcctttatcataaatgaataaacttaaagtgtttccttgagttctgtgagccattctggaaaataattgaacctcgcggtcatgggaacctatgatttatagctcctctatcagaagcatctgaagaggggcagtctcatgggactgagcctgagcccttgatctgtgtggtctgacctatctccaggtagatggtatcagaactacatcgaaatacacagcatcaattggtgtcctgagttagagaattggttggtatgggaaaaacacccagacatccgatgtcagaagtaaactattgagagtggtgttagcatagagaaaaataggttgtttttctcctatatactcttgcagttattttccttgcaatgatgattgcaaccctttctcatattagacaaaattatttcccctacatttcttatgtgttttgctattctctttctatcctacattcttctacaagccagactctgatcagggtactacaccatgaaaattaatgcagtgtctggggcatggactggtagactagaggaatgacctggaaatatcttgtcttcatttcagcaaatgatatgatttggatctgtgtccccacccaactctcatgttaaatagtaatcctgcggccggggacgnnnnnnnnnnnnnnnnnnnnnnnnnnnnnnnnnnnnnnnnnnnnnnnnnnnnnnnnnnnnnnnnnnnnnnnnnnnnnnnnnnnnnnnnnnnnnnnnnnnnnnnnnnnnnnnnnnnnnnnnnnnnnnnnnnnnnnnnnnnnnnnnnnnnnnnnnnnnnnnnnnnnnnnnnnnnnnnnnnnnnnnnnnnnnnnnnnnnnnnnnnnnnnnnnnnnnnnnnnnnnnnnnnnnnnnnnnnnnnnnnnnnnnnnnnnnnnnnnnnnnnnnnnnnnnaaaaaaaaaaaaaaaaaaaaaaa

SEQ ID NO: 7297 - DNA, 714 bp, Macaca Fascicularis
  misc_feature (1)...(714): n = A,T,C or G
gcagcttcctcctcaccnnnnnnnnnnnnnnncgcagccctgacatcccccaggactgggtctcttttttgagatcttttggccagctgaccctgtgtcccaggaatgggacagtcacagggaagtggcgagggtctcacgtcgtgggcttactgaccaccttgaacttcggagacagtccagacaggaacannnnnnnnnnnnnnnnnnnnnnggtcttgggtagtcagatgggattgaaaggatcttctgcaggacaactggtccttatcacagccagggtgaccacagaaaggactgcaggaacctgcctgtattttagtgctgttccaggaatcctaccctccagtcagccacccatatcctgctcagaggagggggctggaaatgccaccctgagccctagaatgggtgaggagtgcgttagtgtctggagccacgaagacctctctcccaccaagaagttgagctcgggcgcgttggcttctgtgtggctccaggctgctggtcttgggctccttcctgcttctcttctgtggccttctctgctgtgtcactgctatgtgcttccacccgcgccgggagtcccactggtctagaacccggctctgagggcactggcctagttcccgacttgtttctcaggtgtgaatcaacttcttgggccttggctctgagttggaaaaggttttagaaaaagcgaagagctggaat

SEQ ID NO: 7298 - DNA, 536 bp, Macaca Fascicularis
cccctcaccacctccaccaccaccaccaccaccacccccaccgccaccacccccgccacgcttgctgaggctgctgccgccggtgcctgtggacagcagctgcccctgccctgccatccattcccaggacaagtggaccccatgtttccatgtggaaggatgcgtctctggggtgaatgaggggaacaatggcctggggcttgctctggcggcatttgcatgctatgccccagtgtactacggccgcagagaactgaagaacactggggcctgaagtgctgaagggtttggggagtggagagtaagggtgctcttctggggctggacagcccaccttgtgactgtaactaccagtgagccccagaagtgacaagggtgtcttggcagagccagcacacaagtggatgtgaagtgcccgtcttgacctcctcatcaggccgctgaaaggcctctggcgggcggggcactaggagaggccctgagaatgtccttttggtttggagaaggcagtacgaggctgcacggtcaattcatcg

SEQ ID NO: 7299 - DNA, 734 bp, Macaca Fascicularis
  misc_feature (1)...(734): n = A,T,C or G
gctggaagcccannnnnnnnnnnnnnnnncccagcggggcaggctaggagtgttgtggtctatgggtttgtgtcctggagaatgttcaagaatgtcttcttggctgctttggtgctgagctctgttatctcacagcacgtcctgaaggctaacccaggtggggaggatgctgacaccagcnnnnnnnnnnnnnnnnnagaaatctgtcttaacttggagatgcaggggcaacctgtgaccctttgaggcaagagnnnnnnnnnnnnnnnnnnnnnnnnnnnnnnnnnnnnnnnnnnnnnnnnnnnnnnnnnnnnnnnnnnttcagggccagttcagtgccctgtaagggcccttcagcctcctgtcctctgtgcggctgggcgccagcaccagggagtttctatggcaaccttagtgattattaaggaacattgtcagttttatgaacatatgctcaaatgaaattctactttaggaggaaaggattggaacagcatgtcgcaaggctgttaattaacagagagaccttattggatggagatcacatctgttaaatagaatacctcaactctacgttgttttcttggagataaataatagtttcaagtttttgtttgtttgttttacctaattacctgaaagcaaataccaaaggctgatgtctgtatatgggnnnnnnnnnnnnnnnnnnnnnnngtgtttctttttcttttacaagctattttgcatttaaa

SEQ ID NO: 7300 - DNA, 726 bp, Macaca Fascicularis
  misc_feature (1)...(726): n = A,T,C or G
cannntggtgnnngctctgtgaacggtttctatccaggcagcattgaagtcaggtggttccgcaacggccaggaagagaaggctggggtggtgtccacaggcctgatccagaatggagactgnnnnnnnnnnnnnnnnnnnnnnnnnnnnacagttcctcggagtggagaggtnnnnnnnnnnnnnnnnnnnnnnnnnnnnnngacgagccctctcnnnnnnnnnnnnnnnnnnnnnnnnnnnnnnnnnnnnnnnnnnnnnctgagtggagtcgggggctttgtgctgggcctgctcttccttggggccgggctgttcatctacttcaggaatcagaaaggacactctggacttcagccaacagaaaacgcctgtgctctgcgggattattggctgtgggagactcaggaacttgtttttcttcttnnnnnnnnnnnnnnnnnnnnnnnnnnnnnnnnnnnnnnnnnnnnnnnnnnnnnnnnnnnnnnnnnnnnnnnnnnnnnnnnnnnnnnnnntttcccgcctgnnnnnnnnnnnnnnnnnngagagggctttctcaggacctgnnnnnnnnnnnnnnnnnnnnnnnnnnnnnnnnnnnnnnnnnnnnnnnnnnnnnnnnnnnnnnnnnnnnnnnnnnnnnnnnnnnnnnnnnnnnnnnnnnnnnnnnnnttttgtgctcccctttacctaaaccctgtggcctcccgtgcatctgcacccccc

SEQ ID NO: 7301 - DNA, 692 bp, Macaca Fascicularis
  misc_feature (1)...(692): n = A,T,C or G
tatatattgctgtgtattgtgtgtatgtnnnnnnnnnnnnnnnagtgtgttcatctgcagcccttgcgtgaggataaggtttaggattgggtaaagatcagaataccagggccagctaaggcaacgattccctccccaaccccttgggacctcagccagtcccaaggnnnnnnnnnnnnnnnnnnnngctccccaccatgagactaagcctcctctgccannnnnnnnnnnnnncaagggaggcttggccttgggcnnnnnnnnnnnnnnnnnnncctggcaagggtcttgtatccagggcagaggcctgaggtgacccaggcttgccttgtggctnnnnnnnnnnnnnnnnnnnnnagtgggcaccactggtgggtgacctccataactggcccttaggccctgccttcctgcacagctaggctataatgggcctgagcgtgagagggtagcttccccagccccaagcacaggcagaggggtggaaagcaatttttggttttatttttgtttctgaagtggtgcctgtacctccagcccccagggggcctttcctggccacacttctctgccccacccaggcatcgccatcccagcactttgctccatgtcacccataagatgccctttgctgaatgtacctgagtgtatgtatttaaaaggactcacatgggcatcagagcaatttatgg

SEQ ID NO: 7302 - DNA, 842 bp, Macaca Fascicularis
  misc_feature (1)...(842): n = A,T,C or G
gcaggaaccaggagtnntgagcacactggacacacctcagagggaggatccttgttctggattttgtacctggcttcagggcagggatgaagtgaccaggcttagcttgtggagtttgtgggccaccagggcttggggaaattgccatcctgtggatgctctgacctcccttctacagagacgtaggcagtgccactagggaggaggggacctgcaaagctagaatctagggcactgtttgctccccatcctcctctttgtagagaatagagatgtttgtcttgtctgtcttcaacctacttttccttttctctttttcgtttctcatcctctctgtgctgcctctccacccaggaggccatgtagcatagtggaaaaagtccctaagggcggttacgagttctgggtgaccatcctggctcagctcctaactcaccatgtgacatcaggctatccctgttccccctcttgggcctcagtttcccgacttgcaaaataagcagaaagaaccagatgctctccagggtctttttctactctgccatctcatggatcttcattttctcttgttttgttttctctggatcttttccatctgagggtacaggaagtgccaggacctgtttcagtttttgaatcctgcaagcacattccaagactggcctgaaattgcatgagcaacatcactcgaaataattttttttttccaaaagcaccttaacaaccaattgcgatgctgtcctgttcctttttactcacacccttctctcctctctcgtccccatgctcccccacatcagtgctccgtgctgtatgcgtgtgctctctgttcttgtatactc

SEQ ID NO: 7303 - DNA, 735 bp, Macaca Fascicularis
  misc_feature (1)...(735): n = A,T,C or G
gtcacgagggtcaaggcggccccgggnnncaaggcagccctggccgnnnnnnnnnnnnnnnnnnnnnnnnnnnnnnnnnnnnnnnnnnnnnnnnnnttccacctgctgtgcttgctccggcgctggctgccgcgcccgcgggcctggtttnnnnnnnnnnnnnnnnnnnnnnnnnnnnnnnnnnnnnnnnnnnnnnctgggggtgccccttaacgtcccagacgggaacgctcctctctcnnnnnnnnnnnnnnnnnnnnnnnnnnnnnnnnacacccctgagagggtggccatagcccaagatgaagtcatcaagacagaaaagcaaaaccgagaaaaacgacgggnnnnnnnnnnnnnnnacagctttggaggtgcaggtgccccttgttaggtgcctttgtccgggacctgcaaagcctcacctgtttggcctttattgatgacatgactgcttccattttgcagatgaggaaannnnnnnnnnnnnnnnnnnnnnnncccttgagccacccatggacccctctccatctcctgtctgtgtttctaagtccctgatttattttttccactcattgcatctgggattatctcccccaacccctgccagcttcccccagctggggtctctggtactcttcacacctgcagggacgtctacactgttcgtctagctggtggcagggtctgagggggaggaggagggaaagagtgtgttnnggctggacccagcct

SEQ ID NO: 7304 - DNA, 1924 bp, Macaca Fascicularis
tgctgggccaacaaattactccaatccagtatatgcaaaattatatatggatgggcaaaactgtcgaaactccttaggaagtgttgatgaaaggaaagaactgcttccaaagaaaatagaaattggtataagagagacagtggcataatcagtgataccttttatatgctgtataaatgtataaaatataaggattacttttgtatgttccaatagttattatacttgttttggcatcagcattacctctttctttatctttttcctggttaattgttttctgagtttttgggtttatgttttgctgatgactattgattgaccatttgtatggtatttttatgaaaaagaactgcactacagtacaatttacaacaatgctgctgatatgacacacctttgaatttgtcaaaattaaaaacaacatattcctttgtagtgtgaatataagcaatctattttatatgaacttttttggttgtacttaatcaaagagaatctctgcacttttccattatatggtttgaaagctgtaatacagtgtcattttatttttctctttaaatggattgatgggaaaattattgaatgatcaactctcttctttgtgcccataaagattgattcagactctgctgaaaatatatagctctcacaagttcagcatcacctgctttgaaattagccttagattgccaaccaatagatgagaattttgaggaaaaaatttaaaaatatgtaaaattaataatttgcatgaacacagatgactccattttccaaaacgtagtggactctatctgacgtactaaatgtatacaccttgtaagcaatagttatatttaggtggtagaacatagcaaaaatataactcaaagttggcagatgcacttgctactgaataagaccttttgttctccctcagtcttgagattgatagccaccctagagcacaacagcgcattgggtacttgtgtcttaggtatttcttcccagtcacatgcattttgtggaagattaacccaaccccttactacactaaacagtaaagaataatacataagcacacaaattgatgacagaatttcaattatgtgaatgcatcctctttgctaggtcaaaaacaaagggcaaagcagacattttagtacacatagtgattggtaaatattttcaagatataatatgagtaatccattattcgctctatccaaaatatattcaagaggcttccaagttgtagaagaacaatgatctgcccataatcgaaggtggagagtctaaatgctgtaccagttgctctggtattcaggtttccttgggttttacagaacacatggaccccattcacatttggtttgtttatcttcaaatttgagttgaaacaagtgtgatttatttaagttgtattaaaaaaaaggatagcatttttatacaaatatctttaaaggcacaaaagatttattcacaagttttggagggctttttgttcctccgatagacatgactgacttttagctgtcataatgtattaacctaacagatgaaatatgttaaatatgtggttgctctttatccctttgtacaagcattaaaaaaactgctgttttataagaagactttttgttgtactatgtgcatgcatactacctatttctaaactttgccatattgaggcctttataaactattgatttatgtaatactagtgcaattttgcttgaacaatgttatgcatatcataaactttttcaggttcttgtttaagtacattttttaaattgaacagtatttttcattttggttataatatagtcattttgcctatgtttctacaatgaagtgttaaatactttaaaaaaaaaaaaaaaaaaaaaaaaaaaaaaaaaaaaaaaaaaaaaaaaaaaaaaaaaaaaaaaaaaaa

SEQ ID NO: 7305 - DNA, 3108 bp, Macaca Fascicularis
agcgcaggctgtcctcggaggggtgggaggaggagaagagcagagggtgccccgataacttctgcccacatctcattggccagaaccaggtcacatcacagggccacctctagctacaggaggatctgggaagctgagcaattcaaaccaggcacactgctgaccccacacaactggggttctgccgtatagaagaggagactggatctttggagacattctgtctccagacagccagagacgctccagaatggaggtcctgagggagaaggtggaggaggaggaggaggcagagcgggaggaggcggccaagcgggctgaatgggcgaggacggagaaaatgatgaggccagttgaggtgcggaaggaggaaaccaccttgacacaggagatgctcagagacctggagaagaagctgtcggagatccagatccccatctcagcggagctcccggcctttaccaaggacactattgacatctccaagctgcctgtttcctacaaaaccaacacacccaaggaggaacacttgctgcaggtggcagacaacttttcccgccagtacagccatctgtgcccggatcgcgtgcccctcttcctgcaccccctgaacgagtgcgaagtgcctaagttcgtgagcacaaccctccggcccacactgatgccctaccctgagctctacaactgggacagctgtgcccagtttgtctctgacttcctcaccatggtgcccctgcctgaccccctcaagccgccctcgcacctgtactcctcgaccactgtgctcaactaccagaaggggaactgctttgacttcagcacgatgctctgctccatgctcattggctccggctatgatgcttactgcgtcaacggctacggctcgctggacctgtgccacatggacctgacgcgggaggtgtgcccactcactgtgaagcccaaggagaccgtccagaaggaggaaaaggttctgcctaagaaatacaccatcagaccccccagggacctgtgcagcaggtttgagcaggagcaagaggtaaagaagcagcaggagatcagagcccaggagaagaagcagctgagggaggaggaggagcgcctcatggaggcggagaaggcaaagccggatgccctgcatggcctgcgggtgcactcctgggtccttgtgctatcggggaagcgcgaggtgcctgagaacctcttcattgatgcattcacaggacatagctacagcacccaggacgagcgcttcctgggcatcgaaagcctctggaaccacaagaactactggatcaacatgcaggattgctggaactgctgcaaggacttgatctttgacctgggtgaccctgtgaggtgggagtacatgctcctggggactgataagtctcagctgtccctgactgaagaagatgacagtgggataaacgatgaggatgatgtggaaaatctgggcaaggaggatgaggataagagcttcgacatgccccactcgtgggtggaacagattgagatctccccggaagcatttgagacccgctgcccgaacgggaagaaggtgattcagtacaagagggcaaagctggagaagtgggccccgtacctcaacagcaacggccttgtgagccgcctcaccacctacgaggacctggagtgtaccaatattttggagataaaggagtggtaccagaaccgggaggacatgctggagctgaaacacataaacaagaccacagacctgaagatagactacttcaaacctggccacccccaggctctgcgcgtgcactcgtacaagtccatgcaacctgagatggaccgtgtcattgagttttatgaaacggcccgtgtggatggcctgataaagcgggaggagacagccaggacaatgacagagtactatcaaggacgcccagacttcctttcctaccgccacgccaacttccgaccccgagtcaagaagctcgctctgagcagtgcagagtcaaacccccggcccattgtgaaaatcacagagcagttcttccgcaacccagcgaagcccgcagaggaggacgtggcagagcgcgtgtttctgctggcggaggagcgcatccagctgcgctaccactgccgcgacgaccacatcacagcctccaagcgcgagttcctgcggcgcaccgaggtggacagcaaaggcaacaagatcatcatgacgcccgacatgtgcatcagcttcgaggtggagcccatggagcacaccaagaagctgctctaccagtacgaggccatgatgcacctgaagagggaggagaagctgtccagacatcaggtctgggagtcagagctggaggtgctggagatcctgaagcttcgagaggaagaggaggcggcgcacacgctgaccatctccatctatgacaccaagcggaatgagaagagcaaggaatatcgggaggccatggagcgcgtgatgcatgaagagcacctgcggcaggtggagacccagctggactacctggccccattcctggcccagctcccgccaggagagaaactaacacgctggcaggcggtgcgcctcaaggatgagtgcctcagtgacttcaagcagcggctcatcaacaaggccaacctcatccaggcccgctttgagaaggagacccaggagctgcaaaagaagcagcagtggtaccaggagaaccaggtgacgctgacacctgaggatgaagacctgtacctgagttactgctctcaggccatgttccgcattcgcatcctggagcagcgcctcaatcgacacaaggaattggccccactgaagtacctggctctggaggaaaagctctacaaggacccacgcctgggggagctccagaaaatattcgcttgatgtctctcctggggcctcagccagaactgccagagaaaggaaacctcttccctggagcctggctcctgtgttccctctacccagccaatgcctgtttacacagacacctggcctcactgccagcccacctctcctacagccctgtttgttcctgcttctcttgattttcctgtaaatagacacactcttaattggccatttgtgaatagaaattaaaaaaaaaaaaaaaaaaa

SEQ ID NO: 7306 - DNA, 677 bp, Macaca Fascicularis
tacccagaccagtttccctatatagactcttggctcaatgtggtgcaagtgactatagccctgcctagagggatattgcaaggcattagtggctcaggcagcccaaccaaagtaagcagagaaacctaaagctcctaatgtcttctaggaaaagaaatccctgaagcctcagctgaaaccagttcttcaggtcccacctgaggaaagggaatgtacaccaccatatgtgccagtctacccatctttggccagaataaggcaggaggcagagtcaggagtgtctggagagccaggcttggaggaaagtgagcctcagtctcccccacccagataaaaggaatcccccattagaaaagaaacagggaagatggacagggcgaggcagctgggtgcctccactcaggcctaacacaggctttgcagatgccacttcaagagaccaggacacaagtttatgatgaccaggggcagatacaaggcagctctaggctttatgttcatcaggctttctccactactgatttcttcaattggaaacagcacaccccctcctatacagaaaagcctcaggctctcattgatttggtgaattctattattatgacacataacccaaccctgccggactgtcaacagcttttgctaactttatttaatacagagaagcatatgagagt

SEQ ID NO: 7307 - DNA, 744 bp, Macaca Fascicularis
  misc_feature (1)...(744): n = A,T,C or G
taattttatnnnnntgaaggtttggaatatataaagtaatggattcacaaaatatgatatcttaaaacatgttgaaagatttgaaagtggtacatttttacttttaagagcaacaatttttgaaattagtcaacgatgcagtcttttttaaaagtcagttttctcaagtagtatgttgtaatgtaactgatataactagattttgactggtaaactttaagtgcttttacatttgaggttgactttaaaaagccactgagcagtcctcagaggttatggactctcaagcgactaatggaatagtgttctgttgtgaagtctagaactaaagcaccttgtattgtctgcttctaaagtgtcctatagttttaaacttaaagttatggcaattaaagttacatttttcatttgttggtgtacatgtgctacctgttttacggggaatgtttaacatgatcctccaagttggttctatgcataaccattcaccaannnnnnnnnnnnnnnttccttgaaggaaatattctgtgctnnnnnnnnnnnnnnnnnnnnnnnnnnnnnnnnnnataggtttataaagaattagaattatgtgttttaatagtacctttgtgtatataacaagatgtaaaattaaagatgaggaatgtatgtaaatgatcattcactgtttttgttttaaaactggtcagtactataaagcttctgtggtttgtatgatgttttaactttcactttaaacta

SEQ ID NO: 7308 - DNA, 721 bp, Macaca Fascicularis
  misc_feature (1)...(721): n = A,T,C or G
catctttttggagacgggctggagataagatggnnnnnnnnnnactttccttttacacatccttcctttgagatggagatcaactttcatggagaatggctnnnnnnnnnnnnnnnnnnnnnnnnnnnnnnnnnnnnnnnnnnnnnnnnnnnnnnnnnnnnnnnnnnnnnnnnnnnnnnnnnnnnnnnnntagaaaggctagccatgatcctttacgacatccctgatatnnnnnnnnnnnnnnnnnnnnacgagcnnnnnnnnnnnnnnntccgtgtatccaacatgaatcagaaggtgnnnnnnnnnnnnnnnnnnaaatatcctcctatgataaatgatatttcattnnnnnnnnnnnnnnnnnnnnnnnnnnnnnnnnnnnnnnnnnnnnnnnnnnnnacgattggaggagacctggtggaaaaggttgatctcatagacaagtttgagcatccaaagacgcacaagaccagccactgctaccgcatcacctaccgccacatggnnnnnnnnnnnnnnnnnngagaggtcaggcacatccaccaggccttgcaggnnnnnnnnnnnnnncggttgggcgtggagggcaggttcnnnnnnnnnnnnnnnnnnnnnnnnnnnnnnnnnnnggggttccaggannnnnnnnaagagaaaaagatatggnnnnnnnnnnnnnnnnnnnnnnnncttttgataaatggatcagtcttaggac

SEQ ID NO: 7309 - DNA, 755 bp, Macaca Fascicularis
  misc_feature (1)...(755): n = A,T,C or G
cagagacaanganntnnntnnncagagnnnnnnnnnnnnnnnnnnnnnnnnnnnnnnnnnnnnnnnnnnnnnnnnnnnnngtcccataagcgtgacacaatatgacccagatggatgctacacacacagtgggtttgtatcacagctagggggcactgagcttagataattcattgcttttataataatgagttagcaaatctgctctttgtttcagattgagatattatcttttttctnnnnnnnnnnnnnnnaaacataatcctgagaaatggctcaggaaaaaaggcatcaggacgtnnnnnnnnnnnnnnnnnnnnnnnnnnnnnnnnnnnnnnagagacccatgaatgactgtctctccaaacataccttgtggtggttttgtcctcacgttgactttctccattggcnnnnnnnnnnnnnnnnnnnnnnnggggccttgccttgacannnnnnnnnnnnnnnnnnnnnnnnnnnnnnnnnnnnnnnnnnnnnnnnnnnnnnnnnnnnnnnnnnnnnnnnnnnnnnnnnnnnnnnnnnnntgtatccatctctgtgttaaggaggaagaattactctgattgccttagnnnnnnnnnnnnnnnngggtggaaggatcaattatacctaaaccaatagctactaagcaatgggaaatagaatgttagggannnnnnnnnnnnnnnnnnnnnnnnnnnnntaagnnnnnnnnnnnaggaattttggtctatttaaaatgttccaagtctaac

SEQ ID NO: 7310 - DNA, 721 bp, Macaca Fascicularis
  misc_feature (1)...(721): n = A,T,C or G
aaataacaagaatatcaataattaacatgtattgaccacttactatgtgctgagcacggtattaaaccctttttgtgcgttggtctcccgataactctacagggtagccaatattaaccttcgctatctaccgatgaggaaaccaggtcatcgggtactcaagnnnnnnnnnnnnnnnnnnnnnnnnnnnnnnnnnnnnnnnnntctgcgctgtaacagagaggcatctggagaggatcggagtgcggctgaacccagctgcctggattggaacacctaggctctgccactaccttgggcatgccacttaccacccgagcctgttttttcatctgtaaaatgaagttgctaacaaaacttgtctcgnnnnnnnnnnnnnnnnnnnnnnnnnnnnnnttcaaagtgctcttactggtattaacnnnnnnnnnnnnnnnnnnnnnnnnnnnnnnagctgnnnnnnnnnnnnnnnnnnnnnnnnnnnnnnnnnnnnnnnnnnnnnnnnnnnnnnnnnnnnnnnnnnnnnnnnnnnnnnnnnnnnnnnnnnnnnnnnnnnnnnnnnnnnnnnnnnnnnnnnnnnnnnnnnnnnnnnnnnnnnnnnnnnnnnnnnnnnnnnnnnnnnnnnnnnnnnnnnnnnnnnnnnnnnnnnnnnnnnnnnnnnnnnnnnnnnnnnnnnnnnnnnnnnnnnnnnnnnnnnnnnnnnnnnnnccnnnnncaaaaa

SEQ ID NO: 7311 - DNA, 723 bp, Macaca Fascicularis
  misc_feature (1)...(723): n = A,T,C or G
agaatatggaaaagattgtcatnnaagcaagacatatcttgcatatgnnnnctagaagcggaagtgaaagcaccaagtccttaacatgttagttttctaggggcctaannnnnnnnnnnnnnnngattgccacgaagcctaattcttcacagggcaacctggcatactgccatttccacactgggctgtttgttggtacttgtgaatagaacaaaaaacgtctttgctttttctcctcagttatcaatgattatagtttttggaaacaagttaacatttttctcaaaatgatggtaattcacatcaagatgaagtcaaacttcatgatatctaagccgtaagtaatagagttagttcagtatttaaaaaactcatgtaaaataattgttacttctgactccaaaatattcattttgtaaaatttcaccttaacccctgttagataggtattctagatttagctaaacacttctgaaagtaaattatgaggtgagtttttggctaatttttatacttctataagtaaaatctgttatatgtgagttacaggaccaatggaagttatagatcttacaagcaaagtgtttgtgggtcattgggttggggagctacttcagctgtttgtttaatctaactggaggtgtatattgaatttttacctctacctagatctgtagtaagaactgtatttgttcccnnttgtcatgcattatttctacgcat

SEQ ID NO: 7312 - DNA, 679 bp, Macaca Fascicularis
  misc_feature (1)...(679): n = A,T,C or G
tttaaagnnnnnnnnnnnnncaacacctttgttttgtatggaaaaactttttttttttttttacactaactgcaaaagtgcttaaaaatgtttattcaggataactaagcatgtactccttttttaacttgctggaagacttgcctctccaaactagcacccccaaaagacaacttctttcagaaactggatgttttacctaaacatagtagcttcaatgttagccagcggtaggtcggcactagtgttttccacggttatcacctttgacaggtgatgtccatctatagatagtggaagccaccccatggggaggtgttaatagcannnnnnnnnnnnnnnnnnnnnnnnnnnnatcatgtgtatatacttagattcgcattattttaacattcctctgctactctgcacttcaggtnnnttaagctgtttcaataattactggggttttggcaaacaccaatggaaatgtatatggcaactgctttcctgagcaagtgtaatttgttttatggctgttcaagttataaaattgttcttacattgtaggtaaacaaaatcttgatgtttttaaaggtcactgtaacttaaggttcaaatttctggcacagttttattagtattcacttcgaaagctaataagataccatggttttctatgttactctcattgtaacat

SEQ ID NO: 7313 - DNA, 425 bp, Macaca Fascicularis
  misc_feature (1)...(425): n = A,T,C or G
gtatgtattacatccctagaaaaagaatcccaggattttccctcctgtgtgnnnnnnnnnnnnnnnnnnnnnnnnnnnnnnnnnnnnnnnnnnnnnnnnnnnnnngaaaccaaactggcgggatggaagcaggttattctgccatttttctagatctttgagttgcacatcaaatctggggctgatcactccacacttgtttagcctgcctgtaaggttcacaacaattttcccagctctgtgatcatcaatgatttcaaattcgccaatgtaaccatgcttcatcatcacagtgagannnnnnnnnnnnnnnncggagcacggcctaataagcacctggcgtttgcctctcttttcggcattgttgatgctcttgagagcatcagccaggacattcatgcgcaccattgtggcggcgcggaaag

SEQ ID NO: 7314 - DNA, 744 bp, Macaca Fascicularis
  misc_feature (1)...(744): n = A,T,C or G
caatttatttgcattttaaacattagcctatgatagtaatttaatgtagaatgaagatataaaaacagaggcaaattattnnnngctctctaatttgtggtacgatannnnnnnnnnnnnntttggcatgtatttttgctagcaaaatgctgtaagatttataccattcattgatcttttttgctatatttgtatacagtacagtaagcacagttggcannnnnnnnnnnnaaatattacagtagaatctgagtgtaatatgtgtaaccaaaatgagaaagaatacnnnnnnnnnnnnnnnngctaggtatgtgtctcacagttttgtagaatcttacagcatctttgataaacttctcagtgaaaatgttggctaggcaagttcagttaaaatatagtagaaatgtttatcctggtatctctaagtatacatttaattgtacagaaaatttacagtgtaacattgtgtcaacatttnnnnnnnnnnnnnnnnnnnnnnnaatctttgtgcagcccgnnnnnnnnnnnnnnnnnnnnnnnnnnagtgctttttacctaagacttccttttcaacttctcccataaagagaccctaatatgcattttgatttgtaattggaaatgtaactttcactgaaagtgtcatgtgatgtttgcattacttttaactgctatgtataaaggaaagtgtatcttttgacttcatcagttatttctcttgtgcacagagaaaaatgcataaaa

SEQ ID NO: 7315 - DNA, 3551 bp, Macaca Fascicularis
aacagtccgagcagctttcagaatgacagtctgcagaagtgagctgagcgtgtgcgcggtacggggctctcctgccttctgggctccaacgcagctctgtggctgaactgggtgctcaccacgggaactgctgggctatggaatacagatgtggcagctcaggtagccccacattgcctggaggaatacatcatgttttccgataagaagaaattgtaggagctagttttttttttttaactgtccccccgccccccaaaaaactgtaaagatgcaaaaacgtaatatccatgaagatcctattacctaggaagattttgatgttttgctgcgaatgcggtgttgggatttatttgttcttggagtgttctgcgtggctggcaaagaataatgttccaaaatcggtccatctcccaaggggtccaatttttcttcctgggtgtcagcgagccctgactcactacagtgcagctgacaggggctgtcatgcaactggcccctaagccaaagcaaaagacctaaggacgacctttgaacaatacaaaggatgggtttcaatgtaattaggctactgagcggatcagctgtagcactggttatagcccccactgtcttactgacaatgctttcttctgccgaacgaggatgccctaagggctgtaggtgtgaaggcaaaatggtatattgtgaatctcagaaattacaggagataccctcaagtatatctgctggttgcttaggtttgtcccttcgctataacagccttcaaaaacttaagtataatcaattcaaagggctcaaccagctcacctggctataccttgaccataaccatatcagcaatattgacgaaaatgcttttaatggaatacgcagactcaaagagctgattcttagttccaatagaatctcctattttcttaacaataccttcagacctgtgacaaatttacgaaacttggatctgtcctataatcagctgcattctctgggatctgaacagtttcggggcttgcggaagctgctgagtttacatttatggtctaactccctgagaaccatccctgtgcgaatattccaaaactgccgcaacctggaacttttggacctgggatataaccggatccgaagtttagccaggaatgtctttgctggcatgatcagactcaaagaacttcacctggagcacaatcaattttccaagctcaacctggccctttttccaaggttggtcagccttcagaacctttacttgcagtggaataaaatcagtgtcataggacagaccatgtcctggacttggagctccttacaaaggcttgatttatcaggcaatgagattgaagctttcagtggacccagtgttttccagtgcgtcccaaatctgcagcgcctcaacctggattccaacaagctcacatttattggtcaagagattttggattcttggatatccctcaatgacatcagtcttgctgggaatatatgggaatgcagcagaaatatttgctcccttgtaaactggctgaaaagttttaaaggtctaagagagaatacaattatctgtgccagtcccaaagagctgcaaggagtaaacgtgatcgatgcagtgaagaactacagcatctgtggcaaaagtactacagagaggtttgatctggccagggctctcccaaagccgacatttaagcccaagctccccaggccgaagcatgagagcaaaccccctttgcccccgacggtgggagccacagagcccggcccagagacggctgctgacgccgagcacatctctttccataaaatcatcgcggggagcgtagcgcttttcctgtccgtgctcgtcatcctgctggttatctacgtgtcatggaagcggtaccctgcgagcatgaagcagctgcagcagcgctccctcatgcgaaggcacaggaaaaagaaaagacagtccctaaagcaaatgactcccagcacccaggaattttatgtagattataaacccaccaacacggagaccagcgagatgctgctgaatgggacgggaccctgcacctataacaaatcgggctccagggagtgtgagatacctttatcaatgaatgtgtcaacctttctggcatacgaccagcccacaataagttactgtggggtgcatcatgaacttctctcccataagtcctttgaaacgaatgcacaggaagatacgatggaaacacacctagagactgagctggacctgagcacaatcacaacagctggccgaatcagtgaccataaacagcagctagcttaactgagatcactggtagcccagggttgctaccaaactttgtaacctcaaggacaaaacatcactggaaacaaaggctgaaaccacagcaacagactttgtgatacagttaaaaggtgcagctaccagtgacaaataaaaacctttgttacatctcattattttcaggccaaggtgggagtatagtgcataataattgtacagtagcaatttttctcctaattaactcatagccatttgcctaaaagtaaccatcagtcagtgcaaaatgtgcctggttcttaagacaactttttatttagaaccatgagaccagtattctggaaacatttcaaaggaaacatatgaattttttttttgcattgtgcactacatcatttctctcctgaggaagaatttttaacatgtacagctcgttcaatattgatatgagccacggtgcagaactttatcactcgagtagactgtaaacatccttagtatgttctaaattgtttatattgctatccataatgggagtcacctccaaattatcaaagaaataactcagagtaatttgacaccagcccagatcacatattgattacacgattgtattataaagttaactcaaatcaaattaagaaaacctgagttttgagaagctgaaataatcaacttttttgtgctgtttgcttgacataggttattgtttgaaaatattgttacgttatcaatagtaatcatgcattcttgtgttttttttttaaatggaaaactgcaagtttcaattactgttgcactagaagtgcttttatgttgtcattttatactcatgccatcaaaagtagattggcatatcaatctaacaggggtcaatgaaaacaatgaagaaaagaataactgaaaacaacatcaaacttttaaatttttatctcttccaaagaaattatatctacaaaatctagttttatgcaggtttgtcacagcaaatttaaaagcagcttcaagaagaatgaactcaaaaactgtggagcaaatctttgtggaaaatatataaagtcagaaagaaaaaaagatgtaaatgttggaagaagcaaattctattactaattcaaatgaaactaaatgtcaaacacagtacttgtgtcaactatttagcatcccagattttgtaacatattttgcataaattatttgctattcaaaaatttttgtcattttaaatctaattttaatctttatgttttccattttctaaaaaaaaaaaaaaaaaaaaaaa

SEQ ID NO: 7316 - DNA, 768 bp, Macaca Fascicularis
  misc_feature (1)...(768): n = A,T,C or G
aaggcatttttcctccaannncccccagaagtcctagttggcattggcctgtgcacgtgcttatattaggcctcccgttgggatggctgagaatcatgaaagacagatcctccgctaggctcaatgggtcatttctagacaccaagtctctgggaactagtgtttgattttaaatggcatatggcccttcttgtttcagtgacttagaaaagtaaaagccacttacaaaagttagcaagatttnnnnnnnnnnnnnnnnnnnnnnnnnnnnnnnnnnnnnnnnnnatcaaatatctctgattgtgcgcaacgaactgcatttctttggacttccgaatccatgtttatgctttctctggccctttaacacctcggcgattccgttagggatgggatgagtgggaggaagccctttgagaagggggaatcggccctctggnnnnnnnnnnnnnnnnnnnnnnnnggaagggccagggctctgaacttagccaaacactcatcttggctgtgggcttgggaagaaatggccattatttatggattgtatttggtacatattgtgtgatacttgaaaagataaaagggactgccagcnnnnnnnnnnnnnnnnnnnnntcttaacgcttatttttccttgccctgtctcctcccttccacctttcttcttgcattgtgatgatctagtaggcatgtctgtcaacaggacacatgcctcctctgactataacctcttaatagttgtgtataatgaaaactgtaaacttttaa

SEQ ID NO: 7317 - DNA, 757 bp, Macaca Fascicularis
  misc_feature (1)...(757): n = A,T,C or G
agagggtactgatggnnnnnnnnnnnnnnnnnnnnnnnnnnnagnccctggnnncgccctagccagcccaggtggctccctagccccaagaggccaggaagggctggaaggcagggcctgcaggtgctccccgccctgagacccaggccccaaatcagcaataatgaacaaacccttggcccagcctgggctggtgacccaggcaccagagaccttgcatccctcctcatcctaggaggcccctaggggtgccccatctcagtgccccctgaactctttatttgcctaatttatatatagagagatatataaatatatataaaatagctattttgcttaaatttctacagtatgtaaaagtgaaaaaatgatgaagacgggcacacctgtctgagtttggccctcatgtcagctgtgcccttccctctcctcatgcccccttccagcggcttctgccaaccatggggggctggactaccatggtcactgacccagcccctcagaatctcacactnnnnnnnnnnnnnnnnnnnnnnnnnnnnnnnnnnnnnnnnnnnnnnntttctttctactccaggactggttttgtttttatatatacataaaaaaaaaaagtgaaaacaccaatgtgtgaaatgccttacgatgcccactggagaggcggggtggggtagggcaggacggccccactggggctcccacagagctgtggaatgtacctctccccaacactgttttgttagcaagcacctttgac

SEQ ID NO: 7318 - DNA, 679 bp, Macaca Fascicularis
  misc_feature (1)...(679): n = A,T,C or G
ttgagcagtgttcnnncntggaggccccgcacacgaagcccatagagacgtgcgtttcactttttaaaagcttaagctttatagaatgagggagcacagtggactctgacaggaacctnnnnnnnnnnnnnnnnnnnnnnnnnnnnnnnnnnnnnnnnnnnnnnnnnnnnnnnnnnnnagcctacaaaacagatgccgaggtaagcagtgattccaaagactggcgctcagaagcgccacctccatgccagccagccaggctacggaacagaggggcggtctnnnnnnnnnnnnnnnnnnnnnnnnnnnnnnnnnnnnnnnnnnnnnnnnnnnnnnnnnnnnnnnnnnnnagaggctcannnnnnnnnnnnnnnnnnnnnnnnnnctccccgtggggcacggggccgaaggctggggacagagcatcctggggttttgatataaggctaggctttaaaatacctttaaaagtttcatttnnnnnnnnnnnnnnnnnnnnnnnnnnnnnnnnnnntttgtgaaaacgtatttgtttccgtaagacaagctccnnnnnnnnnnnnnnnagcgnnnnnnnnnnnnnnnnnnnnnnnnnnnnnnnnnnnnnnnnnnnnnnnnnnnnnnnnnnnnggctccttttctgaggctcctgactccatttttgcagattctgnngggt

SEQ ID NO: 7319 - DNA, 764 bp, Macaca Fascicularis
  misc_feature (1)...(764): n = A,T,C or G
aagatcccatcgctacaaaaatcaaaaagttaaaaatcagtgnnnnnnnnnnnnnnnnnnnnnnnnnnnnnnnnnnnnnnnnnnnnnnnnnnnnnnnnnnnnnnnnnnnnnnnnnnnnnnnnnnnnnnnnnnnnnnnnnnnnnnnnnnnnnnnnnnnnnnnnnnnnnnnnnnnnnnnnntatctcataaataaaactaaaaaaaaaagtaaatcctccagtctggatcgtgtgacgggacttcaggttctttctgaaattgccctaaatgttactgttnnnnnnnnnnnnnnnnngagagtgacagcctccctcagattcctggtgtgaagatgtcacagggattggctgttgtccccagggacgaaacactgtggccccccccagtgcagggaaccatgacaagcctttctggtttcggagcatgcaaatgcatccctgtacagatagtggggttttttgttatgtttgcactttgtnnnnnnnnnnnnnnnnnnnnnncttatatatatatacaggtatatataaaatctatttannnnnnnnnnngctggttgctgtatttgttcagtgactattctcggtgccctgcgtagtgggttattgtctctgaaatgcctcttctttatgtacaaannnnnnnnnnnnnnnnnnnnnnnnnnnnnnnnnnnnnnnnnnngatgatgccccnnnnnnnnnnnnnnnnnnnnncggggagacgggtgtcactttttaaaccactgtatagaaggtttttgtagcctg

SEQ ID NO: 7320 - DNA, 666 bp, Macaca Fascicularis
  misc_feature (1)...(666): n = A,T,C or G
tnnnnnnnnnnnnnnntggatacagatccctttggggaaggctgcaaggaaagttcacaacatgcatctaagcgttaagtttttccttcaaaaagacatttgacttcctctccatttaaggtctggaaatcaagtgggagatattgactttggcacttgagacagacctgttgacccagaaatctttagttaaggtcattactaggccatatcctaggggcatctggcctttttcattcnnnnnnnnnnnnnnncaaggtctgatttccatgtcctgcccattacgatgagcaccctattttgctccttctgtctatctcagctgctgagatcagggagcccacattcccagcagctcttccaagcagcctcccaggcctagagaggaaaatcagtggagccttgtgaatttatttgtcataaattcacaagaagggagctcatcttctgggtcctgccagagggcactgagggggttgatgggctgggtgcatgccagggacccaaccaagcatttttatcttctgaaatctttgaattcctgcctttcttggatgtttggtcttttgatataatttagcatgggccaacatttggtccagattaaaatagtaagaactgtatctggcaatttgagcttttacatagaatgagaatcgctggtga

SEQ ID NO: 7321 - DNA, 762 bp, Macaca Fascicularis
  misc_feature (1)...(762): n = A,T,C or G
ggtccannnngagccccacccaggagtctccacccagcacaggaagctgaccctggcccagctctaccgaatcaggaccancctgctgcttaactccacgctcactgcctcgtgagtggcctggcctggggtagggcaagtggctcagggcactggcatgggggcccagtcatgcctgggagcatcgcatttggggagggtgatggcggagggagcctgaaccctgcccagtgtctgggtgcggggggctgtggtgggcagtagtgaaggggcctgaggagnnnnnnnnnnnnnnnnnnnnnnnnnnnnnnnnnnngaatggtgtcagccaaaggaagactcccttccccaccctgtagggaggtctgagnnnnnnnnnnnnnaccaagagacagtagacagcctgcctcatggggcgtgccggcacctgcttcagtggctgcctcctgtgtgcatgagccggatgctgggaaggatccctgcctacacccgggcccgattcnnnnnnnnnnnnnnnngatggagtggaggaggcccaggccacagtaccacctgacctgcccaggcagcccctcgtcacctactccccgaagttaacagctcaactcgaatccagggctgggttcccaggctgcccatcccacttctaccctcactggcctccagtgggactcgctcctgcctcgcccccaccttcccagtcccacaggccacccctggcttgggctaggttctgtaaagttacgtatttattgagctttt

SEQ ID NO: 7322 - DNA, 535 bp, Macaca Fascicularis
tgcactttgagcggaaggcagatgccctgaaggccatgaagcagtacaacggcgtccctctggatggccgccccatgaacattcagcttgtcacatcacagattgatacacagcggagacttgcacagagtgtaaacagtggtggcatgactagaaaccgtggcgctggaggttttggtggcggtggaggcactcggaggggcatcccgtggaggcgcccgtggaagaggcagaggtgccggcagaaattcaaagcagcagctttcggcagaggagctggatgcccagctggacgcttataatgcgagaatggacaccagttaaatcagaccggcaaatccgcgtgtggaacaggacccaggcgtttcctcttgctccctggtcgggggtgggcggtggttggggctgtgcggccaatgatggatttgtttcttttatgttttaaaataggatttaaaaactcatgtaaaggttttttttttttttccttttttttttttcaaattctgaaacagatcctgttttgtaccgagtt

SEQ ID NO: 7323 - DNA, 727 bp, Macaca Fascicularis
  misc_feature (1)...(727): n = A,T,C or G
ggaaaaaaagcaaatccccaaatgtgctnnnnnnnnnnnnnnnnnnnnnnnnnnnnnctactgctgttaccagcaagtgatcaggaagactaggagctatttctgactgtaaatgaattgtataatggctctgctgcagttctgtgacttccaagccaggaattaaatgctctttttaagaataacaaaaaaacaaaagcatttcctatgctagtctcccagtaaaatgtacatgttttggagacttcaaaggtattatatgagttcacatttagcaacagcttattaataaccctcaagctgtcagaatctctatagttaccatttacaattttatactgtgaaaaaatacagatcagtgaaagcataaagataaatcagaattcactttgaagagggtctgaggcctgggagagtctctactgtctattgaagaatgaggcatgtataaaatagttggttgaatttcactgatcttcccaatgtgaacaaatatactatgtatattgtgtgtatttctagaaatcaatggcagctgctgatggtgttgtaattagaaatctatatagattatagatgttttagaaagtatggtgccaatcctaaaagatttgtgtgggctaaaagtgcttgtacttacttttttctgcacttataactgatttggttttaaaattgtgtgcgtgtatctgttctttctctgatacacgcagcnnnnatttaaaac

SEQ ID NO: 7324 - DNA, 691 bp, Macaca Fascicularis
  misc_feature (1)...(691): n = A,T,C or G
actgtaatnnnnttttccaattgagtgnnntaataatagtttacaaatactatgtatttatgcaaaactgttcaactctcatctgttgtgattggatacttgatcttgtcagtagtggtcggtattgggatgtgagcttgtcctactccatacgtgtttattctgctatgcagttttacgttgtgtgttcctatctattnnnnnnnnnnnnnnnnnaaacaacactggtagttcctnnnnnnnnnnnnnnnnnnnnnngacgctgcgtcccataggagccaatgaaagaacgtagcttggtctgctatccagctgtggggtaatgcaggccaggcggcctctgcaccannnnnnnnnnnnnnnnnnnnnnnnnnnnnnnnnnnnnnacttttctttcatagacattttattaccacctaggccacccttgttttcctctctgttagtgtcctgagctcttttgcaacaaaatgtaggtacagaccaatccccgtccctcccccaatcaggagctccacaccaggagttgtttggttttccagaagctgccagtgggttcccgtgaattgcgttacgatattgatgattatttttattatattgtttttcttgtttttttaataatatatttaaaggnnngtatcttttgtactgtgaatttgcagtagannnnnnnnnnnnnnnnnntttt

SEQ ID NO: 7325 - DNA, 707 bp, Macaca Fascicularis
  misc_feature (1)...(707): n = A,T,C or G
cnnngngagagagggaggaaggggcactggatacgcggagggaggggggtggccccccgcttcttaacaccaacaccccctgagaaaaccaagggtctcccgagctccgcaccctcatccaggacccgaaacagcggggaggaggcgacagtgcctggagggccccgccctgtgactcgacctccaactctcctcgcctccttcctcgtctttttaaagaacttctgaaagggagaacggaaaagatcaagggacccatatctcgagctgcatttcgaaagtcagtcctagaggggtcgtctctcgcgaggcccgggtgcccacacaggatcgacgagtggcagtgccacctgggcccggactctgggactgcgggaggcgggcgcgcctggggccaggaccccggcgtgcgctgagggcacccggtgaaggccggggaaagtggggcagctccgaaatgcggcctgcacgtcgccctgggagtcgttcccgggcccctttgcagacacagccttcaggtgtgagttgtgtgtgcgccggccgggggcgtctcttacaggaagtttgtatttgcaaactgggctggtgtcgggggcggggtggggggtgggcggcgggcggcgggagaaagacgcagtggtttctgctttctggcttttctgttctggctccaagaaaagatcaaaacaatagttaaatagcaattg

SEQ ID NO: 7326 - DNA, 714 bp, Macaca Fascicularis
  misc_feature (1)...(714): n = A,T,C or G
cgtggcaggtcaccacccagcaggcgggcctggactgccgtgtgtgccccacctgccagcaggtgctcgcacacggcgacgccagcagccaccaggcgctgcatgccgcccgggacgacgacttcccctccctgcaagccatcgccaggatcatcacgtagctcccgccagcatggccagagccatcgcaccatgagcgcccttcctccttccttcctctccgggctgccgggcagccaggtaaggcccagtgaggccacctggcctcttggttggccaggcccaccaggaagtcaccaggatggtccacccgccctgttggcacactcaggtgggagtccacccctgcctcagtggtgggccagtctcggtttgcattcttgtgcttttgggaggcgccaggggagggaagggctgggatgctgggannnnnnnnnnnnnnnnnnnnnnnnnnnnnnnnnnnnnnnnnnnnnnnnnnnnnnnnnntgagggctgccgcccctgcggcnnnnnnnnnnnnnnnnnnnnnnnnnnnnnnnnnnnnnnnnnnnntcacaggtgtgtgttgtgtaaacagttggctgtttcgtgcttcaagaatattcaggattaaaagcagacaagaaattgtgctacttgaagttgaatctttttatgagannnnnnnnnnnnnnnnctgggatcttaaattgcctctgaccttttataagacag

SEQ ID NO: 7327 - DNA, 761 bp, Macaca Fascicularis
  misc_feature (1)...(761): n = A,T,C or G
gacannnnnnnnnggtttnanctagagtactgagtgnnaacagcagggcagaagagcctatcttagaaggcgggaaggcatggggataggatgacctctggagtctgcctttnnnnnnnnnnnnnnnnnnnnnnnnnnnnnnnnnnnnnnnnnnnnnnnnnnnnnnnnnnnnnngatccaggtgaaagtggccattcatccaagaacatcaaatgatcttggccannnnnnnnnnnnnnnnnnnnnnnnnnnnnnnnnnnnnnnnnnnnnnnnnnnnnnnnnnnnnnnnnnnnnnnnnnnnnnnnnnnnnnnnnnnnnnnnnnnnnnnnnnnnnnnnnnnnnnnnnnnnnnnnnnnnnnnnnnnnnnnnnnnnnnnnnnnnnnnnnnnnnnnnnnnnnnnnnnnnnnnnnnnnnnnnnnnnnnnnnnnnnnnnnnnnnnnnnnnnnnnnnnnnnnnnnnnnnnnnnnnnnnnnnnnnnnnnnnnnnntaacaagactgcctcaaaaaacaacacannnnnnnnnnnnnnnnnnnacacaaactnnnnnnnnnnnagatattatctggctccctagatcccattagcccagcctcctcccttcacagactggttcctgtcatcatggtcccagcttgtctcagggtgtctcaagcctcttcnnnnnnnnnnnnnnaccgaactgggaattttggaagcgaggtttggcnnnnnnnnnnnnnnnnnnnnnnnnnnnnnnnaaagctctagaacactggagcct

SEQ ID NO: 7328 - DNA, 2196 bp, Macaca Fascicularis
cctcccccaggatggcggaggagatcatcacaccggtgtactgcaccggggtgtcagcccaagtgcagaagcagcgggccaaggagctgggcctgggccgccatgagaatgccatcaagtacctgggccaggattatgagcagctgcgggcgcgatgcctgcagagtgggaccctcttccgtgatgaggccttccccccagtgccccagagcctgggtttcaaggacctgggtcccaattcctccaagacctatggcatcaagtggaagcgtcccacggagctgctttcaaacccccagttcatcgtggatggagccacccgcacagacatctgccagggagcactgggggactgctggctcctggcggccattgcctcacttactcttaacgacaccctcctgcaccgagtggttccacacggccagagcttccagaatggctatgccggcatcttccacttccagctgtggcaatttggggaatgggtggacgtggttgtggatgacctgctgcccatcaaggacgggaagctagtgttcgtgcactctgccgaaggcaatgagttctggagcgccctgcttgagaaggcctatgccaaggtaaatggcagctacgagtccctgtcagggggcagcacctcagagggctttgaggacttcacaggcggggtcaccgagtggtacgagttgcgaaaggctccgagtgacctctaccagatcatcctcaaggcgctggagcggggctccctgctgggctgctccatagacatctccagcgttctagacatggaggccatcaccttcaagaagctggtgaagggccacgcctactctgtgaccggggccaagcaggtgaactaccgaggccagatggtgaacctgatccggatgcggaacccctggggcgaggtagagtggacaggagcctggagcgacagctcctcagagtggaacagcgtggacccatatgaacgggagcagctccgggtcaagatggaggacggggagttctggatgtcattccgagacttcatgcgggagttcacccgcctggagatctgcaacctcacgcccgacgcccttaagagccggaccatccgcaaatggaacaccacactctatgaaggcacctggcggcgggggagcaccgcggggggctgccggaactacccagccaccttctgggtgaacccccagttcaagatccggctggatgagacggatgacccggacgactacggggaccgcgagtcaggctgcagcttcgtgctcgcccttatgcagaagcaccgccgccgcgagcgccgcttcggccgcgacatggagactattggctttgcagtctacgaggtccctccggagctggtgggccagccggccctacacttgaagcgtgatttcttcctggccaatgcgtctcgggcgcgctcagagcagttcatcaacctgcgagaggtcagcacccgcttccgcctgccacctggggagtatgtggtggtgccctccaccttcgaacccaacaaggagggcgacttcgtgctgcgcttcttctcggagaagagtgctgggacagccgagctggatgaccagatccaggccaatctccccgacgagcaagtgctctcagaagaggagattgatgagaacttcaaggccctcttcaggcagctggcaggggaggacatggagatcagcgtgaaggagctgcggacaatcctcaacaggatcatcagcaaacacaaagacctgcggaccaagggcttcagcctagagtcgtgccgcagcatggtgaacctcatggatcgtgacggcaatgggaagctgggcctggtggagttcaacatcctgtggaaccgcatccggaattacctgtccatcttccggaagtttgacctggacaagtcgggcagcatgagtgcctatgagatgcggatggccatcgagtcggcaggcttcaagctcaacaaaaagctttatgagctcatcatcacccgctactcagagcccgacctggcggtcgactttgacaatttcgtgtgctgcctggtgcggctagagaccatgttccgatttttcaagactctggacacagatctggatggagtcgtgacgtttgacttgtttaagtggttgcagctgaccatgtttgcatgaggcagggactcggtcccccttgccgtgctcccctccctcc

SEQ ID NO: 7329 - DNA, 769 bp, Macaca Fascicularis
  misc_feature (1)...(769): n = A,T,C or G
agagaaaagacccnatcagaggcccagaggtggccntgggtntcacccacaagttatctccaccaaccacccatccctgcnnnnnnnnnnnnnnnnngccccagagcagaaccctggcagcacccagcctcacttacgcctccctttccctagaggcaggagnnnnnnnnnnnntcctgggtacatcccgcaagtggggctgacaggcgggagcggggaagaagggggccggccagggcagcagggtacccgaggagggcatcaaatagggcaagtagtgatggtgaagcaccaaaggccctatctcctgcacgtccatctcctcctcttcctcctcaggctcttcctgtggaacctccagggagacctgggnnnnnnnnaaaacagggaggggaaatgagaatccacgatcaggctctccccatccttactcctccattcccctacgttatttcctccagataggctttgtaagaatggcttgtgtaggccaggcgcggtggcttgcacctgtaatcccagcactttgggaggccnnnnnnnnnnnnnnnnnnnnnnnngagattannnnnnnnnnnnnnnnnnnnnnnnnnnnnnnnnnnnnnnnnnnnnnnnnnnnnnnnnnnnnnnnnnnnnnnnnnnnnnnnnnnnnnnnnnnnnnnnnnnnnnnnnnnnnnnnnnnnnnnnnnnnnnnnnnnnnnnnnnnnnnnnnnnnnnnnnnnnnnnnnnnnnnnnnnnnnnnnnaggnnnnnnnnnnnnnnnnnnnnnc

SEQ ID NO: 7330 - DNA, 737 bp, Macaca Fascicularis
  misc_feature (1)...(737): n = A,T,C or G
attattgaagatggtattaactgttgcaaatatacacttgcctcctaaaacatacattctgtataattgtcactaaatannnnnnnnnnaggtctataatttctgtaacccctttctcctccccaaggacagaaaagaannnnnnnnnnnnnnnnnnnacnnnnnnnnccctactcttttcccaagaagggtaaagcctacaatatcatcagggggcatgaagcacatnnnnnnnnnnnnnnnnnnnnnnnnnnngagatatggtggacaggctaatttttccttgaaaatgtgactttttcaactcctttcaaatttaggatggaatacttcctgaaataaaactgggctttatgcaggattctctttgaaaattcttgtatgtccagaatgaaagataaaaataattgtattcctcacattcacaatccccgttggtctnnnnnnnnnnnnnnnnnnnnnnnnnnngcacatagtgtttaaagactaatgaatgcaaaaagataaattcttcagctaatttttgaattgtttctcatatatggtactagnnnnnnnnnnnnnnnatgaagcacattttgggtagttgaggtcttttgcttttgcctttagctttccaagctttcttacaatgtggactgattactgtaacatttcatgtgtaaaataactggatattctttatatactggaaataacctgtgaatccannnatttcactannntgttttaacttt

SEQ ID NO: 7331 - DNA, 724 bp, Macaca Fascicularis
  misc_feature (1)...(724): n = A,T,C or G
catagtaggtgctcaaatattannnnnctccttgccttccttatctaccctgtgtcctccttttccccgtatgattccaacccaatagcaaaggacatttacatgtgatgaaaacatctattgggtaaaatcagatcttggataaagaaattctgacttttatataagctgttggtaaacagaaaaaacaggaaggtattcgtcggtagaacatttttaagtgcaggaaagaaagctggaataatactatgtaactttgtccaggttactttgactgaaacacgtttttggtggatttcttttcctcaaagaactctctaaatgnnnnnnnnnnnnnnnttcctcacccatcatcctgttggaaacccttactagacctatggatttagggagttttgtcagaaaacatttttaacttgcagtatttaaaagaatatttactgttcctaaaatgtcattcaaatgcatgtattgtctattgtttggggatgggaactagttttgcaaaaaacacctaatgttgtataataatgccccaatgatcttgctggttaaaaatacagtatttttggccataattttgtactatagtattcttcattgttgagttttgcttccgttgaagttgcccaagcccctctcagaatgttttgtattagcaggagtattgaaatacatctttccttccttaacacacctttttgtgcacactgcattttccaaa

SEQ ID NO: 7332 - DNA, 643 bp, Macaca Fascicularis
  misc_feature (1)...(643): n = A,T,C or G
tcctagtagaaactgcacctgcatatgatggcaggtnnnnnaattcactatagtagaatacaaaaaataaatcagtctctttctggtttcatccaagtagagaaaacatcacatgttaagtgtactcttatagttctcttagacccaacagaaatcttgtttgctttctttattgctatgacggtactaagcaacaagacttgaaaatagcacttcctggaatttattcaagttctaaagatttggtttagttaagaaactaaaagctacttttggcttcaaaagtgttttcccactgtttattctaacatgctttttataaacacagcaactgtgttcagtgtgcccatggcccttctgtcttctcagtgtactttctctgcggtatgattgccagagtgatcagaatgttctctacactgtatgaatgtgcttggagtatatcaaatttagaaaattcaatctgctaaaatgctgcaaataagtgttattcttcaaaacatgtaaagattcattggttttaattggatcaaaatgcaactatcatcagctactgaaccaagtttatatcctgacacttataatgttatattatttctaagatacgagatttgctaatttaaaaaactttaaaatgcttcaa

SEQ ID NO: 7333 - DNA, 1074 bp, Macaca Fascicularis
  misc_feature (1)...(1074): n = A,T,C or G
caagatgaatganncggatgcatgtttgaagaaaagcagcagcaatttgagaatctggatcagcaacttaggaaacttcatgccagtgttgaagccttggtctgtcatagaaaagaactttcagccaacacagctgcctttgctaaaagtgctgccatgttaggtaattctgaggatcatactgctttatctagagctttgtctcagcttgcagaggttgaggagaagatagaccagttacatcaagaacaagcttttgctgatttttatatgttttcagaactactnnnnnnnnnnnnnnnnnnnnnnnnnnnnnnnnnnnnnnnnnnngaccatcnnnnnnnnnnnnnnnnnaaatgggaagatgctcaaattactttgcttaaaaannnnnnnnnnnnnnnnnnnnnnnnnnnngctaacaaaccagataaaatacagcaagctaaaaatgaaatcagagagtgggaggcgaaagtgcaacaaggggaaagagattttgaacagatatctaaaacgattcgaaaagaagtgggaagatttgagaaagaacgagtgaaggattttaaaaccgttatcatcaagtacttagaatcactagttcaaacacaacaacagctgataaaatactgggaagcattcctacctgaagccaaagccattgcctagcaataagattattgctgttaagaagactgtcgatgttgttccagttatgttgaattccacagtgaaatcatttaaaaccatctaaataaaccactatatattttatgaattacatgtggttttatatatatatatatacacacacacacatacacacacacactccgacattttattacaagctgcatgtcctnnnnnnnnnnnnnnnnnnnnnnnnntggcatgacattctgcaatactttgctgaattgaacactattgtgtcttaaatacnnnnnnnnnnnnnnnnnnnnnnnnnncagaaaattttacaatatttttttctttacaatatgttctgtagtatgtttaccctctttatgaagtgaattnnnnnnnnnnnnnnnnatgttcacttatacattc

SEQ ID NO: 7334 - DNA, 1647 bp, Macaca Fascicularis
gagctccgatgcggccgagggcaggagcaaaggcgccatggctgtggagtcccaaggcagacatccacttgtcctgggcctgctgctgtgtgtgctgggcccagtgctgtgccatgctgggaagatgctgttgatcccagtggatggcagccactggctgagcatgcttgggaccatccagcagctgcagcagaggggacatgaaatagttgtcctagcacctgatgcctcattgtacatcagagagggagcattttacaccttgaagacgtaccctgtgccattccaaagggaggatgtgaaagagtcttttgttagtcttgggcataatgtttttgagaatgattctttcctgcggcgtgtgatcaaaacatacaagaaaataaaaaaggactctgctatgcttttgtctggctgttcccacttactgcacaacaaggagctcatggcctcccttgcggaaagcagctttgacgtcatgctgacagaccctttccttccttgtggccccatcgtggcccagtacctgtctctgcccactgtattcttcttgaatgcattgccatgcagcctggaatctgaggctacccagtgccccaacccattctcctacgtgcccaggcctctgtccgctcattcagatcacatgaccttcctgcagcgggtgaagaacatgctcattgccttttcacagaactttctgtgcgacgtggtttattccccatatgcaacccttgcctcggaattcctgcagagagaggtgactgtccagaacctattgagctctgcatctgtctggctgcttagaagtgactttgtgaaggattaccctaggcccatcatgcccaatatggctttcattggtggaatcaactgccttcaccaaagtccactatcccaggaatttgaagcctacattaatgcttctggagaacatggaattgtggttttctctttgggatcaatggtcgcagaaattccagagaagaaagctatggcaattgctgatgctttgggcaaaatccctcagacagtcctgtggcggtacactggaaccccaccatcgaatcttgcgaacaatacgatacttgttaagtggctaccccaaaacgatcttcttggtcacccaatgacccgtgcctttatcacccatgctggttcccatggtatttatgaaggcatatgcaatggcgttcccatggtgatgatgcccttgtttggtgatcagatggacaatgcaaagcgcatggagactaagggagctggagtgaccctgaatgttcttgaaatgacttctgaagatttagaaaatgccctaaaagcagtcatcaatgacaaaagctacaaggagaacatcatgcacctctccagccttcacaaggaccgcccggtggagccgctggacctggccgtgttctgggtggagtttgtgatgagacacaagggcgcaccacacctgcgccccgcagcccacgacctcacctggtaccagtaccattccttggacgtgatcggtttcctcctggccatcgtgctgacagtggccttcatcgcctttaaatgttgtgcctatggctaccggaaatgcttcgggaaaaaagggcgagttaagaaagcccacaaatccaagacccattgagactcgag

SEQ ID NO: 7335 - DNA, 748 bp, Macaca Fascicularis
  misc_feature (1)...(748): n = A,T,C or G
tcaggggccccgcacattcnanctgaaggtgaccctggcctggccgaagctggaagagccgtggggacgnnnnnnnnnnnnnnnnnnnnaggctcacgtgctggttgcttaatccgtttctggaggaagagtatgacccccacctgtgatggggtccttgtgtggtggggaccggggccagtgggctcnnnnnnnnnnnnnnaaccnnnnnnnnnnnnnnnnnnnnnnnnnnnnnnnnnnnnnnnnnnctagatcccgcttaacccatggatgtggaacctgcagcagagaaggaaggtcgcatgagtcagatcnnnnnnnnnnnnnnnnnnnnnnnnnngtgagggtgaccccatctgctatttttgtgcccatcctcagacagccatttggggatgtgcctattagggctccctaagaactcagatgcccaggaagcccagcccctcaggacgtacccacacgcagccttcccttgacgcctacgtttctgggcacatgaggcatctttcctggaaccccgagccagccctgtcccgccccaacgcagcatggcactcaggagatacaggctggatgtggggcggtccttctggggaggcctggcctagcagcctgccctctgcacgctgcccacctgnnnnnnnnnnnnnnnnnnnnnnnnnnnnnnnnnnnnnnnnnnnnnncaagaggaccccagcagaaagccagccccggactcacatggcattcagatcccactgggggg

SEQ ID NO: 7336 - DNA, 1528 bp, Macaca Fascicularis
  misc_feature (1)...(1528): n = A,T,C or G
aaggcacaaacagaatccggctacagaatattcgaaatgtatttagagcccagtgggagatcctagtcaatcgggctcgtggtttggtggtaaccacctaggctgggatgcaagtccaggcctgttcttgcctatgtgccctgaggacagccccgaacctctctgagcctcagcttctcctgctgataaacagtgacaatggcatctcttttacaggagcatcgcgacaaggattaaataaagcagcgtctgtgaagtgcgtgttgccaactgccaagtgtcatacaatgacaaagaaccactcttcagaggaaaatatcaccttccccagactcttccggcaatcgacactggagttattcatacgagggatgtggctgggcaagtgtaccttgatgtagatgtggccacgagtctgagcccgagaagagctactggcccaggttggtgcatgggcactgcccttggggaacaggggcaggccagcctcccaccttcttccagagtccaacctgaccagcttcccgctaggagaggcacaagggccaggcttgcctccgggaaccccaaggtgcaggcggaaaggcagcctccatccctgggtgatgccgctctgcaagtgtgaactgagtgcctcctgggtgaggccgcccatgggtcccagacactcatcacagggagaaggcagacactcagagagagatgcaagtgctcttaaactgcaggcagagggacgctaggggacaccaggagagctccacggaggaagtcacccttcagcatggtcttgaagatgagtggaaaggcggtaacatgagcacagtgtgtttgggacacaggagatagtttcatgtggccaaaggtcagggcacctggaggcaaggagacgctaaaggtttatcccataatgatggtcccctgtatgtacagaggctttccacatcctttgtcttcgatggactcatttaaactcccacaacaaactgtgaagctggcctagccctgtcatcctcaggctgcagcttcagtgacttccttcaggaaaccttcctcaactccccagtggatggactgaggtctgccatgttgttctcatagttcctcctcttcacggcatcatcactgccattcccttgcctgtctccccactcgcgctgagctctgtgaggacagggacttgcctggcacattgatcattgtgtcactgtcaaagtctgcaatgggatctggcagaaagaaggttctccacttattggatggatgagtggatggatggatggatggaaagaaggaaagacagatggatggatgaacagatggatggatgaatatgtgtatgtatgcacatgtgtatggatggacagaatggatacatggacagatggataacggatagatggatggacagtggatggagggttgaattacctagcagtcccagaatcaagtcacatcatgtcaaaatcatgccaagcancncctcaagaagnatcggtatgntgagaanaagngaatnngggcncccant

SEQ ID NO: 7337 - DNA, 757 bp, Macaca Fascicularis
  misc_feature (1)...(757): n = A,T,C or G
agttgctaaaagctgtagttccatnnntagnnnctagggaaatgcaaattaaaatcactatgaaatatcaccatacacccattagaatagctaaaattaagagactaaaatgaaaagactgaccataccaactcctagcgaggacgcagagtgactggaattaccacaccttgctactgggagtataaaatgagacttctcctttggagaacggtttggtagttcctttaaaagttaaacatgtacctaccatatgaaattgcacttctagatatttacgcaggagaatttcaagcatatgtcctaggaagacttcacaatatttataggtgctttatttgtagtagccccaaagtggaaacagcttgagtgtgcatgatttggtgcatggataaacagattgtatggccacacaatgaataacagccacaaaaaagggatgaactattcatacacgaacaacatggatgggccgccaaagaattaggctgaatgaaagaagaaaaaaaagactacattttgattatctcatttacgtattattccagaaaatacaagtgaatctacagtgacagaaagtgatcaggggtttcctggagatggaaatggggagagcggggaggagggattgcaagggaacacttggtaactttggggatgagggacgtgttcgttttcttgaatgtaataatggatttatgggggtatatatgtcaaaacttaccaaattgtatacttttgctatgtgcagtttatt

SEQ ID NO: 7338 - DNA, 838 bp, Macaca Fascicularis
  misc_feature (1)...(838): n = A,T,C or G
attagtacactgtcagnannnagtaacacagctgacatggttgtgctctgttgaaagtctaagaataggtattgttggaatatacagtttgtatttgtctgctgtgaatcataatcttgaaatttctaatcaagtttgtaaaatttttatagtgaaacattttaatgacaatttaaaaatttatcttctctaaagaatggtcaaaacaatatcctttcagaaatagaattgttctttaatatctttccaaaatgactttggttaaatggaccagatgtatattagttaaaatttaggactaagttgttgatattctttgagtttacaagttaatccttattggagatgtgccaatatacagttagaatatcattaatttgcactgtttggggaccccatttaagaatgctgaattttgccaactaagaagtaagcaaatgcaatttannnnnnnnnnnnnnnnnnnnnnnnnnnnnnnnnnnnnnnnnnnnnnnnnnnnnnnaacgcagtgtgtcgggctgtaatattaccatatttgctgtcatgttctcccatctaagtgctgggaattcaccatgtggaaaccaagcaaacgtgttgtgcatcagccggcttgagtttgttcaatatcaaagctgaaaactagcgaggtctgctgtactgcttattgaagtattgtgattattttaggcattgatttttacaaaatatatactgtaacagtatactttgtacagatttaaattttatttgaaaaaatgaaataaagtaggcaaaaaataaagatgtttatttttcatgtgactgtaaaaaaaaaaaaaaaaaaaaaaaaaaaagg

SEQ ID NO: 7339 - DNA, 608 bp, Macaca Fascicularis
  misc_feature (1)...(608): n = A,T,C or G
gcaggannnnnnnnnnnnnnnnnnnnnnnnnnnnnnnnnnnnnnnnnnnnnnnnnnnnnnnnnnnnnnnnnnnnnnnnnnnnnnnnnnnnnncctcaaaaaaaaaaaaagctttaaaagctgaattttagaaatatttctagctgtgtcagtgagttcctcttttaatagtattttaaagtataaatctggtaacatacttagttcttgtagttcttttgttagtttttttttttttttcaggttaattacccaaagcctcatccatcctcaaggtttttaaattttatttttttaaaataaattgtgcattgtatttgtgagtttttacaatnnnnnnnnnnnnnnnnnnnnnnnnnnnnnnnnnnnnnnnnnnnnnnnnnnnnnnnnnnnnnnnnnnnnnncgatcaattttgatcaatgtttagtaaaccaaaacatgtactgtgtacaacggaaataatatggnnnnnnnnnnnnnnnnnnnnnnnnnncaagacagttaaattaagctcaattctatattttattagggctccattatgtcattcatnnnnnaanntacacatttttggtgtatgcttggtactagagattcatatatgcaaa

SEQ ID NO: 7340 - DNA, 688 bp, Macaca Fascicularis
cagggggacccaaatcactgctgattttaaatttttttttaacaatacatttttgtggtcagttccaacagcactgtccgtacttttaaaactggaatgacctccttcagatattgtgcctcttagtgccaaacccacagtgagaccaaaagtgtcaggtttttttttttttctttctcctttgcactaaatgctttgcagacacagcacagcacaaacattttgcaaattgcagcagaaattgaatttaaaaaggagggactttaaaataccttcttgacaaaaatcaacaatgcacaacttagaaagtgttcattctagggacaaaattaaataaacagaatgtccccaggagtcagcaggtcacagtctggctttgtgacagttgacaaggcctagctacatgggaaagcctgagaagtcactttggaactaaattgcctccgttttattttgtatgagtaagggtttgatctacaaaagagcgcacagggacgcactgagaacgcctgccagcttccccatgccctcacttggtttgtgttttaggttaagtagtcaacgcccacatcacttcactgtctcaagactgagcacttcactaaatggtagattttactgttaaagaccctacaataagattgttttatctgtacattttttcagatatttaactgtataaaaatgt

SEQ ID NO: 7341 - DNA, 801 bp, Macaca Fascicularis
  misc_feature (1)...(801): n = A,T,C or G
caggagtagatnanctgataatgggcttagaaatgtacaaaatgantttctgtagacaggatgatctgtaaccatgagtccactggacaggagaaactttgctgtttaaaatgaaaggttattcaggatttggaataatttgctaaaaaaagtaaaattaaaggtcagttcatagcattgtagcaaatgatggtacatattcacaacaaagtaatgcgactacatttaataaatagccacaaannnnnnnnnnnnnnnnnnnnnnnnnnnnnnnnnnnnnnnnnggacataatatccttgtgaagcatccttaaagaacaaattgcagctggtatttgggtgaatgnnnnnnnnnnnnnnnnnnnnnnnnnnnnnnnnnnaagttatgagccttgttctaggtacaaatgaaccttgtatttgnnnnnnnnnnnnnnnnnnnnnnnnnnnttacattcaattttttggtctttctgctatgaaaggtgtttattttgcctttgtcaatgtgtttgcaaccttaaataaggaaagggaaaaaaatagccctctgaactctgatcttttgctgcttctgtaaattttgattatgaagttgggagtgaggacattcaaaagcccatggtgaatttatatgcctttagaatattgtgcctgttttaaaatgtttgagcttttaaaacactttgttgaaacatgaatccttttttgtaaatgtatactcataactaattttgaatgctactgattgtgtaactgaatttttgtatcctaaaaantaattctttttcctaccttgaa

SEQ ID NO: 7342 - DNA, 706 bp, Macaca Fascicularis
  misc_feature (1)...(706): n = A,T,C or G
agagggggctgattccacagaattacgtcaagctgctgtagctcctggacgcagagcccctgctgaccctggcacctagggaactgcctgggggcagagagccaccttcctcctccgaggctctgggctgcacccacaggtacctccacacttgggagttaccatcatcacaatcagccttgggggtggggggtgggcggggatgggaacgcaccgcactgaactgtgattgtggatcaggagggggaatgtcaggattcgcagaatggacttttcatttgtcaagtatcgggacttgtgagttttaattatccagcatatagaatgagagggagggcagccttctgccacccgtgtcgcccccactggcagtcacatcaccagagccaccctggctccctctcctccccgagcannnnnnnnnnnnnnnnnnaagggaactnnnnnnnnnnnnnnnnnaggtctgcagagcgcatgcctggctccggcggcctggctgcgagaggctgctgctggtgcaggggagatggtcccaagccagagggaggcagagagacgtgcttctccagcctactcttcctagacggccaccnnnnnnnnnccacgtcactgcactggcgtcgtgcactggcgtatttgtaacaggcttctcggtgctcctcacccgtgtgctcttttccaaacaccaccttttgnntcaaggtct

SEQ ID NO: 7343 - DNA, 939 bp, Macaca Fascicularis
  misc_feature (1)...(939): n = A,T,C or G
caccctcgggataaaagcctccaggcgggcagggggtgacccctggagctagttgcgtgtcccagaatggagggtgttctgtcacctcaccctgagcctcaagagcagttcctggggccctggacccctctgtacagtccgtaggagaaagtcggaatgctctcgaaggccttgtcctagcctgggacaggccccctctcccctctctttgcaggccaggagggcctccttcctgccacgagggaggggagtcgggccccaggtcgcccccacccccagccctgcatgcaggtgccctcgctccgccccatcagtccctgcccctgcccgtcacgcagactgccctgctggggccgggccggagggtggagcagaaaggggaccccggagccaagcgaggaggaccaggcagccgccgctgccgccgctaagtcaccacctgcgcttaggtaggcgtcctgctcgccgactttcagttccttgggagggtgttgggtgttgtccttttcaaaagtgttttggagctttctgtgccccccactttccccctggcccccccccccccgtggccacttttctctggattttagctgtaatgtctttactctnnnnnnnnnnnnnnnnnnnnnnntgtttgggtcttttgctgttggaatgggaactcctcnnnnnnnnnnnnnnnggaacaatttggtaacacaccacagnnnnnnnnnnnnnnnnnnnnnnnnnnnnnccctcaaggagggttggggggcctgtccagagggtcttcagaagcccccctgggagggaggggaggatgagcacgcccagctcccctccagggtgtgacttggcccctctggcttgtctttctgtgccttactccttcctcctgcgtctcccgtccctggccccttctcgagtccttgtgcctctctctctttctctctttct

SEQ ID NO: 7344 - DNA, 1530 bp, Macaca Fascicularis
agattctgcacaagctccatttatcgttggttcttgcttctttccttctgtgtttttaatttttttaaaaaacattgtatgttctaaagaactagcttcacaaaaggtcggtggctgatgatctttcagctaagatttcaaatgtagaagaaagattcaaaatgctatcactgtgtatctaagaaggatggggcagatttcattttaccctctagtctccctcaatgcatgcacggatttatctgtacgctaagctctctgctctgcatctgtagctccttgtggattatattgtctctgtgatcagaaatgattttctcggatatgaacaccgtttctggctcccctaaagtgcatcctcctaatgggacccggttttacacttttcaagaatttgctgcactgacaaaagaattaaatgcctgcagggaacaacttctagaaaaggaagaagaaatctctgaactcaaagctgaaagaaacaacacaagactattactggagcatttggggtgccttgtgtcacgacatgaaaggtcactaagaatgacggtggtaaaacggcaagcccagtctccctcaggagtatccagtgaagttgaagttctcaaggcactgaaatctttgtttgagcaccacaaggccttggatgaaaaggtaagggagcgactgagggtttctttagaaagagtctctgcactggaagaagaactagctgctgctaatcaggagattgttgccttgcgtgaacaaaatgttcatatacaaagaaaaatggcatcaagcgagggatccacagaatcagaacatcttgaagggatggaacctggacagaaagtccatgagaagcgtttgtccaatggttctatagactcaaccgatgaaactagtcaaatagttgaactacaagaattgcttgaaaagcaaaactatgaaatggcccagatgaaggaacgtttagcagccctttcttcccgagtgggagaggtggaacaggaagcagagacagcaagaaaggatctcattaaaacagaagaaatgaacaccaagtatcaaagggacattagggaggccatggcacaaaaggaagatatggaagaaagaattacaacccttgaaaagcgttacctcagtgctcagagagaatctacctccatacatgacatgaatgataaactagaaaatgagttagcaaataaagaagctatcctgcggcagatggaagagaaaaacagacagttacaagaacgtcttgagctagctgaacaaaagttgcagcagaccatgaggaaggctgaaaccttgcctgaagtagaggctgaactggctcagagaattgcagccctaaccaagtctgatccaacctcttctacctcatctgatgattatcaatatgttatggaagctaaactacaagaaatgatctccattgtcaataaaaacaaaaatacttccaaaaaaaaaaaaaaaaaaaaaaaaaaaaaaaaaaccaaaaaaaaaaaaaaaaaaaaaaaaaaaaaaaaaaaaaaa

SEQ ID NO: 7345 - DNA, 816 bp, Macaca Fascicularis
  misc_feature (1)...(816): n = A,T,C or G
ccactgagatcnacaagttgacccgcaaggaggcccaggagtaggaggctgcagcgcccggctgggacggtctctccataccccagcccctctaactagagcggggagcatgccagagagagctcaatatacaaacgattgcctcgtggctcttagctgtggtttcttggaccagcggcatggacatttgtcagtttgccttctgacggtagcttttggaggaagattcctgcagccactaatgcattgtgtatgataacaaaaactctggtatgacacattttctgtgatcattgttaattagtgacatagtaacatctgtagcaggtggttagtaaacctcatgtggtagggcgggggggtgtattccttgggggatggtttgggccgaatggggagtggaatatttgacatttttcctgttttaaattctaggatagattttaacattctttgcagtcccagtccaaggtaggctgctgtcatagtcttctcactcctaatccatgaccactgtttttttcctatttatatcaccaggtagcctactgcgttaatatttaagttgtcaataggtatgtgtccctgttttgtggcataatataaaataactgaatttcatgagaagatctattccactggggtatttcagctttgaaaccaaatctgtatatctaatactaaccaatctgttggatgtgggttttaaaaaatgtttgctaaactacccaagtaggatttattgtattaaatgacctttgggtctgaaaagcttttttaacctcttgcttaaaacgcgtcttattttgataagat

SEQ ID NO: 7346 - DNA, 770 bp, Macaca Fascicularis
  misc_feature (1)...(770): n = A,T,C or G
aatgatgcacagagcagtcgctggaggggcacagatgcctgnnntgtcaggagggcgccaccatgggccagggttcatccaggaccccgtgctctgctcctcagccttgcagtcgcggtagcactgtggtggactgcccatggccgtgtggctttgggggcaagtgggaggnnnnnnnnnnnnnnnnnnacagggacaacaggcagagctgccctaaagcaggacacagggtgcggtactgacaaccctagcgtcaccccaaatccacgtccccacactccgggcatgggtgggacttgtgaccctgccctgtcaggtggaccagtggcccaggagccaggaggannnnnnnnnnnnnnnnnnnnngaaactttttgaaaaaccctgaatcaggtagagaaagcaaaaaaatctttggccgtaaaccgtgctaatttgttggcagcttctgtggacgacctccgttgagcccgggctgtgtccaggccctgggcaggcgggcaggagttctgcgtgggcctcatttcttgctgcagagaatcttttgcactaagtcacgctgtttcctcaaagaagctttgttttttgttaacgtgttactcagagtcacccaggcccctcggctgagggtgaaggtggggcgggaggcaggagggggctggcagtgccgcttgtgtggtgtcgctgcagggagtcgcggcaccttggtgccctctgagcacctggccgcctgctgtccccagtgcctgtgaaattcgtcatgagatgac

SEQ ID NO: 7347 - DNA, 2547 bp, Macaca Fascicularis
taagtggggccaaaatatggttgtctactgagacattagcaaatgaagactaaaatagggtgttttctgaacattttgagggaagctgtcaactttttcctctgaattaaaattgctaacctaggcgtttgaagctctaataactttatatgtaagaatgatagttggaatttgcactaatatttaaaaacatgttgaatcatgcttctttcacacttactttaagagagatgtaaattttgttcctgtcctctttctgtcattacaggtctggctcttgtaactgtgatcaaactgttcatgttctgtctgctacattttttctccatccatttttcctgctgcctcctgaaagctatctgatagcaaccccaagcagcaggcaacaggaaagttaagaaatttgtgtttcgtatcatgtttaggaacatctgataaaacctccagcaggttttaggaagtatccatgtatatttctggttactttctgtcatctctgattgaactcacctgatgaaggttcagtgctctgtggacagaatttattattttagatcaccttcttcgggaccttcaatcactgtgttttgaaatcatgagtttgcttttttaacttcatagggctaactttaaaatgatatgcactgttaattttaaagcatttgctgcagataattaaacttagaagtgcctttgacattaagatacaaatactacagaagaaaatacaatttcactttttaaaattggggtgtgaaaatcccattgcatattggaaataggcttttcatactaagcttcgtagccaggtgtccccagagtcttgttcctctggacgccactggggagtggcctgtggggtgctgattcctgagaggtgcgtgctggagacgggaaagtgccatctatgccaaaacccaccctcacaaacaaggcttgctgggaggcgtgctgggcttggccgtcagtatttgcagtgtggtaaactattgctggcacttccccttggaaataactaatgaggtcacaagttgggcacctgtacagatgtccttctctcatagttcctaatgcttaggaataaaggagaaataaaaaaatagagtctctgaaaacactgccatttgaatagcaagagaagtgctctcccaagccccaacttttgacagcaaagttgaggagaatgaggagacacagttgtttgcttgatctgaaacactgtttccaaactgtgtgacaagagcctacccaccactgtagaggtcaaagctgaagctgcttccagcagtgaaatgaggcaccacctcccccacactcctcattccctgcttaaaacatggatgctttcaaatttgtttcttgaactgccatcctaagatacggaaaatttttatagtgaagtgtctagttagcttatttccttttctaaaacaagtgttttcaagataactctattttacctatgtactgaatagctgtttctatctgaattatttgccttttaaaaattgataatatctctggatataacagaagttcttataaaatatcttaagaaattcactttatgggtaaacccaaggtttttgccaacttgctgcctagaaaataagggctagtttcagtttatacaaatagaattattaaacattttacagtccttgattggaaaccagacccaatctctaacaccacagcgtatcctgccattgacagtgtaatcacaattctccctttttcatttagctgctttattattaatactaaatgttggactgagcatttttccctctgtaattttcttccctcacatttaactcctgtagtattttattgttgttaatttacagtttaaaaatattaggtactattagtaatggttaaaaatagaaaaatgcgtatttttgtataatcaaatgtagtaaaatagttttatttttgctggacagttgttatatgattattgtgccacattttattgtgcataatatgaaaaacaactatgacagccttcagtcgggccagggtaaagctgcttaccacctctgccgtcagagggactcgtggtgacagcagtggtgtggccgcacacagcacactggagagagcgcagcacccccgctgcccaccagcagagcccctgctgagggaacgccgtgcagatgctgatgtgctgggtgaaatttctagtattggacataaaggtgtacagtgtcttgctgttattttatgatggaaacccgattttgaaaccaaaaatatctaactttatttaaggaaaggatactaatttgtactaacagggtgaaagctattcacatctgtcaacaaaatctgcttgctgcagtagtaactcaagtggttcaaacttgatttcctgagaaaactaaaacctttgtgcctaaaactgatgacttgagttcaagtgggatgagcaagaagatgtgttatcttgttgttcaacagtaatgaatgtgaaggaaattttgatggcttaataaaatttccacagcaaaaaaaaaaaaaaaaaaaaaaaaaaaaaaaaaa

SEQ ID NO: 7348 - DNA, 2364 bp, Macaca Fascicularis
atcatcatcttgatcataacaatactcaccattttcataacgattccattactcccagtgagcgtggggagcctagcaatgaaccttcagcagagaccaataaaacccaggaacaatctgatgttaaactaccgaaaggaaagaggaagaaaaaagggaggaaaagtaatgaaaattctgaggttattacaccaggttttccccctaaccatgatcagggtgaacagtatgagcataatcgggttcacaaacctgatcgtgtacataacccaggtcattctcatgtacatcttccagaacgtaatggtcatgatcctggtcatggacaccaagatcttgatcctgataatgaaggtgaacttcgacatactagaaagagagaagcaccacatgttaaaaataatgcaataatttctttgagaaaagatcttaatgaagatgaccatcatcatgaatgtttgaatgtcactcagttattaaaatactatggtcatggtgccaactctcccatctcaactgatttatttacatacctttgccctgcgttgttatatcaaatcgacagcagactttgtattgagcattttgacaaacttttagttgaagatataaataaggataaaaacctggttcctgaagatgaggcaaatataggggcatcagcctggatttgtggtatcatttctattactgtcattagcctgctttccttgctaggcgttatcttggttcctatcattaaccaaggatgcttcaaatttcttcttacattccttgttgcgttagctgtaggaacaatgagtggagacgcccttcttcatctactgccccattctcagggtggacatgatcacagtcaccaacacgcacatgggcatggacattctcatggacatgaatcgaagaagtttttggaagaatatgatgctgtattgaaaggacttgttgctctaggaggcatttacttgctatttatcattgaacactgcattagaatgtttaagcactacaaacaacaaagaggaaaacagaaatggtttatgaaacagaacacagaagaatcagctattggaagaaaactttcagatcacaagttaaactgtatttgaactatgtgcagctagctttgttttaatctgcttggcaaccagtgtagctgctgtaacaatcttattgttcaaatatataagagccaaactcttttccattccatctaaaatgttttcatttagtactcttctttcttcctactctatgaactttaaaacaaaaacaaaaccgagagcagcacatgcatccaggtatttatagattattgccagtgtttcttctgtatgctgtaagcaagggagcttaggtgttctttaatttatgcttgaatctgaaaaattatttctgacttactccatggcctccttataataagtagaagttttatacatagattattttcagcactgggcactgaattaggacagtcctcatctcattgcttggcccttcaagcaacctagctaaaaggtgctgatattttatttagtactgccaacttcaagtgattcatgtatcttgatttctgaaccaagatatatttatagttcatttttgggtttttatacccaaataggattctgcgttccagcattaaatctgcttcattttagaacttttataaaagcaacagctggaatatactcccagttttaaaatacctgatttaaagcaagtgggttatgctgaagtatataaagttttatattctctcaaatattgtattatctttatttgccagattttacaaatcttttaagagggctgtaacagttgctgctagtattagggttccaccagtatttagttttcacatcattctaatgtatagtttcaagtcttactagacaatctgaattccactacatttctgttggctccaacattccttttagcttgaccagtctaatttaaagtgtgtttgttggaggtcattaatgttacttgtacaatgctgtcactgtgtgacatccatatgaattttggtatatatcacattgcattcaatcagctgtgattatgcttagaaatactatagtaactagatgcagtgtgaattttttccattaacaaacaataaaagtcagtggcttaaatgtgattatggtcctgcaaggtgattcttgctaaaatatctaaacttttgttttaactgaatcatttttttgtaacttaaaaagctggaaaatatcaaatgctgttttttttttcattgtcaacagtggtgtgtcattttatgtatgttcctaatgcttatggaactccaaaataaagttactcagagagagcaaaaaaaaaaaaaaaaaaaaaaaa

SEQ ID NO: 7349 - DNA, 728 bp, Macaca Fascicularis
  misc_feature (1)...(728): n = A,T,C or G
gtaacttgctttccccaccctgtttctgggggcagagccaattgcccaatttctaccctaatccaaagtccctggtgtgggtggggttaaacgtgctggtacatcctgggtgatctaagagtgagcgccaagtgctgagaaggagcacagaactccctggagggtggagatggagcacctgccctccatggcagggtacactctccccacagccttcctccccaccatcccgtggggactcttgggatttaagcactcatgtctctcgaggcccagagcccactccatttataggcacatctccctcatttcctaggtcactgcccctttgtttacagctcctgcctcctccttgaccacagcctggtttacaaattccaccagctcccagccccacctgccaaagtcccaggtttacaagccacgcttacnnnnnnnnnnnnnnnnnnnnnctttcctctctcccctccagtcttctcattggagtgacctgaaggtgtggcttcctccactttttctcagtattactttgccttagttttccccaagagggaaggctggaaatcttaactctgtacccgttgatacttatttaattctgtttctcctagtggttcacaattgaactgaattgagatggtgtcgggtggctaaggagacccctcacctctcctccctcattgtgccgcctttatcaattgcctgtcttgttttgttttgtttttaac

SEQ ID NO: 7350 - DNA, 713 bp, Macaca Fascicularis
  misc_feature (1)...(713): n = A,T,C or G
gacatttggtaagttatgagacaagatannnaggttgtttgataaaccagaattgaacataattttttaaaaatttaaatcacaggaatgtttttcttgaaggcatccggcatctccagtnnnnnnnnnnnnnnnntttttttttctttttccgacaaagaaacactacatcaacactcttggcggggatctggacaagaagactccnnnnnnnnnnnnnnnnnnnnnnnnnnnnnnnnnnnnnnnnnnnnnncattttaaaactctctaggcattgaaaaccacccaagtgtcccaaatagaagggtaaaatataatcagtcactcagtgtaatattatacatcctttaaaaatgttattgggaaatgttttatgatctgtaagtccaaggaatcttctcccaccatttctttctcnnnnnnnnnnnnnnnnnnccacacttctttgttccaattggcatgtaaatttggttttcccgccaaatgagtcannnnnnnnnnnnnnnnnnnntgatttgaacagatgtgtgtcaatgttacttggaaaactagatgtcaataaccagagccacagaaaaaggcagtggttgcaactctgtaaaaatgtatgcatgcacacagacaaggactaaagtggaaccccacacaggaaaacagtgggctgtactccagtgctgggacattgaatgactgtacgatgcttttgatttccg

SEQ ID NO: 7351 - DNA, 1768 bp, Macaca Fascicularis
aatcactgtcctgtgggagctggtttaggctttagtgcagatgaaaacaggaaaactgttctcccaggccctatttgtgtcatttctgcaacttgctctgtccctgagaaaaggacctcttgagtccagcccgctgcacacatgatgccaaggggttcgctggcacgtcagagccaaagcacagaaatgtgtcattcaaagacaacagtgaggtggcctggcttccaggaatcattttctatgaaaaactcagtgtagaaataaatgatcacaaaatgtggcatgaataacgcaggttgaagaaggtagcaagtaagagagttgataaagacagctagagagaaagtatttatactcttaaaagatctgatttaagataatccggctgatttctataatgtgggaaatcctgctaaattaattcagtaactctaagttaattacagggcacccaaaatgcttctttgggaaccctatagttcaatttttagcagtgattttatcacaggctattgtgatcattgtgaatggttgattaaaatgtaaaaaggtggaccaaaatcaactgtagcaagagtgaggggttgagagccaggaactcaagaatattgagtccttccaaggagcttgagtcatagaatgcaggagccaagggcagacccctgctgaaacccggctctttggcagtgcaacaattaagcttcttaagagtcagcagagagccccaacactcagatagctccttcagcacccaataaaccatacttgataaggaaatttatagaagcaaacatggaattttataaggactgagtaatgtatttatttcagtacattaatacatcattgaactgaattctctggaaaggaaacaccaccattcagtctattttatctcaagagcagactgactctgggttatagtgctcagattcaatctgtccttgttattcagacttccagggcagtagtcaagggaagatatcatttggataatgaaatgatggctgtggaggtgtctgctacctagcagcaccaatacactggctaccaaaatataaaaatatcatcctggaaacaagttagttcagcctcacacggcagaggggaatagcatattagctgtaggtcacctctctttaatttttaagtgttttacttgtggggttttcctccccaagaaatggaagcttaatcttcctgttattttctgaataaaaaaataaaataatttgtatttattgagcccagaccatggcggtggtggttgtcaggcatactggatgtcagaagaaaataaatcaactagtgaattttaaatttgatccccccaaaactcacaaaaataatctttccatcaaagttggttcctttcgccagtggcaataaagagatttttaaatcctacattttattttcctttttaattattattaaaagttaaaaagcagtaacaaatcatctatcagaaaattgggcgatgtaaatagccaaaacaatcttgaaaaagaaggacaaacttgaagttcttacatttcctaactccaaaacttattataaagctgcaatgatcaaaatagtggatgctggctaaagacacatatatagacccactgtaatagaatagaatccagaaataaactctcacatactggctcagattatttttcacaagggtgccaatgggaaaaaggcagtgtttttaatcagtggtgtggggaaaattggatatccacatgcaaaaaaaaaaaaaaaaaaaaaggccaca

SEQ ID NO: 7352 - DNA, 722 bp, Macaca Fascicularis
  misc_feature (1)...(722): n = A,T,C or G
gatatggttcctaatatccagaggtgcaaattgtggtnnnnnnnnnncaatcgcaggctgtgtacacacaacnnnnnnnnnnnnnnnnnnnnnnnngaaaaaaaagagactactaataatggacacacattgcggtggggattaattggctattaagatccccatcgcaggggagtgaggcaccctccgcgatgtggggagtaatagccccctctcccccgctggctattatgatctacatcgcacggcagttcaggacaccagccctgccccaaccttgacccagacagtgggtgtcatgggaccacctcagggtgggtgtcagctcagctctaaggtatccctgctgccaaagaccaacagttcctgcttgtttcaatctggccacagggtctctgttggtgagacagatgaccatgaggcagataccctgaaatctagcacgaaagagctcaatgcccccatgagaggcaccatagcactcaaactttgcagacatactagcgaaggccannnnnnnnnnnnnnngaggaacaatctgaccaagatcctggggtcctgccacacagcccttaaaccagggactggaaactgtttccctaaagagctgggagtcagtatnnnnnnnnnnnnnnnnnnnnnnnnncctcaaggannnnnnnnnnnnnnnnnnnnnnnnnnnnnnnnnnnnnnnnnnnnnnnnnnnnnnnnnnnnatgactg

SEQ ID NO: 7353 - DNA, 748 bp, Macaca Fascicularis
  misc_feature (1)...(748): n = A,T,C or G
gagacagagaaaaannnnnctactacagcagtggggtccagaggttaagatatattagaattatacagtatcggtttaaaaatctgtatgcataaagaatgcaccactcaacttttttattcataagctaatatttttttaaagttatattaggattttttctcttttgcagctacatttgaaagtgatagcgtaaagagattttaataagttatcactttttctgctgatatattcattataatggcttttttgaaagttcctttnnnnnnnnnnnnnnnnnnnaatcttaaatatagacactttgcaatatttctaatgctgtttaattttggtacagcttccacattgcatgttcattttagcacattttggtatttgcaatttgatatatttcatggtggcaaaatattagctctattttgggacatttaaaaatagaactatccttgttcaatagcataggaaaatgttcttgtgattgtcagggtctcctaatatttatctcaattcttttataagtctatggaaactatttaattattttcaaacgtacacacttttcttgtaaatatgtcacatctgagttcaaaaaaaaaaatactttgaannnnnnnnnnnnnnntgcatttttttcctgtatatataacatgccttctttcagaatgggaatatatgtgtccctcccaacnnnnnnnnnnnnnnnntgttatctttatatgtcaaactggttgannnnctgtactga

SEQ ID NO: 7354 - DNA, 758 bp, Macaca Fascicularis
  misc_feature (1)...(758): n = A,T,C or G
atatcagtannnnnntaacctttgtgactgtttcaatattaccccngtgaaagcttttcntaatgtgactttgagtacattttaattgccttctatttttaaaactcaaaatcattagttgggctttactgttcttgctattgtatggcatatacnnnnnnnnnnnnnnntttctactcttgaccaaagttttgtaagaacaatataagatttcgggtaggggtatggggagggaagatattttattgagaactacttacaannnnnnnnnnnnnnnnnnnnnnnnnnnnnnnnnnnnnnnnnntagactctaacagcttttgctttaaaattattaaattgtttcttaatgaaaaagaaaagatcttgctaaagttaaaataaagaacgtttcaccttttaaatattttattcttatgtggacttatttccacaaaactttggtgataattcttgagacaaaaggtggttaagtagcattattatgtaatgtttatatcccatagagtttttaatagaagagaaatccatttcttctgagggtcactattaacagtggacttccttaaatttagtttaatgattgtaatgggtgctgcgtttgcacnnnnnnnnnnnnnnnnnnnngacgaattgttgttaaaaattatagcaaaaagaaatgtaaacttggttaaaatcttttcactctttgtattgttttttttaaggtttttattccttaaatgtaaaatgacnacctaattttttgatgtaaa

SEQ ID NO: 7355 - DNA, 498 bp, Macaca Fascicularis
cgacatagagtgctactgtgtgcatgttgctgaggagtgatgagcatgagtcacactcattttctgccttcaagacctggtagtctgagtaggggtcaaaccaatcctacgtatttctatactacagttgaaagtaaatgcctcagtagaagtaggaataaagatttgatagcgacccagaagggtaagggatcacttgttggttgggaaatcagaagaggctttataaaggagatgatattgggcaggggggcaatctaggttgagcacacagagatacaaagaagagaaaatggtgggtgtgctcaaggatggtgaatgtgccatttatcttgtatatagtttacatgcaaaagagcagagaaagataagggaaagttaagccagtattatcaccacatcccttgagaggcttgtactacttaaggttgtgatcaaaggagaactattaaaggttttgtgagcagaagagtgatcactagactagtgattcagaaa

SEQ ID NO: 7356 - DNA, 613 bp, Macaca Fascicularis
  misc_feature (1)...(613): n = A,T,C or G
ctcatgactcaacccagtcctgtggtccccacccaaaggctgactcagctcacgagcactgttttccacatccctatgattttatctccaaccgataagcagcacccactgcttagcccctcccagccaaattatccacacaagccctagcttccaagctttcagggagactgacctgagtaataaactcctatctcctgcttagctggctctgtgtttattaacctctttattacaacnnnnnnnnnnnnnnnnnnnnnnnnnatctgtgcagtagggaataagaatnnnnnnnnnnnnnnnnnnnttactccttaatacttaattaacagcaatactcataaagcactatttcnnnnnnnnnnnnnnnnnnnnnnnnnnnnnnnnnnnnnnnntgaaccatgacactcaagttcttcaaactgataccttaaaccttctgggctttattcacttccaatatatgatggaaatcaagtttcattgcttccctttnnnnnnnnnnnnnnnnntctgattcatgccctaactgcatctagttctttctcctgcagnnnnnnnnnnnnnnnnnnnnnnnnnnnnnnnnnnnnttatcctcattcacaccatgtat

SEQ ID NO: 7357 - DNA, 723 bp, Macaca Fascicularis
  misc_feature (1)...(723): n = A,T,C or G
acaatgagctcaaattggaagagtccaatggaatcggggggatggtgtgagcgcccctgctcagtctttgacagttgcatgcagaaaagcagctggtgtgggtttcggtgtcaatggaagggccaaagatgggtggccggctcgtttgggggattcgggnnnnnnnnnnnnnnncccggaaaccaccacttcttgcctccgaagtcgaatctagtgatgatctcggcaccagcaggaaatgacatttggtgtctgcccaccgcggcnnnnnnnnnnnnnnnnnnnnnagttccgccgaattgactccactggatttgtgctttcttgagtcagaggctccctggggttannnnnnnnnnnnnnnnnnnnnnnnnnnnnnnnnnnnnnnnngtttttcatctgggatgaaaaagcctggttctcttgaaatgcttgattgtacttactgagctaaacaagcctcggtgactgtggttgatttgcctcaaaagtcttaagttctgggtttgcagactactgtgtagcagctgtgtgtttaacatactgtagctttttctcccttgggggcacatatgaataggatgtgttgatgtggactctaaactgtaattttcttgtaactattttggaatgatgcatatttctaatgtttgttatannnnnnnnnnnnnnntgctgttggttgctttttttttttttaaggaaaaaatggcctgaaaacat

SEQ ID NO: 7358 - DNA, 1241 bp, Macaca Fascicularis
  misc_feature (1)...(1241): n = A,T,C or G
caacaacacttccgctgtgtgtagcaacatgtttctgtccaaaacaatttaccccgagggaaataaaagaagggagatatctcccaggaaattaccatttgtttctactactgaaagattttcatctatttatttgagaaaagtgagaagcttctttgtgctgagtagatagtaagcgctgaaaaagcatgcgacgtcatgtctgttaaggaatttggccacatttcttgaagctttcggcactttgcttcatttcctgcatactatttactgaccctatgtaacagggcttttcagctgtattagaacatgtagtttttctgttaccaagtcccagctcaacagtctctctttaatattccgaaaatgtttgatgtctactagccaagactatagtctgaacaacgacattgacaatggaccttgatcttcctttgaagaacaagtgccttgtatcactttgtcttcctctagtagaagtccctcgtatggttatagtatttagtttgtactttttgcatttaatcaaagcatctttgtaattcacaatttttaaatatttttttcaaggactagacatgaaggtttgaagtccaacaggcaactaaagatgtgtacaaaccccacacaaatcagcctccattctaaggccgttcctgctctacacttttttgttttttcttttttgaaaggaagtcttgcttttctnnnnnnnnnnnnnnnnnnnnnnnnnnnnnnnnnnnnnnnnnnnnnnnnnnnnnnnnnnnnnnnnnnnnnnnnnnnnnnnnnnnnnnnnnnnnnnnnnnnnnnnnnnnnnnnnnnnnnnnnnnnnnnnnnnnnnnnnnnnnnnnnnnnnnnnnnnnnnnnnnnnnnnnnnnnnnnnnnnnnnnnnnnnnnnnnnnnnnnnnnnnnnnnnnnnnnnnnnnnnnnnnnnnnnnnnnnnnnnnnnnnnnnnnnnnnnnnnnnnnntggccctacaggcttcacagtcagcaggcccagaggaagtctggtgtggttgattaagaatccagctaactctcacactctcactgcctctctctttctctcaccttccactgatttctcttccctcctatgttgtcttgggaaaaggcaggtgattacaaaattcttctaattatgtattttaattaacacaaaatctttacaaaacagtgttaataccagcccaccatggtttatattttttgctgtgaaaaaaaaaaaaaaaaaaaaaa

SEQ ID NO: 7359 - DNA, 798 bp, Macaca Fascicularis
  misc_feature (1)...(798): n = A,T,C or G
gtacnagtnnncngtgtaccagnnnnnnnnnnnnnntggtgggtggacagtaatacatggtagagggtcnnnnnnnnnnnnnnnntgctgtttgttttaaatacccttggggttttttttcacccttagaaggggagcatcagttttggaaagtgtaactgttggagtatagaaggcagtggtgtatgatcttagcctcttcctgatgcctgaatccagccagcnnnnnnnnnnnnnnnnnnnnntagagcaagttacccatcaccagcatttgtacagagcagggaattctggttttagtccattggtagcattgtgtgtatgaggagattcagcaccacagacagccagctgcaggactcgagatccatggcttctttccatcacaaacgggtagaaacacattcactgcttcaggttctaatctgtgtgtctccttatgactccatttctgtaggatactctgtaactttgatatatgctgtattttctttaaaagatttagatttttgttcagcaagctagccatacaaccattgtatctcttcctcatcagtatggttttagagcacagctcagttattaggctttcattgtctactctttcaatacatgtacatctttactgtttgaaaggtgttacagctgtcgaagaatccttatggacctgaagataatttcttgtgaagttgaatgcaagtgtactgtcattcatagtgtttatatcacaataccaggaatcttcacttttgctaccttgatatagcattgggctatcatgttacaacatgaaataca

SEQ ID NO: 7360 - DNA, 128 bp, Macaca Fascicularis
atatgcgcataataacccgtgcccataagttgtgcactatccccgcgtgagtattttgccacggagaaatatgacagcacagcaaacactaatattgtttgaggtagttaaccctaagttatttttct

SEQ ID NO: 7361 - DNA, 446 bp, Macaca Fascicularis
ggacccccccttacttgggacgggatgaatggttcaaaggagtgaggttgttaaagaacatttttttccctctcgttttctctttttcttctccctgattccttgtagagctgttgcagttttgagaggggcagttttactttttttgtcccttggcagaaagaagtttccacacctcttagggatgggcattaaactttttttgccccctttttttcccctttgaggggcatttaagatggagaaatcagttgtggtttcattgaatcatggtcacctgtatttattgctgggggaagcctgagggtggggggagatgatcatgtgtgcttggggttggctggaagccctgggttgggggttgggggaggagtaataggggagtcagggtgaaaatttgtgggtattttttttacttcttctctggttcccacgactgtgacacg

SEQ ID NO: 7362 - DNA, 704 bp, Macaca Fascicularis
  misc_feature (1)...(704): n = A,T,C or G
accccggcagatgactacnnntttaatttagatgataatgaaggagtttgtgatcnnnnnnnnnnnnagatactaaattattagattccatggaaacttgggactgttatctacctctaactgtgtaacattttagacttcttaataacctaagtatttaaaataatgaatgtaacaccttttttagttcactgattctgaagtgttcttccctaatactttctttacttcacaaaacttcaaccataaaaacaaagggctctgattgctttaggggataagtgatttaatatccacaaacctccccactcccaaaagtaactgtattctggatttcaacttttcttctaattgtgaatccttctgttttttcttcttataagaggaaagttaaaggacactacaggtcatcaaaaacaagttggccaagggctcattacttgtttgtcttatatttttactgccacaaaactgcctgtatttctgtatgtccttctatacaaacagacattcactgccacttgtaaagtgaaggatgtaaacgaggatatataactgtttcagtgaacagattttgtgaagtgccttctgttttagcactttaagtttatcacatttcgttgacttctgacattccactttcctgggttataggaaagatctgtttatgtagtttgtttttaaaatgtgccaatgcctgtaca

SEQ ID NO: 7363 - DNA, 738 bp, Macaca Fascicularis
  misc_feature (1)...(738): n = A,T,C or G
gaggacgtgagnnnnnnnnnnnnnnnnnnnttctnnntaaactgtatntnnnttccaaagtacatagaaattaacatcctacatgccaaatccagtccattgtggacagactgtgacaaagcctcaaggaacagatcattccctgcagtagaaactgttctagagcaaagttaaaagcatctcacttcatttatcaggcgaacctgaccctgaaaccatacctaaccaggagagcacagctgacatttcatctcacttccaaatctggttccaaagcacagtacctaaaaaagtcacaagtatgctttctcccaggataaacaataacagtgaaaatctattaatgtaatttgttcccataatagaaaaataagtggtaattttagcaggtgttgaaatacatttcttaaaattagtacccattcctgataacatttctttattttgggtaatttctttagcttgggtaaaaaaaaagtcctaacttgataaggctacctaacataaaactaccaaaatagaaaaaatacatgcttcttggtagaatattaggaacagtggaatcagaactagcctgttgtcccggctagtattcactattgtcctggaaatcctgaccagcaaagggatgtgggatagacaggtacaaatactgaaaggaaggggaaactgtcatttccagacagtacagttgtcagtccaagataatcaacagtcaagtccatagaaccattctga

SEQ ID NO: 7364 - DNA, 1327 bp, Macaca Fascicularis
  misc_feature (1)...(1327): n = A,T,C or G
acaacaacaaaagagagatgctttcagacaaatacaccattccgtctcttgcttcgccagcaaaatagtgtctcctttctcaaaccctaggcacccaggtcctgtagccccacccgaccactcttagtggaaagaaactggacgggtgattttcaaagacatggggaaaggtctttgctttccggggtcctaatgtgcaggcttccagatcctgaaaggtaacttcatgcaagaagaaggcagtcctttctctgagcctttttgctcctcctccagacttggatgtagatgtgcgtctgacaaatccagaaagcagtatttcaaaagttgctggtgtggttccaaataggtcaccctcggcaaacattccactctgggctttccagaaaccacacaccagagtataaaagttttcctgccctcgttttacctactcgcctctaaccgcacaaccagatttgaaatactggcagaagtggaggctttgcagcttacaacactcgattttgtatgttccgtgggatttctggaggttgcctcattttatggctttgggatggtttgaattttttccttgctgagcttaattgagatgcctcaggaaagagaacaaagcgcaggcatgccagacctcacggggaatggagacgcgagtgtggacggcttcgtggaaggagtgtctcatctactcaggacccgaagagtgggaagcagagtgtcccctccacccagcaaagaatcaggccgtccttcccctgcgggggtcagtgatgccagagagatggcagaggagttaaaatcactatgaaaaaaattgtgccccgagggcatcatcccacacagacacctaggcttcatactgaaatggaacagtgaggaatgggcaggctttctgctcgtttcagtctgggagtgggggcaccgttcatacaagttgtcccatgatcatgataaaaatgtgcgtgagagatccactcggaagacagggatgaggaaagttcactttcccgaacgtacagataatttggcccatccacaccaaccatctagtggatatttctcaacaccatcacacccttctggcccctaaaaatactcattttcattaataattgctggggggaagaagaaatatttgagtaagacatgtagtttccctttagagtcattttttaatccagtaaattgcaaagccaggccaggcacggtggctcactcctgtgatcccagcacttttgagaggctaggtgggcagataatgggagctcgggagtttgaggccagcctgggcaacatggtgccnccctgtctcaaaaaaaaaaaaaaa

SEQ ID NO: 7365 - DNA, 286 bp, Macaca Fascicularis
cacactcagatgagggaatcactcttaatacatgggagtgaagtatgagcattaaacaagcagtttatcagtcaagctaagaagcaaatacagaacatgtccattgtagcaacttatggtgacggtgctggtgctcggagggtaagcaggttaaggcctgcacagctcacttcttagatgacctatgtcaagactcgaatgtcacgagaaaaaaatactcctcaccagacagtacatgttactcaacacatgagaacacaagtttataaaggcatttagtttattt

SEQ ID NO: 7366 - DNA, 714 bp, Macaca Fascicularis
  misc_feature (1)...(714): n = A,T,C or G
ctcataggacgtcgcttgaattcanntccacagtcnnnngctgccctttgcctcccccgacgccccagctggtgccccagagaggcaggatcgcagcggtcagaatccacgtgctttcctattcacaggctgttctgactctcagagccaacagnnnnnnnnnnnnnnnnnnnnnnnnnnnnnnnnnnnnnnnnnnnnnnnnnnnnnnnnnnnnnnnnnnnnnnnnnnnnnnnnnnnnnnnacgtcgaggaattggaaagatttgcacaccctccagaaaggagagacgcaatctcccctccctcccatcccgcacctgcgctggaacagcttcctctcactgaacggagacgcccccttggacgaactgcctaattgtttggttctgaggcctggtttgctcttaattaatatatgaactcctcagaccttaaaccttttcctaagctttctttactgcactggagttctgactccctttgagttgtgtgttaccgggggggtgggggttgcgggttttgttgttttttggggctaattggnnnnnnnnnnnnnnnnnnnnnnnnnnnnnnnnnnnnnnnnnnnnnnnnnnnnnnnnnnnnnnnnnnnnnnnnnnnttttaagagtttctgagggtgaggctcttatttttttttcaagggatcctgtctatttcctgcacttcaagaagaatcaaaatgttcctgaattcaa

SEQ ID NO: 7367 - DNA, 2608 bp, Macaca Fascicularis
agaatgccctgcgcggggcggcggagcgggcgcgtgcggcggctgttgcgagagagatgagtcgcggcgatgagcccagaaaagcagccccaggaagaggatgaagttgattccgttctcctttcagcgtccaagatcctaaattcctcggagggggtgaaggaaagtggctgcagtggcacagaatatggctgcatagcagaatcagaaaaccaaatccaaccacaatcagcattgaaagtccttcagcatcaattggaatcatttcaggctttgcgaatgcagactttgcagaatgttagcatggtacagtcggaaatcagtgaaatattgaacaaaagtattattgaagtagaaaacccacaatttggctcagaaaaaaatctggcgtttggtgcacgcattgaaaaggatttgcctacagagaatcaagaaggaaacctttctatggagaaaagtcgtcattttaaggattccaagacacttcattcagtggaagaaaaattaagtggtgatagtgtgaacagtctctctcaaaatataaatgttccatcccagatgcatttcgaggacactttaactctgagaacttcaacagacaatttatcttcaaacataattatacacccttcagaaaattctgacatcttgaagaattataataacttttatcattttctacctactgcacctcaaaatgtgatgtctcaagctgatacggtaattctggataaatccaaaattactgtgccttttctcaagcatggattttgtgaaaatttggatgacatttgccattctatcgaacaaatgaaagaagagcttcaaaagtcacacgatagggaagtggcacttgcaaatgaacttcagactttaaaaactgatccaaatgttcaaagtaatgataaatatgacctgtcccctattcaccaggaaaaaatgaactttattaaggaagaaaacatggacggtaacttaaatgaagatataaaatcaaagagaatttcagaattagaggcattagtaaacaaattactccccttcagggaaacagtgtcaaaattccatgtgaatttttgtagaaaatgtaaaaaattatccaagagtgaaatacacaggggaaagagaaatgagaaaaacaataaagaaattcccatcactggcaaaaatattacagatttaaaattccattccagagttccaagatacacactgtcattccttgaccaaacaaaacatgaaatgaaagacaaagaaagacaaccatttctagtaaaacaaggatcaataatatttgaaaatgagaaaacttccaaagttaattccgttactgaacagtgtgttgcaaaaattcagtacttacagaattacctgaaagaatctgtgcagatacagaaaaaagtaacagaactggagaatgaaaatctgaaccttaagtccaaaatgaagcctcttatctttaccacacaatctctcatacagaaagttgaaacatatgaaaagcaacttaagaatctggttgaagaaaagagtactattcagtctaagttaagtaaaacagaagaagacagcaaagagtgtcttaaagaattaaaaaaaataattggtaaatataatgttctccaaggccaaaataaaactctagaggaaaaaaacatacaactttctttagagaagcaacaaatgatggaagcattcgatcaactaaaaagtaaggaacacaaaactcaaagtgatatggccattgtcaataatggaaataatctaatgagtatagaaatggaagcaatgaaaaccaatattctactgatacaagatgaaaaagaaatgttagagaaaaaaacacaccagcttctaaaagaaaaaagctcacttgaaaatgaactaaaagaaaaccagctagaggtaatgcagctaaaagagaaagaaagattggcaaaaaccgaacaagagacacttcttcaaataatagaaacagttaaagatgaaaaactcaatcttgaaacaacattacaagaatctgctgctgccagacaaattatggaaagagaaattgagaatattcaaacctaccaatctactgcagaagagaattttctgcaagaaataaaaaacgcaaaatcagaagcaagtatttataagaatagcttgtcggaaattggcaaggaatgcgaaatgttatcaaaaatggtcatggaaaccaaaacagataatcagattctaaaagaagaactaaagaaacatagtcaagaaaatgtaaaatttgaaaacagcatcagtagacttactgaagacaaaatacttttagaaaattatgtaagaagcatagaaaatgaaagggataccttggaatttgagatgcggaatcttcaacgagaatatttaaatttaagtgataaaatttgtagtcagcataatgacccttcaaaatcaacttatatttcaagaagagagaaattccattttgacaactatattcatgaagatatctctagtcctcggagtaggcctttggcttcggatttgaaaggaattccaagtaaactatatcagttgcttccatccaagatctataaataaacggctaaaatcaaaaaaaaaaaaaaaa

SEQ ID NO: 7368 - DNA, 661 bp, Macaca Fascicularis
atttttttgtctatgttctgtttcacttatgtagattattataaattgatgtaaaccacgtgagaggaaaatgttaataaaaaaggcaaagccccaacatttgcacaaaactcagccctggtgtgtggatgtttgtgttcgcagtggtccagggaagccaccaatctaaatatttaactcttccagctgcatccagatgcgagtttccaggaatctgtttacctaattcactccccttgagcctccctgtggcccatgggggctggggcagagctgcggggaggtgggcttgagccctctccttgctcttcagaaaggcctccagatcggccagcatccaggctgcttctggctcacctttgccatgtgctgctacagtacaaatgtcccacccgggacctggccattggtgtgccttgaaagtggcgtgacgttgtccactggagaggaagcatcttctttgatgtaaacgcttctctacactttccttccaagtggcacatctttgaggcagccttttggtctgatctgcttgtcagagaagctgggtctccgagggcctaccctccctttgggtgaaccagtggcatgaatatcggctcccaccagccgaagcaactggacactgagtttattctgaagatcaggaacagatgtctct

SEQ ID NO: 7369 - DNA, 747 bp, Macaca Fascicularis
  misc_feature (1)...(747): n = A,T,C or G
ttgcccttnnnnnnnnnnnnnnnnaggggttnatnnttcccaacgcacatgcgtgccctacttgggggccttactttatagaacgagagcgtccgagctcccctaatgattctgactagttctctcctggctgaggatacaggagtgggacatccaccctcagatccctcagagcacagaaaccttcagcttggctgtctcaagtatttcttccagtttccctgtgggcctctgatgtttgagtttgatggctgctannnnnnnnnnnnnnnnnnnnnnnnnnnnnnnnnnctcgcagtcctagtttgtttgttgttttccatttcatttcacttannnnnnnnnnnnnnnnnnnnnnnncttgctcgtttaaactgttcacagagtnnnnnnnnnnnnnnnnnnnnnnnnnnnnnnnnnnnnnnnnnnnnnnnnnnnnnnnnnnnnnnnnnaaaacttgaaannnnnnnnnnnnnnnnnnnnnnnnnnnnaattatatttgctttataccaaactatggagaactaaaagtacattgtacaaaatgtttctagtgttttgtatgtgacctatttcaatatttatattaccagatcagtgctttccagcaaacgattctgttaaataatgtagccagtcgctgttaatnnnnnnnnnnnnnnnnnnnnnnnnnnnnnaacnnnnnnnnnnnnnnnntcctgcttatttttgtctaaactaagttaatcatggtagcagctatgattc

SEQ ID NO: 7370 - DNA, 733 bp, Macaca Fascicularis
  misc_feature (1)...(733): n = A,T,C or G
tcaggccctccaancncnntgtgttccccaaatgttccatgccnnnctttgtatcactgactgttatannnnnnnnnnnnnnnnnnnnnnttcctctgaagtaaaagatnnnnnnnnnnnnnnnnnnnnnnnnnnnnnnnnnctagtgggttatatttnnnnnnnnnnnnnnnnnnnnnnnngaaatgactatttaactttgtactctggacagaggagctgtatatacaaggcattttcccaacaaaaacatactcctatctaaagaaatagggaaatagttaagnnnnnnnnnnnnggagccacacaaatgcggnnnnnnnnnnnnnnnctaccgcaagctatgtgacttgggnnnnnnnnnnnnnnnnnnngtgtttctgagtcctggtctgtaaaatggggattatactccctcagtcagtaggttgggaaaaagtttgagtnnnnnnnnnnnnnnnnnnnnnnnnnnnnnnntacttaatgagtatatatatannnnnnnnnnnnnnnnnnnnnnnnnnnnnnnnnnnnnnnnnnnnnnnnnnnnnnnnnnnnnnnnnnnnnnnnnnnnnnnnnnnnnnnnnnnnnnnnnnnnnnnnnnnnnnnnnnnnnnnnnnnnnnnnnngaaaatttatattaactttttaagaactttgttcaactttcaactatcatagaatattaacccaggctatttgctctgtccttcctattgtactttgcacattcc

SEQ ID NO: 7371 - DNA, 690 bp, Macaca Fascicularis
  misc_feature (1)...(690): n = A,T,C or G
ctgtttttttnnnctgtttatttctgtttggtttatattctggttgtcttttctttttgtaaagaggaaacaatgtacagaaaaacaataaactggttgtatggccatagctatccaaaaagcaagagacaaagcaagacaaatattcacacaaaaatgacgtgtgtcctctggagggtcagagatatacaatttcttttgtacagatgaaaatcaatcagctgtttagatttagaaatctactcttgctggtctttgtaagttgcatgaatatttgactttgaaaaaatatcttaatgacatggggcaaaaagcgcaatctaaatggtagcctttactaatgtgtatggaaagaggtgttcctcattatctaatatttcaatgtgttaagagtttaatttttttgttatcattttaaaaagacaggattataaagagatatcaaagcacgattttagataacctaaatggcccagcctatacgaagttgattatatctcgatgtctgtaaaagattgctgttcttggagtcttgaggtcttgtgaacttgatttcctgctttctttcattttttcgaatttgagtaataatacattttgttatattccttttagtgtaagtttcttattttggacaattttatgggaacgtgtgcgttctctatgtgagcttctatcgtattcctgttt

SEQ ID NO: 7372 - DNA, 743 bp, Macaca Fascicularis
  misc_feature (1)...(743): n = A,T,C or G
tacagacgtgagccagcacgcccaatctggccaccttttataaaaagatgaagatgtcagaattccttaataagattctggctctgctacccagactggagtgcaatgcacgacatgatctcagcacactgcaacctccatctcctgnnnnnnnnnnnnnnnnnnnnnnnnnnnnnnnnnnnnnnnnnnnnnnnnnnnnnnnnnnnnnnnnnnnnnnnnnnnnnnnnnnnnnnnnnnnnnnnnnnnnnnnnnnnnnnnnnnnnnnnnnnnnnnnnnnnnnnnnnnnnnnnnnnnnnnnnnnnnnnnnnnnnnnnnnnnnnnnnnnnnnnnnnnnnnnnnnnnnnnnnnnngccccgaataagttttaaataaccaatattttaaaatattttaatagttatatagcactttaattagtttgctgaataatttagcccaagggacaaggatgttaatgagaaaactgactagatttcagatcatagattttaagagaacaaggattccaaaaccaaataccctctgcttaaagtgtctttttgtgttttttactactgaaaatgtttagagattgacttacctattgctgatattcaaaatatctgatatcttaatatttttaaataactcacactaaaagcatatgttgaaaatggcaatgtatagtctgagactggtgattaatttataatattggtacctaaagagatactgagatgaataacttattaatttccttctaa

SEQ ID NO: 7373 - DNA, 731 bp, Macaca Fascicularis
tggggaggcctcacaatcacggcaaaggcaaaaggcacatctttcatggtggcagacaagaaaatgagaaccaagcaaaaggggtttccccttataaaaccatcagatctcatgaaacttattcactaccacaaaaacagtatgggggaaactgctcccatgattcaagtatctcccactgggcccctcccacaacatgtgagaattatgggaactacaattaaagatgagatttgggtggggacagagctaaaccatatcacatttatatgatagaatcctattcaacaattattttaaaaaattctgttgagcatttctagacacagaaagactaagtaaatagaatgcaatataaatatgataggaaacatattgataagaggcaggaggcagacaaaggtctaggcagatagggaagggtacccagagaatctctgaccctccccacaagtgtttataccagatgttttgtgcagataagggaacctgcacaggggacttgcctgggcatgcccacagcagactggaggcccacaggcactaggggaatggggtggagcaaccaggaattcatgctttatgcaggggaggaggctggccccttaagcttgtatgtggtagccctggtattcaactgtgacaaggaaacctgcttgaaaacccctctctttgtgagagcttttctttgcttaataaatccaccctcctcaccttcatgtgtccatgtg

SEQ ID NO: 7374 - DNA, 759 bp, Macaca Fascicularis
  misc_feature (1)...(759): n = A,T,C or G
acttgnnnnnnnnnnnnnnnnnnnnngctgtttcaagaggcaaggtgtccaaggatgatcgaagtgatattgagtctagctcagatgaggaggactcagaacctccagggaagaatccccacactgcgacaaccaccaatgggaccagtggtaccaacgggtatctcttgaccggctcttgctccatggatgattagttactgaaaactacaagtcccaagcaaagtgaactatttgttcctggaagtannnnnnnnnnnnnnnnnnnnnnnnnnnnnnnnntatatcagcaccagaaacaaaaattaagattatcaaagcattttgaatagtgcactgccatgtgtcctgtctgtgaatgaagaagaattaccattctctctannnnnnnnnnnnnnntgtaattgacacaagggannnnnnnnnnnnnnnntactgtcttagaatattatttattttttgtatttgtaaatctgtggacaaaagagggtttcctcactgcttttactcactgggctcatgacnnnnnnnnnnnnnnnnnnnnnnnnnnnnnnnnnntctcttgctgtagtccaatgtgctnnnnnnnnnnnnnnncnnnnnnnnnnnnnnnnnnnnnnnnnnnnnnnnnnnnnctcgttcagctctaaataggtttgctttctttttgttacagtgcccattttgaaattgcctatacagtcttagtgaccatttaaaccggacgaaccgggtgtttaatattcactcttcatggtc

SEQ ID NO: 7375 - DNA, 716 bp, Macaca Fascicularis
  misc_feature (1)...(716): n = A,T,C or G
taacattnnnnnnnnnnnnntcacactgccgttcctcccctccagaggtaacaattatccaaaacttaatgcttatcattcctgtatatgttgttgtactttcactgtatataacctaaaccatctactctttagtactgttttatatgtttttaagccttatactggctcattctacagcttttcttttttcactcaatctatattatatgtgaagctctcattcattaatcttagtactatgtagcagtattcaattatgggaactaccgtaatttatctgttctccaattgaaggcnnnnnnnnnnnnnnnntttctgtattacnnnnnnnnnnnnnnnnnnnnnnnnnnnnnnnnnnnnnnnnnnnnnnnnnnnnnnnnnnnnnnnnnnnnataaacacannnnnnnnnnnnnnnnnnnnnnnnnnnnnncttcaaagtagatgtgaattgttgtgaattacatgagtgtggaatggtgttttattatgactttagtttgcattttcctcaattactcgttaaatccttcattctaatggacactttattttactgtgaagaacctgttcctatatatcctgtgcccaactttctactgaattatttctctttctctgaataatttttaggagttctttattctagacatcaatcatttgtcagttttatatnnnnnnnnnnnnntctagtctatcttgtgactcttctttt

SEQ ID NO: 7376 - DNA, 665 bp, Macaca Fascicularis
  misc_feature (1)...(665): n = A,T,C or G
ccattaccaaatagtgccaaggactaaatgaatatttgcccaatgaatgagttttaaggaagaaacgtttgcataaaatcattttgtttcttttggagttcaagtcttcgggtattttacccttcccaatccaaagaaaagtctctgagtgaagagatgggaacaaaatggaagttaaatatgttgctttaacaactgtttattgaactccttctatatactatagaatgatgagcaaaaccaggtacaatttcggccctggaagaggaaaggcaggcatgnnaaaatcaagtaattacattaatgggggtacttatcagttgagagaagtgcactaaggaaaggaatatgattctgtgataggggataataaaagatccttgaccagagaggnnnnnnnnnnnnnnnnnngactgacccgaagaatcagtataaattgacttggtagaaagtgtaggtggatggctgagtgggannnnnnnnnnnnnnncannnnnnngcagaaaaaaaacatcaattttaacaannnnnnnnnnnnnnnagatgaaactgaacctattccttgtcttttcttcttgcttcagacataactttaaaaaattgcttacgctgtcttgagcctaatctctatcccaaactccacactcttctgtgttttagccgtc

SEQ ID NO: 7377 - DNA, 115 bp, Macaca Fascicularis
tttggagaagaagcaacagcagcagcgtcgaacgagtcgtactactaacaaggctgcggaggacagcagggtggtggtgcttgggaggaggcggcgaggacttcctctccttcct

SEQ ID NO: 7378 - DNA, 390 bp, Macaca Fascicularis
  misc_feature (1)...(390): n = A,T,C or G
caggacnggaagtccttgcccacttcccactctcctgccccaatcgatctagtacttcccaggcaaacaggcccctttgaggctcctgagtgccctcagacggccaaaacccagttttgcctctgggagcctaaaccaggctgcatcggaggccaggacccggatcattcactgtgataccctgccctccagagggtgcgctcagagacgcgggcaagcatgctccttcccttccctggagagaaagtgtgtgatttctctcccacctccttccccccaccagacctttgctgggcctaaaggtcttggccatggggaagccctcagccagggatctggccacagactccctcctgtgagccaacgcagacacccgagcagagcaatcag

SEQ ID NO: 7379 - DNA, 740 bp, Macaca Fascicularis
  misc_feature (1)...(740): n = A,T,C or G
aagttagaccctganaannttaaaaaaaaaaactttcccaaaaagttctgagcctgtaaagccagggatcagaatataggtgtcctaacttcctatctaagagttatgaannnntgactcagtctttgagagaaggtgtttatcctgaaccagaaactcaatgatgtatacctgtttacgtattaaatagttgtgtttatatacccaaaaatttgactttaggtatatgtgatatgctttggttccaatcaagcagaaggtcataagtttactcagaagtatccaaaatatgacattcaagatttaacttgcatatgtgtgtatatgaatatatttatacatgtatatgtggattgaatgtgacatacattatgtatttctaacataatatttggcctgccagcttataaatatgtatttaagcttttcattgattgacattactgtaaaaaatgaattgtgattgataagttctggatatttgctgttttttttcattttatattctaactaaattattgaatttattaaattaaaatatgctatcactgtattgccaaattatggcaatacactatgcagtattatttcaatacttttaagaggcatctatttcttcattgaacacataagcagctagcctcctttcctctgtaaataaggacttttttnnnnnnnnnnnnnnnnnngctgttcatttggtgtcatcctggagttccatcaagactgaggatttctcc

SEQ ID NO: 7380 - DNA, 1784 bp, Macaca Fascicularis
tactggcctgcggaggcggcggtgcagcgctccggtggaatgaatcttacttgttgaatatctcctggttaccagttggattcatttgtaaaagaatcattttcccctgtgtggaagacactcagtggcatatttaaattataagtccacggatcaaaaagctttttgatttcccaaaggagggacattaccactatatcagataagcttgacattacagccaagatggtgctgtcccagagacaacgagatgaactaaatcgagctatagcagattatcttcgttcaaatggctatgaagaggcatattcagtttttaaaaaggaagctgaattagatatgaatgaagaattagataaaaagtatgctggtcttttggaaaaaaaatggacatctgttattaggttacagaagaaggttatggaattagaatcaaagctaaatgaagcaaaagaagaatttacgtcaggtggacctcttggtcagaaacgagacccaaaagaatggattccccgtccgccagaaaaatatgcattgagtggtcacaggagtccagtcactcgagtcattttccatcctgtgttcagtgttatggtctctgcttcagaggatgctactattaaggtgtgggattatgagactggagattttgaacgaactcttaaaggacatacagactctgtacaggacatttcattcgatcacagcggcaagcttctgacttcctgttctgcagatatgaccattaaactatgggattttcagggctttgaatgcatcagaaccatgcatggccacgaccacaatgtctcctcagtagccatcatgcccaatggagatcatctagtgtccgcttcaagggataaaaccataaaaatgtgggaagtgcaaactggctactgtgtgaagacattcacaggacacagagaatgggtacgtatggtacgaccaaatcaagatggcactctgatagccagctgttccaatgaccagactgtgcgtgtgtgggtcgtagcaacaaaggaatgcaaggctgagctccgagagcatgagcatgtggtagaatgcatttcctgggctccagaaagctcatattcctccatctctgaagcaacaggatctgagactaaaaaaagtggtaaacctgggccattcttgctgtctggatccagagacaagactattaagatgtgggatgtcagtactggcatgtgccttatgacccttgtgggtcatgataactgggtacgtggagttctgttccattctggggggaagtttattttgagttgtgctgatgacaagaccctgcgcgtgtgggattacaagaacaagcgatgcatgaagaccctcaatgcgcatgaacactttgttacctccttggatttccacaagacggcaccctatgtcgtcactggcagcgtagatcaaacagtaaaagtgtgggagtgccgttgattgcgtctacttcggcccctcctccctcttttcctctggatgcactctgatgataccatggttacccccattgagctctgtttaaataaatattgtcctttcatgtaaattattctggatgtagattgagcttattaaatgttacacacaaagtattcatgcatggtgaatccaaattgtatactgtaaatttacatacgttgtctagaagtaccataggggtttaaaaacctgggctggcattggtcacaccaggcctaaaaggcagaagttgaatcatttgaactagggcactaaactgaatagtgtgacagtgtcattttatg

SEQ ID NO: 7381 - DNA, 2739 bp, Macaca Fascicularis
tctgacctgtcctgtcatggctgggaactcagtttctaaggtttttctgaggtcctcttggccaagagggtttctattccggttgctagagggggcctaggattttatttttagtttgcaatcagtgttagtacatttcagtcgcccccccagccctcctgatcctcctgtctttcctcacatcctgtcattgccagagattttacagatatagatctggatcatttcctgccatctcttttaacacacaggcctccccaatctttctaacctaggacctacttggaaaggcatgctgggtctcttccacagcctttaagctctccctacaccagaatttaggtgagtgctttgaggacatgaagctattcctcccaccaccagtagccttgggctggcccacgcttgccaactgtggagcgggagcgggagggaggagtacagacatggaattttaattctgtaatccagggcctcagttatgtacaacatccatgccgtttgatgattccacaactccttttccatcttccccggaagcctgctttttaatgcccactcagtattatcagagcccagcctggaatcaaactgcgtttttcaaaatctgcctctatatactggctttgtgacctcaatcaagctgcttgaccattctcagtctcagtttctgcaactgtcaaacaggatttatgttaactttcagggctgtcaggattaaatgagtatgaacaacataaaatatttggtgtacagtaagtgtacagtaaatatttccattatcagtccttccaattctatttttcttccttctctatatagcccccctgtctggctttaaaatatcctgctctgctttttaggagtggatacccccagccctatgtggtttagcaaataagtaatgacactcagacagtttcatctttgtccgtaacttgctctgtgatccagtgtgcaccactcaaacagactacattttctcgtacaaaacagagagctgcctctcagagaatgttggaggaatggaaagcccactaagagaacagaactcaaaaacagttgggttctagatgggaggaggagtgcatgcgcgtgtatgtttgtgtttcaggtcttggaacctcagcaggtcagtcacactgcggtatgtcgcttcacctggctcctttgtttaaagattttctttccttctttccaatttcctgggccctagatcctccagcagtgtcagggttagacgccttttatgggccacttgcattagtgtcctgatagaggcttagtcactgctcagaaactgccttctgcccactggcaaagggaggcaggagtacacgattctaattaatagtccaagcagagaggacactcagaacttcaggactgaagagtgtgtgtgtgtgtgtgtgtgtgtgtgtgtgtgtgtgatggtaaatgccagaatcatcccttggcttcccatgcatattgcatgggcacacagactcaaaccttctctcacacacatgcacatatacactgttagtccacacacaaggcataatcccagtgcccagcgttcatgcatacacgcacacattcccctcctaggccactgtattggtttcctagggcatcttataaggacaccagtggtataaggagcccatcccactcatctgagcttatcaaccaattacattaggaaagactatttcctaataaggtcacattcagaagcactgagggttgggacttcaacacagctttttggggatcataattcaacccataacagccactgagattattatgtctccagagcacaaatgtgtggagttaaaaggaagatacatgtggtatgaggggtgggaaggcaagggtaaaaggggagggaggggattgaactagacacacacagacacatgagcaggactttggggagtgtgttttatatcagatacttagaatagcacctgaaatatgggactcaaccattttagtccccttcttttataaatgtgtttgtgtgcacgtgtgctagatgttcttgctgtgttaggaggtgataaacatttgtccatgttatataggtggaaagggtccgactactaaattgtgaagacataatctctctgcatttattgagaatgtgaatatgaaacaagctgcaagtattctataaatgtttgctgttattaggtattctgtctttgtgtccttttattcatgaattcttgcgcgttataaagaaagagtccatgtgatcagtgtcttacccagtgtagggtaaatgcacctgatagcaataacttaagcacacctttataatgaccctgtatggcagatgcacctgaatgtgtgtttcgagctagaaaatctgggagtggccaatcggagattcgtttcttatctataataaacatctgagcccctggcctatcccatgaaacctaggctgtagagaggattgaggccttaagttttgggttaaatgacagttgacaggtgttggtcattagggaaaggggttaagtgaaaatgctgtataaactgcatgatgtttgcaggcagttgcggttttcctgcccagcctgccaccactgggccatggagatatgttgtccagcccaacactacaggaccacttctgtatgtaaggcagttctatccaacccaccacctctggattcttcccctgtatgtaagccctcaataaaaccccacgtctctttaaaaaaaaaaaaaaaaaaaaaa

SEQ ID NO: 7382 - DNA, 743 bp, Macaca Fascicularis
ttatattttatatttgcatccatgccttcgagaagcctttcccacgggaaaggttattttcatctaatgttacccataactcattcgctatttgacgtagttctcttaaataaatcatcctttagtaactcttagaattatctcctaatttacaaaaactgaaatgaaaaggaactactaaatcattaccaggagtggttgcaatcttattttcttgtaagtaaagggaaaacaataaaaatcaaccaaaaatgaaattcatgggcgagaaaagtattttctaaaatctctctccatggagaaagatgtcagctcgggtcgctccccctcacccctaggctcggttaaacagtttggccaaaggaggacagaagagtccttatgagggcctctgcctgcttgctctttgctgacctttggggaccaggtcagaaggaaagtgtggtttgttcttgaggctttggacacaatgtcccatcccttctgatagagacactctagcatttgaaaatctctagcttctttttaagagctgaaaatgttaccattagcagaaagcacaactactgttgtctagaggtgtgggttgagctgttagttgttaaggatgggcagaagcaaaagaaaaaggaaactgagtcttaggctttgggcagacctagctgagcagctcacacgtcctccgtcccccagtattaaaatgcacacagttcctttgctggtgaagcctctttggggccaac

SEQ ID NO: 7383 - DNA, 3054 bp, Macaca Fascicularis
aatcattttaggaaatatgttttattttgtggcattatatgacaatgactttctcatcaatagctcagggaatacgcaaacagtcagctcttttatgtaagaaagccactttctaatccccacgctttcctgagtgttacaaatttcatttctttgaaaagagagggcctggagtaaatgctttcctttgctttccttacatatttagaaatccaagaagggcccttgtcttggtctatttctgtcacagagaaattgatcattccaaaatacctaccttaagggaagctagtgactgagatatggagaaaaacacaggtgttcatgacctttgtgtttccacttgactttcaacatctgtaaccaaaagtcacaaatgaaatattgagaaaatgcaatatcaacttattaggagtacctaaaattatctctaaataacgtactgttttctttaaactactgcagcagtcaataatataatatagccactaggatatactcactgtagaactcagaataaaatatatgaatcatctgctagtcttcatggttatgtgtagcagagactttactggaatgagagaggggaaagataacaaaatatagattaggattccacattcccccctgtccatcttcttgattgctcagtttgaagacactcattgatggacaaatactttagaaatgaatagactaaagccaatagctaatgtttctcccagaaacaaaacaacatagttcagggcatattaggcctacatcctaaccacactttaaggaagtgatttcctgcttcccaaggagcagcccactctaggaaccattttcccagtaaacttgcactgagaaactattatatgccatggaggagtcaaagatgaattaaatccaatgctatcctccaggagtgagctttgtagttggagagaaaagccaaccttacagataaacctgtacatataccacctatgctacatttaggaatggaataaggaatggataagccctaggaatggaaagaggaaaaagctcccttttgccaggaatgatgaaggaaagctttatggaaacacaggttatatatgaaagatgggtgaatctttgcaggtagggaataagtagggggcatatctggctgagaaccggcctgatcacagagtggaaaaatgaaaggcagaggtgaaggaataatactaaatgtgaaaggctgaaatacacagggaagtgttgccagtgtgcagcagaatctcatcttgtgcaaaattgaattagacatacttccttgcttctttcttattctgggtaggtacacgtgcagcctttcctcagagcatctagcctgacatacttggctcatctgctgtgcttctaagccaaataaaaatcatcaaacacatcgaagatatttttgggagtcaccaggttaacgcaaagcctcagtcactgaaaggaaaagctgcattggccaggtccccactgacaaaacagagtaaacgatagtatgatagataatttcaagttttgcaagactccaatttctgaaaaagtctcgtgactccaaaaaatcatgtacttcctaaaatgttgccagtggaggaccaaatcaaggttattgctgacatcattttttcaaccttttcagttatttgacctgaataggcaatcccccaggatttctgattgaattctacctgaaagtttagatttcaaaagagaacctgtaggaagctaagtctcagacaacaaaatttaaaaccatcagaacttgtttctccaaacatcaagctgctcctgtcaagtcctttttcatctctcccttttgtccctttacatactcttttgtaaattccttttgatatcatttattgcaagcagtatttttacatccatcttcaagaaacatgttttgggagacatttagaatcaactaaaagtgtgtgtatgtttagttgtcttgcctctttatttcagataatgcctgtgattagtgaatggtggcattattcctgaagacaataaaatgaaggaagatagggacaaagattgactgtcatttgaatgatggaagagaagctaagaagtagaattactgtgaggttacagttagcagacattgagaaaggaaaacttcctacttgggcttttcaggcttatgtgacattatctggatgtgttttctagtctttcctagaggagaaatttttattcctgggttgctgaaatctttctggactaaaaggatataagcagctcaatagcagcatagaggattagattaaaggaacagcactgcatacaggaaacctaaatctccaatagtttaggctgcaagtccttagccaaacacaagagcatgtaagatttggaggacaaagtataaatattttaagtttgcataaccaagattataggctaccttcccaacttctaattgaagagcactgaaaacggagctgtgaacacttcatttttaaaacctgacaacatggtgctactgactacttaatacaaagatatattacaatatttttaggtaaacatattaagtttggcctgggcataaatgtacatacagaaaatgtttgtagagaattcatcaaaatcatgcccatttactgttgtagagctagtgttcttcaatggtggtgactgaccagtgagtttctacttcctacagacgggacacaacagtcatgggctgtctcaactgcccaaagtctgaggcagaccacgtgagagctgtggcttcttcttggattcaggttggataacccaaatcaatgactaaatatgtacattttgggggcggttggggggtgttttccaggaacttgaagagtacatgacattataaaaaatgggtgttggaagactaattgtagaaatttgacctgagggccaatgttactttgtgtaagttcactcagacatgtcagaacatgcccaaagaagcctataccttgctgctgggaaatgtaaagcagtttgcatgtacaatatgataataaatcatctaagaacccaaaaaaaaaaaaaaaaaaaaaaaaaaaa

SEQ ID NO: 7384 - DNA, 761 bp, Macaca Fascicularis
  misc_feature (1)...(761): n = A,T,C or G
agtagtcacaaattcctgtaaaaagctgaagccatctacnnttcttaacccaagtgataataaacaatattcacaacnnnnttaaatttttaaattgaaaactaaggttttttcaaatataaacctagatgattttggtcacaaattgttannnnnnnnnnnnnnnttgtatatactttggatatatattaaaggcaaaactatctctcnnnnnnnnnnnnnnnnnnnnnnnnnnnnnnnnnnnnnnngtatttttgaatacatattatgatcttgagactttataaatcaatttttatgactttatgcagttgtatagggattatgcccttttataatacatagtataccacaaagatcacaaatgttgaggaatgaaagcacttctttgctttggcannnnnnnnnnnnnnnctatgtgtttgaatcctctggtattgatatgtattatagggttttagagatctgtgggtcaaatgatgtccctcaaaacttcccagaaaggtgaagctcaaagtcacacattcatttataaggcgcatgagtttctcattttcccatgtaccagcattgtaaaggaattcagctgtattaatttctatttcagatctagaattgacattttgccttcttatttccaggtgtttctattttttgtattctttcagagaaatctcatatttcggtgtatttattgctgttactactatatttactgctgaaaattgtaacaacctgaagatttgtaaaatgttaaacat

SEQ ID NO: 7385 - DNA, 723 bp, Macaca Fascicularis
  misc_feature (1)...(723): n = A,T,C or G
gaaaagcacgtgtacagagagcacctnntcattcagcaaaaggaggtcaccaagagagtttgatgaacctnnnnntcannnnncccaggcacannnnnnnnnnnnnnnnnnnnnnnnnnnnnnnnnnnnnnnnnnnnnnnnnnnnnnnnnnnnnnnnnnnnnnngnnnnnnnnnnnnnnngattgtgccactacactctagcctgagcaacagaccaagaccttattgccaaaataccagggaaaaaaaaaagtccatggagagctacatagacatgagaccacacttcagcctgaatttttctaaacacagctgtctcaagcagatgagcccacacgtttttgcacactgaactctccagtccttccacttccttaattctgcaaatggagggggtggggactcttgggaaactactcatgtaaaatttaagttggaggtaggcgtgggctgaggaaagaggaatcagattaattctctgggttgcaaagaggctatnnnnnnnnnnnnnnnnnnnnnnnnnnnnnnnnnnnnnnnnnttttgtacctcttgtaaatgtgccattgtgtgaagcattaaacccaacatctagaattcaggatccatccagaataaaagaatgtaaaacctttcccaacagaagagtgttacttttggccaacttcatgggttcttattgcacattaaattatgacttatggaacatcacaatctattctcag

SEQ ID NO: 7386 - DNA, 744 bp, Macaca Fascicularis
  misc_feature (1)...(744): n = A,T,C or G
gcagaannnnnnnnnnnnnnnnnnnnnncaggggtgccccaagagtctgggattttcaaaaaaaaaaaagatcaggctgaagctgcaannnnnnnnnnnnnnncnnnnnnnnnnnnnnnnnnnnnnnnnngtgactctcctctctcaggatgacgaggatctgtgccttcaacaagcaaaatgctgctcacggttgtcctgcttgcagccagtcactgtgtaaagcctctctgatgtgcatttaagagtggtttgctttcttacaaagatggggttctgtgcagtcannnnnnnnnnnnnnnnnaacaccatcatttctgatctttattactgtaaccacttcttctattccataggagtttcttttgattctctcagttgttgtgggggtgtctcttaatcctggggtaaaaggagagtttgccatacttagactcattatgagtctcccctgccatttcacgaggagaccacagtgctgcccccagtgcctaaacaggtggctggcgttcgagacttcctcttgttcctgggtcagaggagagcggtttccatcataaaccaagatgatgagttcagcctttaatccctagtggttccactagatgtaacttaaaggagtgaacattcgaggactttgttctacatcagattttactatttgaatgtttactgttggattttggacatcttattactgatactcaaaaacattgactctgcatcaagtaagaaacacgaaag

SEQ ID NO: 7387 - DNA, 768 bp, Macaca Fascicularis
  misc_feature (1)...(768): n = A,T,C or G
agctgcagannnnnnnngtgagaaggagctcggggacgcccccaaagacaagtggctnnnnnnnnnnnnnnnnaaaaggagcacacgatcaacatggaggagtgccggctgcggatgcaggcccagcccttggnnnnnnnnnnnnnnnnnnnnannnnnnnnnnnnnnnnnnnnnnnnnnnnnnnnnnnnnnnnnnnnnnatttcctgccagtctcaggctgagtgaggaggannnnnnnnnnnnnnnnnnnnnnnnnnnnnnnaagactaggaacggaggtgnnnnnnnnnnnnnnnnnnnnnnnnnnnnnnnnnnnnnnnnnnnnnnnnnnnnnnnnnnnngagtggcccagcgcctnnnnnnnnttggccagttcagagtgccactgggtggacagcaggtccctctgagagtctctccctatgtgaatggggagatnnnnnnnnnnnagnnnnnnnnnnnnnnnnnnnnnnnnnnnnnnnnnnngctcaacnnnnnnnnnnnnttggacggcccagagctgcacgacgtcctggaggtccacttccagaagcccacccgtgggggtggggagatagagtccctgacagtcgtaccccaaggacagcagggcctagcagtcttcacctctgagtcagggtaggggcctccccttctcatcctccccaccccatggccaaggnnnnnnnnnnnnnnnnnnnnnnnnnnnnnnnnnnnnnnnnctttatgttcaccaacagggagggatcacacattgcgaaacact

SEQ ID NO: 7388 - DNA, 751 bp, Macaca Fascicularis
  misc_feature (1)...(751): n = A,T,C or G
ctaannnnntgcagcttttagtttgggaaaaatattttaaaaacaaaatttgtgaaacctatagactacgttttaatgtaccttcagctccctaaactgtatgcttctactagcgtgtgctcttttcactgtagacactatcacgagacccagattaatttctgtggttgttacagaataagtctaatcaaggagaagtttctgtttgacatttgagtgccggctttctgagtagagttaggaaaaccatgtaacgtagcgtatgatgcataatagagtatacccgttacttaaaaagaagtctgaaatgttcgttgtgtggaaaagaaactagttaaatgtattattcctaacctgaatgaaattagcctttgccttattctgtgcatgggtaagtaacttatttctgcactgtttcgttgaactttgcggaaacattctttcgaggttgtttttgtcattttcgtaacagtcgtcgaactaggcctcaaaaacatacgtaacgaaaaggcctagcgaggcaaattctgattgatttgaatccacatttttctttaaaacgtcaagggttttatattgtgagtaaattaaatttacattcgagtcgtttgttgttaagaggtagtaaacataagagagtactggttccttcagtagtgagtatttctcatagtgcagctttatttatctccaggatgttttcgtggctgtatttgattgatatgtgcttcttctgattcttgctaattca

SEQ ID NO: 7389 - DNA, 2137 bp, Macaca Fascicularis
  misc_feature (1)...(2137): n = A,T,C or G
gatgtttgtttcgagctctcgccttgtgcacggttaaagtcgcggcgacagaattatcgaaagattcctgcagcggagagaagagagagacgagtcagctcgggcgccggcggagccccggctcccggcacctggggaaggaaaacacgccccaacacacgcgcctctgcgggcgccaaaaataacccgcgcgggccgggcgcccaccccggggcaacccgcgcccacctcaggggccccaggcacccagctcgaagtaacagggcgcccacgtcaggggctcggggcgcgctcccccggggctcagagcaactggggtcggagcacccgccacgcaggaaaaggcgcccacctccggcgaaggacgaggggaagtagcggccgccccgacgctctctggacacgcggaggcggctcccgaaggtctcccggcccgggcgggcggggggcgacgcgcgggtctctccggaccctaactccccaaaggccgccgcgtgccgagctctgtcacgtccctcagagccccggttgaggcccgcggcgccgagaggaagcgcacggtggacaggggcggccgggtgtgacaatcgccgtgcggccccagggcagctcccggagggggcagcccggacccaccccacccgccggctgctgtctcctcctgagctcggcgctgccccctacaggccgcgtggtccctcctcggtcgccccctgacccaccgcgagccgcccagctcccgctctagattgccgccgtcgcggctgctgtcaccgaggccgggtcatcgggccgcgggtacctcaaagccgagtggactggagacccaattccttgcctatctttcgcctcccccgagctgctgcaactgtcagtcacccgcccggaaccccgaggggcaactaccgcgcaggcctcggagcccggaaccagggtcctggggcttaggatctcggccgctgcgcctcattcctgccccagccccgcgcactgaactcgtttccttcccacccagctcgggacgctcctctctgacttccccagtgggtcagacccatttcatacactgaaaccaattccgttctgttgggctcctgattgattcaactagctggaaggatgctgaggcaggggtgaaggctggggtggctggcaggctgtgagaggcagaggacatcagcagagcctatttcgtgccctctgagtctccacacagagatttatcactgagaccttcccgattcccctaccagggatgccggctggccctgcctgcctgcggggcccagcctaggtcaggctcatcttttgggacaggatcccacttgcagcgttacagtcagcccctcctctggttctccgnnnnnnnnnnnnnnnnnnnnnnnnnnnnnnnnnnnnnnnnnnnnnnnnnnnnnnnnnnnnnnnnnnnnnnnnnnnnnnnnnnnnnnnnnnnnnnnnnnnnnnnnnnnnnnnnnnnnnnnnnnnnnnnnnnnnnnnnnnnnnnnnnnnnnnnnnnnnnnnnnnnnnnnnnnnnnnnnnnnnnnnnnnnnnnnnnnnnnnnnnnnnnnnnnnnnnnnnnnnnnnnnnnnnnnnnnnnnnnnnnnnnnnnnnnnnnnnnnnnnnnnnnnnnnnnnnnnnnnnnnnnnnnnnnnnnnnnnnnnnnnnnnnnnnnnnnnnnnnnnnnnnnnnnnnnnaggagaaactgatagtccgcagtagagtgaacttaaagacctgactttcattagcgtggtgttgtaacagactgcctaggagcctctgaggaaatgggctttacgtacgtatacatactcgcccttgcccctgaagcgacataaaatactttcatattattcttgggggcgttttaattcttcagatcctctggattcgtgtttttgtaacccatcagacgagcttttgtacacctctttccaacctgggcctacacactaacagaaatagttttacatcgaaggacaatgctttagtgttttattcagtctcatctcttttcttttttttttttttttttctagttgtgtttcaaaaaaaaatttctttttctgtcttgtgatagttttggaggaaaaaatattgaaataattcaaaaaaaaaaaaaaaaaaaaaaaaaaaa

SEQ ID NO: 7390 - DNA, 674 bp, Macaca Fascicularis
  misc_feature (1)...(674): n = A,T,C or G
agaacatatcataatcatcgcacaaataaccatgttctttggtagtgaagccagaaaagaaagcgcgaaaagaatggtgactcatttggactcttatctgtcnnnnnnnnnnnnnnnnnnnnnnnnnnnnnnnnttgccttttgnnnnnnnnnntatgtgtctggagtcttttgccatctggatcctagtacctctttattatgtgcannnnnnnnnnnnnnnnnnnnnnnnnnnnnnnnnatttactacatttggttagtttgagcttgtgaaagatttnnnnnnnnnnnnnnnnnnnnnnntagccccgcagaagatgtttcctgctgatagcagcatcctattttacttattaacttttatagcattactgtgcctagtcatggggaaagagatggggctgcattgattatctgactcattcgtctaagaggtacattcttccagatggaatcaataactttggttttcaggttcccatgcttgctatcacagtatcactgttaagtgacatttttgtctctcataacaccatcacactcttccttccaagtctgagctatgctggggttnnnnnnnnnnnnnnnntgtggaatattgacatgtgtaagaagcactttcagaatgttgtcctttttaagaaatgattctcaaaataccagttttatccaaa

SEQ ID NO: 7391 - DNA, 786 bp, Macaca Fascicularis
  misc_feature (1)...(786): n = A,T,C or G
ttcattgcttgctgnnnntttcaaaacaaactgactcagttcaacagaccaccagtaccagactcagaattgtgatagaggagnnnnnnnnnnnnnnnnnnnnnntgacnnnnnnnnnnnnnnnctccagaaagtaggagtaaagatggaaaggagaaagaagcaacctnnnnnnnnnnnnnnnnnnnnnnnnnnnnnnnnnnnnnnaaactgaaaaagagaacgaagactaaacaaagagaaaggaaagagaagaaaccctnnnnnnnnnnnggaaagcacatcctgtnnnnnnnnnnnnnnnntattggaaccattctaattgctcctgtttttctgggtaccatcagttttctgtagttgccactaaagcagtagactcttgagtctgacttgtctctgagagagacagaagttagaaagttttgacttggtgattccgaaagtatgcctttgttnnnnnnnaaatgtccagtgagacttcttggcaccttagagccctctgagatactgattattttaggttcttctccctactttcagatgttctcagcccaacactgggtgctctcttccactacagagaatcctgaagaaaagggaaggtgtttcccatnnnnnnnnnnnnnnnnnnnnnnnnnnnnnnnnnnnnnnnnnnnnnnnnnntcagagtccaagcataacccgtgtagcgtaaaagcagtgctgtagccctattccagtctttttcnnnnnnnnnnnnnnnnnnnnngagttagtcaatcattaactgttgactgttgatct

SEQ ID NO: 7392 - DNA, 372 bp, Macaca Fascicularis
gatgcccccaccccaggtttcccccatcagagttaagaggaaagaaggttattcatttactgggcacctactgtgtgttgggacgctgtacagagaccagctcagtcgtcagagaaaccatgaggtggtgtcctgcacggaatggagggggaagggaccccagagaggtggctgtgacccgtccaagggcacctggccagtgaatggcagagcctctggcactggccagctgcctggcctcgggcgggtcacttcacttctctgggcctcagtttcctcatctgtcaaatggggttaataacagaacctacctcgaagagttgtgaggctgaaaagggttcatatgtgtcaagtggttaggacagtgcctgg

SEQ ID NO: 7393 - DNA, 751 bp, Macaca Fascicularis
  misc_feature (1)...(751): n = A,T,C or G
agtggtaactctnnnnnnnnnnnagcagggttgnntnntgttannnnnnnnnnnnnnnnnnnnnnnnnnnnnnnnnnnnnnnnnnctgtgagtggtgtacacaatgggaagataagccgtggtgttttgctgtgtgtgtcacaagcatgaaaacctnnnnnnnnnnnnnnnnnnncatttgtggtatnnnnnnnnnnnnnnntttagtgagcgtgctggctgcagagcactatgaaatcatggtacgtagtccccggcacctgtcgttattcctatnnnnnnnnnnnactgtggtttgaaactgcgcattctctagtagtatatatcgtgcctgtcttcaaaaacatttacctttttatactcattccccccaggcatggggtagtgtcagactgcacagggaacgtggtttccaacggttcaggcccccactcgggaaacatctgtctgttctcgacggtgatggggtggctgccattcccttggttnnnnnnnnnnnnnnnnnnnnnnnnnnnnnnnnnnaggcgacggccgattcaacnnnnnnnnnnnnnnnnnnnnnnnccatggcacctgcccacctgagaaccaggagcacgccctctctgtggagcttggactggtgtacctggaaacggcaacttgcaaacaaagagcctgacatgtgttaatcatttgcnnnnnnnnnnnnnnnnnnnnnnntccagtactaacaaagggaataaaaatacctcacgccacaatccaacat

SEQ ID NO: 7394 - DNA, 709 bp, Macaca Fascicularis
cagcagggttaaaagagcagccttcatcctgaaaatgtatttctttttatttaatgctttgagtagataatcctgaattgaggtcctgaggaggcccccaggccaggcagtcctgaacccctctgacacttggaagctgaatataagtaaaatgtcccggtggactctgagtatttcctgtggatcctgggaaagtactgttgcacagaggctgcaaagctggactcaggaatgtcctccaaccagcagcgctgacctgagagctccctgtgccgtccatccagaccagacttcggtagatgcctttgttagatcaaatgtaaaccagcttgtatctcccctgtgccacgagagattggctttttattccagtctaggcagagagagaagaatgttgaataagagcacgattagggtcctgtctggttatctcttgcccacgaaaagagctctgctgtccaggcactgcttggtttcctatcccagcgaagactgcagttccgtggaccttttcaccaccttgtggctggcactcttagcacacctgagacagatttaagcctccctgagagactgaagagaggaacaggtgtcggatactcataggcactgagacctacaaatgggaaacttgtgagtggcccagctttgttggcctatgaactttggtttgatgccagtcaggtgccaaatgagaacctttgctgag

SEQ ID NO: 7395 - DNA, 733 bp, Macaca Fascicularis
cattagattctagttttctcctttagaataccaatgccacagacactgcaggagataatgaaaggtatcagttgtgctgaatggagtgggtttaagagaaaggacccttcccaaccagcagccagtaaaaaatacaacctactcacttttttcccttctaagttctgctaaatcacatctgcctcatagagaaaggaatgttgcctttgagaactgtcttggagaaaagataagcttgaaatgttctctctaaagaggacatagggtttgggatcctctgaaaaggcccagaaaaatagctcagttctaacacaatgttctaggacaattggaatataaatattgtccaaaaatataattaaaaaagtttagcactgtgtaaagtaagtgttaacagaggaagtcccaaaaaggtgctgtcactttaagttctggacttggggttgtttgtatttgtaaacagcaaagcatttgtgtttgtttgtctatttgtaaagcaaccaccttccttattggaaggagaaaaaaaggggtacatacatgtaaatacttgctgcagcatttaatatgtttaattttgtgttaagctttttgttgcatcgtgaacacatttattgttaccaatggacaatgagttcattaagactgttcaactaggtcagatttttacatctctttctagcaagaagagacaagattttgtgcatttgtacaaatagttaatatcactgca

SEQ ID NO: 7396 - DNA, 664 bp, Macaca Fascicularis
  misc_feature (1)...(664): n = A,T,C or G
gctnnnnnnnnnnnnnntttaaatggatnnnnnnnnnnnnnnnnnnnnnnnnnnnnnnnnnnacttttgtatgctttcactacaatttatannnnnnnnnnnnnnnnnnnnnnnntgtttctnnnnnnnnnnnnnnnnnnnnnnnnnnnnnnnnnnnnnnnnnnnnnnnnnnnnnnnnnnnnnnnnnnnnnnnnnnnnnnnnnnnnnnnnnnnnnnnnnnnnnnnnnnnnnnnnnnnnnnnnnnnnnnnnnnnnnnnngcccacttcttaccccaggtagccccgggcgctgcctgtagtcatgctgacagctgtacagtagccgnnnnnnnnnnnnnnngctggagacggttctggttccaactacggtatattgatataggaagtatcnnnnnnnnnnnnnnnnnnnnnnnnnnnnnnnnnnnnnnnnnnnnnnnnnnnnncccacctgccatcctatagttttgtcttcctgtgtgttccggggcttctgggcagctgggcctgcccggggaagtnnnnnnnnnnnnnnnnnnnnnnnnnnnnnnnntgtgtgccactgagtgtcccaccattgctgggcaacnnnnnnnnnnnnnggggcgccaggtgactctctctttttatgtcnnnnnnnnnnnnnngctgaccttcaggttacatt

SEQ ID NO: 7397 - DNA, 720 bp, Macaca Fascicularis
  misc_feature (1)...(720): n = A,T,C or G
atgtgttgatgnnncacagctaatgattcaatgcgagacaagattggcgtctgtgttgtggaggtttcaaataaagagcactcttcataacttacttttcacaatggagtttttttcaaactttaaaaaaaaaaaactcttaagcacatgctaggcatctggagaaaagatccgaatggattctccaggaaaccatccctgcccgacccgcttgtccacctgcctccaccactggtgcaacttcatccttcagagtcagtttctgcagtcaggagagnnnnnnnnnnnnnnnnnnnnnnnnnnnnngggcatctgttttttttagaatgggagctgcacttggggatggtgatggtgttagagattgcagcctaggacnnnnnnnnnnnnnnnnnnnggggaacaaactgcagcaggttgtacaaaacagagctcacttgacccagcccagggttttacttggtgagcctttccagtagtcctgagtctggggctcagttttaggtttttatttcattaatgtttgtttatttctaataaattttaataaacaagtaatttaggtcaccagaagaccattctttttgtttgtctatttttgttgtcactccctctctcatcatctgtatgccagtctgttcacagatcaccttgtagtccctcgtggtttttacnnnnnnnnnnnnnngctgatctaaggacttcgatggttccagcctc

SEQ ID NO: 7398 - DNA, 740 bp, Macaca Fascicularis
  misc_feature (1)...(740): n = A,T,C or G
agccaaatgctgctcatagaatgaacnnncnttctctagttcgtttagaactganntccatgagacaatgacagaaactttactnatctgataagattggcttgtctcagggtgggaagtgggagggcagggcaaataaaggattagatcagaggatttaggatgcctcctaagaactggaagttctcattccccattatgaacggagctataatatggagctttcataaaaatgggatacattgaggacagaacgagtgatgggaatatgcatagctttaatttggatgattagatctttaatagtgttaagtggcacaacctcgtaaatgtgaaagtacaacttgtatttatctctaatgtgccactggctgaactttgagttcatttggggtcaaagccagtttttcttataaaattgaattcattctgatgcttgacccccatacccccaaccttgtccagtggagcccaacttctaaaggtcaatnnnnnnnnnnnnnnnnnnnntaacaataaagagtaggctataagggaagannnnnnnnnnnnnnnnnnnnnnnnnnnnnnnnagtcatttttttctttgcactttggatgctgaaattttcccatggaacatagccacatctagataaatgtgagctttttcttctgttaaaattattcttaatgtctgtaaaaatgatttttttctatagaatgtttgacttcatattgacctttacctgtaaaacacc

SEQ ID NO: 7399 - DNA, 713 bp, Macaca Fascicularis
gaaggataaagagaacagaagaggcaacaacagacaagaactagcaacaaaatgctggaagatggaaggcagatgggtgagcggtaacaaagttagcagagcaacaagaaagtttgctttgctgtgaaaaatatcagaaaacaaaagcaatatagggcactgtagcagaagctgcccctgctctacctatgtcatctgggatccctctgccatctctttgtagaccagctggattccagtgtgcattctttcacagaagccagcattctgctggaaggtgcaagagagccagaagcacctgagaatttgtgtcccttccctcccggcacagcccttaaccaatgactgatgagggtggggacagacatactccagctcttttgccgtctcactgggatgactttgaggtgtgatctatgatgttcccccaagccctctgtgggaatgaatcaaaattcccttccgtgggacttgacttgatgttttacccttacgtggcctctttctactcctactttctcacttctctcttttccctgggaatatttcctaagaaatcactttcatgtgcattctcctctagtgcagcactgcttgaagataattctgtttcagtgatgtaggagtgtgtgtgtgtgtgtgcacgtgcacgcacgcgtgcacacgtgcatgcattgggttatcatttaacatgaatttcttatcgtgaagcc

SEQ ID NO: 7400 - DNA, 2317 bp, Macaca Fascicularis
  misc_feature (1)...(2317): n = A,T,C or G
atacatttatgatttggtctgcagagactgtgaattgtatggttgtttttgtttttatctttgaataagcacagatcctggcactgaaagcacttgacaaagggtatttgtgcttaaatgttaatataaaagatctgaagaagcaacagaaaatgcccttcagtacagctcagattttttttaacccctgagagataaaatacatttatagtgtttttcagtgttacacatggatttaaaaagatgatgctgttaaataatcttttaaaacagtatttttataaagtgaggggataatttctggttctcaggttataattgagagcagtgtgcaagataataggtaaacgatccattgcacaagtatacattgaaccatgtgatgacttatcttgctgccaaggtcttgcttctacttaaagttttcagaaaactgagtaacagtagagagaaccaagaagtgttacaaggacttttctaaattgttagctaacttgctccaaaataagttgacatgtgatagtaaggttttcaatgtaacccaggaggtttttaaaggcactgttaggctgagcatgnnnnnnnnnnnnnnnnnnnnnnnnnnnnnnnnnnnnnnnnnnnnnnnnnnnnnnnnnnnnnnnnnnnnnnngagtagcctgggcaacatagcaggaccccatctctannnnnnnnnnnnnnnnnnnnnnnnnnnnnnnnnnncatccacgctactcaagaaactgaggcaggaggatcacgtgagtccaagagttcaaggctgcagtgagctatgattgcaccactgcactgcaggctgggcaatataacaagactctgtctcaaaataataataataataatattgataaatgcactgttagcttgtaagtactggaggatgtaggtactagtagttatatgcaagtacccaagtggtattcttccaatcttattagaagcatgaatattcaagattgatattactattgcttattagcaagattgttatcaatcatgcttattagaagcatgaatatccaagaccaggattgactaatgatgagtctgcatcaagaactaggcatttcttttgagttgacagactctttaggaaaggagaatctaggtgaagcactgattttggctctgagaacaaacagattaaggtacagcatagttagccttggtagaggtatgactgggatttgctgtatcctttaaaatagtatctgggcatttattttattgaaggcaactatattttattagttatgttaggaattcaggtagaatcaacttctacttactaaaggttgaatttctgacactttgtagagaaatgaatagactggacactgtgtggtcagtgtttagatttgcccatgggtctgtttaaatctatatcatggatcctgagatatatataattaagacaggtctagagacaggagaagcagaaataagctgacccaggagtacagtctcaagtagttcatgagtgagaaagtggacatctggcaagagtctttttactttatcctggctgaaaatccaaatcttgttttattttttccactaaaagtaactaaaataataacgaatttcatttgttcttgggttcttttttcctttaatgattgtgctataacttaaaataatgatgttacttttgaacatgtttaaagcatatctgaaaacgattgatgtttataactctcttttggcttcaaaataagattgtgttatcaccattttggtagatgaggttgtctgatgaaaatgatgcgcatgacttgtaccgttcagtgtacatcctgcagtagtgaacgattgaaaacatgtatatgcggagtataaattaaaaattaatttggtttcttctattccttaatttaggatgttaaaccatgactgtaagggattttcttggtaaaaagagaagattctcagagtcaaaaatgttcttcaactggggcttgatggcctttgaattaggaatggattgttcctctctctgaagcctgttgtcacatgggtttttaatcctggccttgctgctagaaatctgtgcttgaagtcgtctctttctggtggtaacctaccacttaaaagtcacgacgtggtggaactcagtttactagactctttagcctttgagctaaactgagcaacctcttagatgtacacacaccactttgtatgaaagggttctctagaatggttctttggagagaaatattttcatgtaattttgacaggggtgtaaataaagcatggtgactaataaaaaaaaaaaaaaaaaaaaaaaaaaaaaaaa

SEQ ID NO: 7401 - DNA, 509 bp, Macaca Fascicularis
gaacatggggtttcaggtgtccaagcctttggagttctccaagatcgctgcgtctcccgataccgccgccgtgcccgccaagcctgcgcccccagctacacccggagcgccgacctccccagcagaacacaactggttgaagacttgctggagctgtcgagtgctttctgggttggggctgatgggggcgggcgggtacgtctactgggaggcacggaaacccatgaagatgggatatcccccgggtccatggacaattacgaagatggtcatcggcatcagcattgccacctggggtatcgttgtcatggcacaccccaaagggagggcctaccaccagtgaatctgtcttctgtccctgtccccatgacacacagagcaggcatggagtttaatggatgttctggacagacacttgtccatggacagacatcactactgtggatactacaagactgaaaagacaatcatatgttgtcattctctggctgtagagtgttagtgacctt

SEQ ID NO: 7402 - DNA, 734 bp, Macaca Fascicularis
  misc_feature (1)...(734): n = A,T,C or G
aaatacaggtaatggtatannnaaggctaccataacatnnnanntagagggtggttttttttaatttatctaatggctacagtatagccagattcaaataacatatgtactcaataggtttcaatcatataaataatatattttttgtaactatgaacatatacagtttnnnnnnnnnnnnnnnnnnnnnnnnnnnnattccaacacctatggtggaaagactgtttnnnnnnnnnnnnnnnnnnnnnngcataaaagggagagataatttctttatatacacaaacatacatgaatatgcatatctatatgcatagatgtacctatcctgcacctacaaaggtgcctgacattggcactaaaatcatgtagttatactgggcagcaataataatnnnnnnnnnnnnnnnnnnnnnnnnnntgagggtaggtatatgtagatagatgtgcatgtatgtgtttgtatatataattttataagtttcacacataaattaataaatacatgcctgtgtgcatacatatgtatgggatatatttgtatatatatgtacagataataaacatccccaaggtttgtggctggccatacacataggcatcagtttaacaaccatcagacctcagctgtacaataacaggtgttttgtttaattaaaattatactgttctgcagcatttagacatttgtcacatttcattagctttgacaaccatactgtaacattaaacct

SEQ ID NO: 7403 - DNA, 744 bp, Macaca Fascicularis
  misc_feature (1)...(744): n = A,T,C or G
ttaatgcttttcaaagaactaacacagtaattcctatactggattttaggtctctgaggaactgctggtgtttaggaataagagtatgcatgaagcctaaaataccaagaaagcttatactgaatttaagcaaagaaataagggggaaaaaagaagaatctgagaattgtagaggcatagattcttataaaaatcacaaaatttgttgtaaattagaggggataaatttagcattaagtataaaaaggcagaattagtatagagtatattcattaaacatttttgtcaggattatttcccgtaaaaacatagtgagcacttttcatatactaatttagttgtacatttaactttgtataatacagaaatctaaatatatttaatgaattcaagcaacatatcacttgaccaagaaattggaatttcaaaatgtttgnnnnnnnnnntgagggtatataccagtacagtgagtagttttatgtatcaccagactaggttattgccaagttatatatcaccaaaagctgtctgattgggtattctggttacctggtttacaaaagtatcagagtagtaaaactttgatatatatgaggatattaaannncatacangtatcatttgacttcgattcagaaagtactttggtatctctcagtgcttcagtgctatcattgtgagcaattgtcttttatatacagtactgtagccatactaggcctgtctgtgggattctctagatgt

SEQ ID NO: 7404 - DNA, 1163 bp, Macaca Fascicularis
aagaggaagaaattaaaataacaagaaacccttaatatttgttgcacacttactacatcacaggagtaaggttaggaaactttgtgcatttatgtcatttaatttatcaaaataatcttttgaggaaagtggtatttttattttaatattaaactgggtttcaggatgagatatgagtataggaaagacttggttgctttgagatgttctaattaaattctgcattcaggattcttttgggtttttgcccctgagattgacctcaaacacgaattgcataagcaatgtgaaataatccacatctgatccctaatagtttcataatgagaattttaatcttattgtaattatgattgggaaagataattgatgggccatattagggctcagagtttgagagaatcttgataatatggtcagtgtaggattgcccctgctagtttgaggtgcagaagactcatggcacagcttcatctgagactcagatagttaaggagggcaccatcaccatcatcattatcactattatgattgtcatagaatggatgaggagaagagagagaaaatcatttattctcctatgtttactttagttacctattactgtgtaacaaattactaacacttggtaagacaaaacaatgcttatactctcatagtttctattggtcagcttgctgtgtcatctgcttcaaagtttcttatgagactgcaatcacagtgttgcacagagatgtggcatcatcaaggctcagttagggaggattcacttccaagctggctcatgggactgttggcaagattctgtttcttgcaggttgttgaatagaagaccacaattttaaatgcaaagcaagacttgtgaatcatagtgtctctgttcctgggattcagaccaaattttcccccaaaattctcaggctgtttgtttgaatacctgcttacagtggcacacaatgggcagctttgagaagaaaaattgataatcttcatggaagagtaatttgaatgaaattacacttgacagctcgtctccaagcaaacaagaggaacgagggagcctgagctaagctctgaggacttgcccaagccactgctgttggagcttcccagggaaaaaaaaaaaaaaaaaaaaaaaaaaaaaaaaaaaaaaaaaaaaaaaa

SEQ ID NO: 7405 - DNA, 759 bp, Macaca Fascicularis
  misc_feature (1)...(759): n = A,T,C or G
caaattttaaannnnaaagaaagnnnaatacctaacaggattctgtacatcaaatggcttatttcaatctagttaggaaaatggaacacatgtgaaatgaagattaaaatataagcactaattgccaaataaatgcattcaatacaatttggttgagcactaagaatgacaaatgtgtatatgtctccagggaccaggtaagtaatctaagccaataaagtaggcaagatgaagactaggccaatggaagtacccatattttgtctgaagagggtggccaggcacgnnnnnnnnnnnnnnnnnnnnnnnnnnnnnnnnnnnnnnnnnnnnnnnnnnnnnnnnnnnnnnnnnnnnnnnnnnnnnnnnnnnnnnnnnnnnnnnnnnnnnnnnnnnnnnnnnnnnnnnnnnnnnnnnnnnnnnnnnnnnnnnnnnnnnnnnnnnnnnnnnnnnnnnnnnnnnnnnnnnnnnnnnnnnnnnnnnnnnnnnnnnnnnnnnnnnnnnnnnnnnnnnnnnnnnnnnnnnnnnnnnnnnnnnnnnnagtgtctcactctgtcacaaaaataataataaaacttcatgtataaaggattatcacaatctgtttgatgattccagaaagtccacattagtggtttctaacatactttgtgtcacagaaccctactagaaatggataaatactatgatcctctaccaaggaaaaaagtatgtatataaacttttgtaatctatttcaatggttcttggactccttgaagt

SEQ ID NO: 7406 - DNA, 743 bp, Macaca Fascicularis
  misc_feature (1)...(743): n = A,T,C or G
tgaaaatttnnnnnnntcactannntaaaaaatannnnnnnnnnnnnnnnnnnnnnnnnnnnnnnnnnnnnnnnnnntgtgnnnnnnnnnntgtttctgtcgtgtgtgtcatgcacatctgtgtgttgcgtagcataagccaaatgaaaattaatcatttgttcatgggattcatatgaggaacaaaattaaatttgaatacagtnnnnnnnnnnnnnnnnnnnnnnnnnnnnnnnnnnnnnnnnncgagtgcccnnnnnnnnnnnnnnnnngaaaatccttgctattagaggagannnnnnnnnnnnnnnnnnnnnnnnnnnnnnnnnnnnnnnnnnnnnnnnnnnnnnnnnnnnnnnnnnnnnnnnnnnnnnnnnnnnnnnnnnnnnnnnnnnnnnnnnnnnnnnnnnnnnttggttatttttttnnnnnnnnnnnnnnnnnnnnnnnnnnnnnnnnnnnnnnnnnnnnnnnnnnnnnnnnnnnnnnnnnnnnnnnnnnnnnnnnnncctccagttactgggannnnnnnnnnnnnnnnnnnnnnnnnnnnnnnnnnnnnnnnnnnnnnnnnnnnnnnnnnnnnnttgttgcagtggaagnnnnnnnnnnnnnnnnnnnnnnnnnnnnnnnnnnnnnnnnnnnnnnnnnnnnnnnncatctttgaactcagaaaatcaggcnnnnnnnnnnnnnnnnnnnnnnnnnnnnnnnnnnnnnnnnnnnnnnnnnnncgcgtggat

SEQ ID NO: 7407 - DNA, 2539 bp, Macaca Fascicularis
ttatgtgactgttgggaagtaggagatcaagaatcactttttccatgtggatatccaactgacccaggaccatttattaaagactgttctttccatactgcacagcagtatgactcacttcttcataaaccaggtgatcgtatatggaaaaaatgaatcaaggagaccgaccattcatgacaattcagagaaatgatagctcagatcatctggtattgcatatggaaaatgagatgagaaacaccaagtacaaaccagtagactatcaacaattgcgtgtattaactgaagcaaagaaattagcttctgcctctgcagagctaaagatcagaaaagcaatgttgacttcaaagatatccaaagaacaaacactaataaaacaacacaagcaagtgtggtggcaggaataccagaggctgaatgaagtcagatataaaatggaatctgaaataaaatcccttctcaatgaagagaacattggaaacgaatgtctttgtgaccttacaaattttgagcaagagctatcagaacaatggtgcacatatcttaaaaatgtgataaatcctattcagcagctgagagcagatctaaaatacagacagcatcacactttgcagcattcacacccacatgttgagtttaactctgtgaaagtattggaagaggttgactttgtgaagaaacaattgaaaactgtctttgaaagacttggcctggagcaacagagaatagaaaatgatctttcaggctggagtataaagattctagatcattctttggaagaaaagactaacctgcttagtgaactgcccattgaattaggaagtttggaatgcccataccctgatttgaaatcttcaatccacagtgagttctgtaagtttacacagaaatatcaaaagaagcttcaagatgttgatctgcagttggaagacatatacagaaactgccaactaagtgaagaagaccactggatttaccaggctattttggatcagtaccctggagatctctttggaagaaggactctgtatctggacatgttacaaagatattttcctcacaaatctaggcatgatttgattgaacatgagaaatattgtgaccaatatcgctttgctatggagcagcgaaagatcttgatatcaaattggaataaaaataagaaagactttacacagaaggctgtgctgacactcattgaggcttgtgcagctcatgaaatggagagcacattggctaaggacaagaaaaagcaacaggaattgtgtgctgatctgaaagccaaggttcttcaatggcgagcccaccaggaagaggtagcaagactggaaatggaaatttctgccagaagaagagaaaaggaagaggagaaagagaaattgtggaagaagaaggaattgttgcaaagggcagagaagaaaaaaaaaattaaaaaatactgggctatgaaaaaacagaagtggcaagaaatggaaatgagagatcttcagcgtctagaagaactgaagaaattaatggctgaacagtcactaaaagacagagaaagggttaaatatagaaaagaattattggaaaggcgtttgatggagaaaaaggaagcggcccttcaagaagctcatgaagacaaagagagagcaaggcggctagaagcccttaggaaacaggttgctgttgttgctcaatttgatcctgttagaatgatgtcagatacaatggcatcgaaagctaggatgggcattgaaattgaagaagaatttattcttcaaaagccactcttcacattgaatacatacaatgaacagcagataatttctgaccctaggcttcgcttcgagttagcgcttcgagaagctggacttcatagaacactttatgccaaagagatattaccaaaaattagtcctcgaaaacctccaaggaaggacatggagtctactgtatttaaaatatagagctcttcctcaaattctatatgtaaagagcatttttctttgaaaacatttatatggataataataattactactttctaaaatgtttgaaatatcagacatagaaatcatagcatctattaaaacaactttgcctttcttttgtgattcttagaattttatgcactatatttcctgtatctttaagttatatttaatagtactaaattcccccaaattatggaacttaattatggcacatatagtacttatactataatttagcaaactgcatgttggaggttgtgttatcctatgaaaagagctcaaaataactttgtaagaattataaattatgtaactgctacctgctaatgttcatttctgcttgctatttgagaatttgactttttaattatggaaacttcattatcattaatacttctattatttcttgattattttaagaggagactcaacctttctctaaatttagaaaccaatttggtacaccatgtttactgcaaaccaatcatccaaacaatttcattttgcaaattagcccttaagaataaattagaaattagaaaaaaaaaaaaaaaaaa

SEQ ID NO: 7408 - DNA, 734 bp, Macaca Fascicularis
  misc_feature (1)...(734): n = A,T,C or G
cataagaaagcatctaaactgaactgagagcacagggggctaccctggacaaagtaaaggtggaaactaggtgatgtggcctttgagtatgcagattccttgtatcacttgctagctacttctagggtcttaatagtagtcaagaaaagggatctgagaaaagtactctttcagaagggactagaaagagaagggggtgatatgttacacaaattaaagaaggatgttttaggcatttagtaaagattcagtggttccccactatcctcgggggatgtgtgtcgtttttttttgnnnnnnnnnnnnnnnnnnnnnnnnnnnnnnnnnnnnnnnnnnnnnnnnnnnnnnnnnnnnnnnnnnnnnnnnnnnnnnnnnnnnnnnnnnnnnnnnnnnnnnnnnnnnnnnnnnnnnnnnnnnnnnnnnnnnnnnnnnnnnnnnnnnnnnnnnnnnnnnnnnnnnnnnnnnnnnnnnnnnnnnnnnnnnnnnnnnnnnnnnnnnnnnnnnnnnnnnnnnnnnnnnnnnnnnnnnnnnnnnnnnnnnnnnnnnnnnnnnnnnnnnnnnncacgcccggcccatggtgggggatatgttttaagacccccaattaatgcctgaaactgctgctagtaccaaaccctaatgttttttcctgtatgtacgtacacatgataaagttcagtttataaattaggcacagtaagagactaacaacagctcacagcaaaatagagcaa

SEQ ID NO: 7409 - DNA, 662 bp, Macaca Fascicularis
agtggtattcattgctaatttcctatattcactggcataaaaaaattgcaaacacccgcataaaaggctatactggtggtaccaggaaaacactgaaaatcattactctctgtgttgtgtccagcttttttggctacatcatcacttcgaccattcactcttaaagaaaaacttctgtggaacaaaaatgtaaagatttttttttttcttggtggcttagcacagtggcctaatgtggctgactatgtgtgcctgttgtgtgagtcacttagacgtgctttgtttcttggtcgcagtttatccctcaacgcaagcatctcaccctcaaaatgtttatttgggacgcaactgcaaacctggagacgggttatttctttcaccttggattggctcatctgctgtgagtggagccaagctgacatttcctttcctttctcttctttccttcctttttgtctgcttatcactaggtagaggcagcacgtaagagagggaaagtcatgcacgtggagtccagcagatcacccagaaggcagatgttctatctccagtttactcattaaaacaaacaaaaccgcacctggattgcctggtacttaaataaaatgcacgatgatgactgaagaaaaatctcttatacttaagaaatagtcttaatagct

SEQ ID NO: 7410 - DNA, 718 bp, Macaca Fascicularis
  misc_feature (1)...(718): n = A,T,C or G
cagagtcaagtggcagaactcctggnnnnnnnnnnnnnnnnnnnnnnnnnnngtttccttggtgttttgatctataaatacaaaaaataagtacagcgctgatgctgaatcgtcccatggatggatgaactgattgaaaaaaatcaaatagcctgacgttgagagtcagaaaggccaaagggatcgtgaccaactcagcattccactggaggctatatgnnnnnnnnnnnnnnnnnnnntcatgaatgtaggatgtaagtgaaactcatgactgcgtctgctgccagatttgctgagggcggtcactccctggctcaggactccttgaagttatctactgggaaatctagcacctattgttcgagcctgctgtgaaccaaacgggcagactgcttcctttctcactgtctcttttaccaatcaatacggagggctgtgtaaagctcagggcccttgtccactagaggcaaggtgcccccgacccctttttccaaatatactctcttgtctcttgtcttttatgcccacgtttgccccctttgttcattccaccagggatcaagggcggttacaagtggcgccctgaacagcgacagaatcannnnnnnnnnnnnnnnnnnnntctcaccggggttaaatttcactttttatatttagttattaccatgctgatgttattttgtaatatgcttatgttattttgactacttgcatacca

SEQ ID NO: 7411 - DNA, 775 bp, Macaca Fascicularis
  misc_feature (1)...(775): n = A,T,C or G
actagcaagtttgtnnnnnttatcggnntnntgacnnnctacagaattggcccatacaccaacctgtcctggtcctgctanntaaacattggtgcctgccttctggcnnngctggcggcagccatgctcatctggaacattctccacaagagggaggactgcatggcgcccnnnnnnnnnnnnnnnnnnnnnnnnnnnnnnnnnnnnnnnnnnnnnnnnnnnnnnnnnnnnnnnnnnnnnnnnnnnnnnnnnnnnnnnnnnnnnnnnnnnnnnnnnnnnnnnnnnnnnnatcatggaaagcctggaaaccaagggactccaccaccaagnnnnnnnnnnnnnnnnnnnnnnngcacgggatgagtctgggtgacctctgtgccatgcgtgtgagacgcgtgcgtgtttactgttnnnnnnnnnnnnnnnntatacgtgctgtgggccaacctcatttgcctccagctttcctggttagcgcaacgcggctccatggccacacgtgcttcagggtggaggctggaagctgnnnnnnnnnnnnnnnnnnnnnnnnnnnnnnnnnnnnnnnctttgctttgggattaatttattnnnnnnnnnnnnnnnngggcagcccagtcatgtcttatactttgtaaagcagaccaacaaggaaaattttcttaaaatattcacaannnnnnnnnnnnnnnncataatctacagccggctagtgatggtttcagacagaatcgtgttcgtgcctgttttgctcgattcctttcctaagtaaaaa

SEQ ID NO: 7412 - DNA, 364 bp, Macaca Fascicularis
ccacacaggtgtcttataaagtctaagagaaacacacactgaggtaaatttttaagaggctgtctcttataggaaatgcgatttgttttgtgcccgagcggtctgttttttaaaaaaacacaaacacaaaatctaatgaaagagcactcttggggttttttgtttgtttgtttgtgtatgcacgtgtaaactcacgagcacctgcgtctgtagaggtcactgttttatattgtgtaaaatactttcactgtgggtatttctcaagaggaaatttttattgttttaaaggatttcatctgaaatgtgtataaaggatctgctgacactagtagtatttttaggaggttgtgacttagcaaaaata

SEQ ID NO: 7413 - DNA, 2201 bp, Macaca Fascicularis
gagctggagccgcggtcaagaggaccccaggggacgcggcccgcctggcacaaaaggccacgggtgcgagggactcgatgacctgggaggacgcggtcaccgctggtgcggcgcactgggcccggtgattggcgccttccccggcacagccttgcaccagtgcctccaaattggctgaacctgctgagagtcggcgggagagagcctggggaatgcatttctgaggcatacacaacagaagaaggtgtttgggggcccaggacaaaccggcagttgacaggcacatagaggcttttcagaaacaagtcttgtcggaaatgtgactttttctggggaaaatttgactagaagcgagaacaagaagaactgctgctgggaaagaaagaattatactaccttttgaattttggattaaaaagagaggtgttggcttgtcaaactaccgtgtattcctcaagacatatttttgtagctttataaaaattcaatatatatttctaaatttaaatgtattttgttgcaacctggcccttggacaaaatgaggcattggcagctgatgtttatggctttccacagaaccttccagataaaatttacacagcattttactgcagctatttcacataaagcggaggattttgccacaaaactgaaagaaaaaagaaactgcattcttaaattttttataaatcaaaaggtatcaaaatatccacctaaaagataaaggagatgagaaacccatccgtgatggaaagaaagcctatttcagctttgccttttctttaagttctttgttccatatctggaatgcaatcggaatttaatctttcctgggattcctcctggatgtggggagaagagaaaagctgaaaatctgaaatctgcctgtgttgggctgcatgtcttcggacgccagcggaaggatcacactgcacagagtgctgtgcttgcagaagcccagcttctcaacctccatcgctttatgaattgattcaccggaaaggcttcccaagtagatgcaacataaagggacgatggaaataagcaaaaggttctcaagtatcagcgtgccaccttccacaggcgggatgtcaaaaatagttctggctgatgggcagcttactgtgcataagttgcagggagtcaagggattggattgcggattgcattagtggctttcctcagtttcctcatcttctccacaagtttctacatatcgaatgcagagcagcccttcttcaaaggacctcctacggaacctgctaaggaactcactctgtagctctgtgtggagccatgtgtaaacactgaaacgagacctgccgcctcctactacctaatggccccttctcatctgagaagatcattccctagaaacaagctcatgctgatgtccatgttttttttttgttgttgttgtttgtttttggattggatatatggagaattttcctttcccttagaattaaaatcctgctttctagttttcagcaagcttttttattttggaataattttaaatttaaagagaagttgcaaagatagtacgagaacgttttcttatacctctcatctatttcccccttttattaccattttccatgaccatggtatactttttaaaactaatataccaacaccgaggctttattatcaactacactccagattgtacttggatgttgccagtttttctatgaatgttttctttctgttccttgattccccttttttgttctattagttaaatagttaatagaatacacagttagctattaaattaatagaaaccataaatagttgactaattaatagaaaccaggacacccaattgcttaagtatcatatttgcttagtctcctctggactgttgcaatttctcagtctctccttgtttcaaatgatcttgatggttttgagaaacagtggtcagattttgcagaatgtttcttctttggtgtttgtctaatgttttcctcatcattagactagtcttagggttatttttgtaagaaaggctacagacaatatgcaggaaaatgattatggacattttactataaaactctacttataggcactgagatgtaaacttcatgtacttgtcacaccacacaatattctgttcatttttattatcattaaaatatgtaaaaaacaaaaataaactctcctaattcactaaacaaaaaaaaaaaa

SEQ ID NO: 7414 - DNA, 777 bp, Macaca Fascicularis
cccgctccctacatttcctaacttgtgcccaaggttgtcaacaagttgtctctgtagtagggaccagactgcccagaccgcacgctcagccgcagcacagacagctcccccaggctcagagggcacacagcatgggatggccccgctcccagatgtacctgacaaggagacacatctttggccagaatgtgtctccacactcggtgcttgatctcaggctgttgcttggtttagcttctccagtctctgcctcccctcttcgatctttgccatttcccagtcctggtcacttcacttcaaggaccgtctccccaagggcaagccagggcaccaagaggctgaaactccaccaggcgacgccagctccttgaggacagctctggggacaccctttccttttgcttttttactggatccgagtctagcactggccccgggtgccacaaagggtggcagatgctgggtgagaactctgtacccagtggagaggtctgactgcagctccaacgaagtctccagctagccgtgtggcctcgacaagtcactgggccacctcaatcctgtttccttatctgccaaaatggggctaagtcttgcttatttacttcacttggcagaggcggtggaggtggaggcctggtcatcctcgggctggcccgtctgccgcagcacgcggtcaatctccagcacgtccatccactggctcagctcgtgcttgagctctgccagccgctgttgcgtggcatcttctccgcgccagcgctcatctcatgctcg

SEQ ID NO: 7415 - DNA, 743 bp, Macaca Fascicularis
  misc_feature (1)...(743): n = A,T,C or G
tgaatgagtatgtctgtttcctaagaaagacaatgataaagaattcggtggaaagtaggggtttgttgactttgcttttagcctcatggtagttggtaaagcatgattagcttttttctgtatgtgactgcttcttcattgctgcagcttcagttttgaattgatgtctggactgccagcgtcgtccattattccagactcggccaaaagagggcagccagcctgcactggtcctggagctgtgatcaaagttggccccaactcggtctggggggagttttttcaacttctgtttttccttttctttaagaaattcttcataggatggtcctatttcttggttcccaccgatgtattcatcttggatcatccagggaggtgtggcacctgagtggatgttaccaactcctggtatatcctgtagttggaaatgggaaaaaaaaatgctagttaaagtctagccatgattaaaaaaaaaaaaacaaaacctagaaaagatagagcacacttcaaaagaggtggctgtgactgctgccacaatgctaaattctgcaccccagctgatgttaaactttgaaagcacagtaagtcattcttaagacagccctgtccttaggaagctcacagtcataacagtggagatgtctgtaagtagagtggctattacgtgccaggtgagcaaaactttgccttcacagcacacatataattggggaacagcnattagcacaagttaggtaatt

SEQ ID NO: 7416 - DNA, 552 bp, Macaca Fascicularis
  misc_feature (1)...(552): n = A,T,C or G
ataaaaaaannnnntgcaannnnnnnnnnnnnnnnnnnnnnnnnnnnnannnnnnnnnnnntacacccgaggaggcggatactatgtttataagcagacaatnnnnnnnnnnntcctttctgttcatgctgctttcttaattcatttctccatgtcatcaagaggttggataacttatttctaagctcaaggttaaaaatcatgtcacctttttttttccccccaacacagacctcagaaaaattgcaattgaggaagtagcannnnnnnnnnnnnnnnnnnnnnnnnnnnnnnnnnnnnnnnctggtctctccagagagcccgtcttcacatttctcttcctcagcactcacccgagactgaacagatggggggtggtcttgattgtcaagataaaactggtgaagaaagctaaatgctgagaaactgagcatctattgtcgtgtttaagcttagctgggtcctttctagtttgtttttacagcttactaggttaagtagttnnnnnnnnnnnnnnnnnnnnnnnnnnnnnnnnnnnnnnnnnnnttgttt

SEQ ID NO: 7417 - DNA, 1880 bp, Macaca Fascicularis
agccagggccgcggtgcgcctgcacgtcacggctactcaaacccaagcacgtcccgaaagcggtattttctgcgtctgggaggtttttgcatcctcagttcccaccgctggggctggcggcgaccaactaagtcccactttaccattaatgatgacaataactaaagctgccaggaacagcacatttgctgacctttatcaacaccagattctcgcattttgccttctggatctccatgctcttttataccagcaaacaagaggaagaatattctctacccatttccttgactgaagcctgctcttttatgaagatacggcatctcttccaaccgtgtcaaacagaagcaatttatgtgtatgccgcttccataccctgattcaatgggtcaggggcagaatcagtatccttactctcccctttggtttcaaatatttactcctcatttccctttcatgcccacctttctgtagagatcaaggcatttgcctttgcagctttacctcttcttccagattatattttccattcatggaatcttttagctgccggctcgcagtttttctgtccacctgacttccattcctcttctcatggcttcagctcccatgcagatgtcttatcctgacacactagcttctccattctatttctgttttttgtttgttgtttgtttgttttttgtttgttttttcctactacttcaacaacatttccctatggtctttaactaaaaagtcaaaccagtgactaaaccactcccaatatttaacatttaatgtttcagtgccttaattaccaccttctacttttaaaaactcacctcctaagtaaccacatggaatcaagtctttcacaaaattcaggtctttattattattattattattattaattcccaccagtttctactcttatcttcattttcctccttataccctgtggtaagcagcctctcacatggaccctaatgatccctacttcctggtatgtgcgtccttgtgtaattgtctctctcttgaatgtgggctagatttagaaatttgcttttatcaaacagaatatggtagtagcaatgggatgttaagatataaaatgaatgtgtcttccatcttgggagctcctttactcttccttagagcatttgtttgcaataagccaggtaccgtgttatgataccgtcctaaatagagaagtccatgtgagtttggccttctgaggcctgtcaaaagacacatgagtgagctcagaagtagaagcttcctcattcaagtcttgagaggactgcagtccagccaacatcttggttgccctttcatgacaggcttgtgccagaatcaagcagctaagctgcttctggattcctgacctacaaacactatagatcaggaatgtttgtggcttccaactgctaaatttggggataatttgttatgcaaatgtaggtaactaatgtatacctcatggattccacgcccattgttatgataatttacttacaaccatcttcagctatttactacatttttctggctggatcaccatgtttactgtgatggacaactgcccttcctgatccatgacccatgcaacagagcattactgaagaaattcacaccctcaggcaattagatgtccctgtaaagttatagtcaacaggttcttatgacctcaccacatagactgttacttataagctccctctcttattacacctatggatattttgtaacttttctttgatcattaaaaagcttctcctcaactcttgaaaaaaaaaaaaaaaaaaaaaaaaaaaaaaaaaaaaaaaaaaaaaaaaaaaaaaaaaaaaaaaaaaaaaaaaaaaaaaaaaaaaaaaaaaaaaaaaaaaaaaaaaaaa

SEQ ID NO: 7418 - DNA, 730 bp, Macaca Fascicularis
  misc_feature (1)...(730): n = A,T,C or G
actttatataatgaaataaggcccacataccagcattaaagagaaataggtaagatttcctttctgtaagtgttggggaataggttacaannnnnnnnnnnnnnnnnnnnnnnnnnnnntggggcagggctggagcggggatgcttttctaagtctctgtcaaaaaggtcttcttttaattagacctttatctctgtttctcactgtaagtggctgtgnnnnnnnnnnnnnnnnnnnnnnnnnnnnnnnnnnnntacatatgaagtcagctttccaagtgtatacccggtatcttgcaatgtttctggctagcactgagagtcatcttatactggctccatgccatatgggagacctactttagcttaatttactgataattaactccacaggactgattcacttttaatttcaaggtagtaatgatgtgtctannnnnnnnnnnnnnnggcactagctgtgagtgttggagttactggttttacaaattagcagagatcgtggttttgttcaaatgaaaccacatattatccactcaggaataaaaaaaatcctaattgctgtcgtgggctgccctattttgctttttctgcttttttctccctttnnnnnnnnnnntgttaagacatatagcacccgcccgtctcccccttgcattttaaatggctaaattctaggatgtaataggtattacccctagcactttccttcttccaaattgtagcctgta

SEQ ID NO: 7419 - DNA, 724 bp, Macaca Fascicularis
  misc_feature (1)...(724): n = A,T,C or G
tgnnnagagagtactaaaaattcaaagaccaaantnntctccaccccacaaaaatgggcaaaggacatacagctaggtcaccaagaaagaagggcaagtaggtggtgaatatatgtaaatatacnnnnnnnnnnnnnnnnnnagttggatctttagcaaatctcttttatttcttgggattttgaagaagtaacttttaaaggaagactagaaacaacgtgattaggaattggtcttttttgaattaaaatttcccatcacaagaaaaannnnnnnnnnnnnnnnctttttttccaaaatggagtaggtcagtgagcaatgtgattaataaatatgcaatacctgtgacttttgttttgttttnnnnnnnnnnnnnnnnnnnnnnnnccaggctggaatgcagtggtgctatctaggcttactgcaacctcacctgtaactttttaattgcaagaaagccaaaagatttttttctattacatcagttataatgagaaatactgtatatgctaactatgagtaaaatactatattgcctaacttgtattattaagcaattctgctgacctgagaccttacattttcatctgaaaagcagggactggacaccaattgccctctgaagttattcctagtcctaatattctttgttttgcttgcttttctggcacacttaagtgtgtagtataaagtttatgatgcttaaatgaaattttctgtctct

SEQ ID NO: 7420 - DNA, 653 bp, Macaca Fascicularis
  misc_feature (1)...(653): n = A,T,C or G
caagatgggaggatcacgannncagnagttggnnnnnnnnnnnnnnnnnnnnnnnnnnnnnnnnnnnnnnnnnnnnnnnnnnnnnnnnnnnnnnnnnnnnnnnnnnnnnnnnnnnnnnnnnnnnnnnnnnnnnnnnnnnnnnnnnnnnnnnnnnnnnnnnnnnnnnnnnnnnnnnnnnnnnnnnnnnnnnnnnnnnnnnnnnnngggcgacagagcaagacttcatctcagaaaaaaaaaaaaaagttaataatgacttcaagtattattttcttttccccttattgtgaaataaaatatacattttaaatgaaaattaaggtttagatcaaataaaatcattcagggaaattacacttactttaaaaaatgtgttgttcaaaaatgtacaaagtgaactgaccaaatagaataattcttaactcacaaaggagtttgagcgcactgcctatatatcgaatttaaatctgactaaaggattgtaaacagttgtaattatgggttgtagtagcaaagcagcaaggggacaatcttctaaacttgcctttgcctaggagaactactgtatatttccatgagcgaatttaatcagcagtaggagtggtttacttgtcactgacgtggcacaatctcaacaaattacacaaactggc

SEQ ID NO: 7421 - DNA, 737 bp, Macaca Fascicularis
  misc_feature (1)...(737): n = A,T,C or G
agtctatatcagtttannactaatnctanannnataaaacttaaaataatatggttttactatatatgacctttcactcaccttaataaaaatnnnnnnnnnnnnnnntgtggtaacagaatttttagaaacaacctctataccagaactccaataggttaattatgatcagatttgaagaactttgatcttaaagagctacataattcatttttagccatcagctgctctgacatctctgtctccttagtgattacatgtaaaattcccttcctcaatgtgtccatgccctctagcctttttatnnnnnnnnnnnnnnnnnnnntgttccctctttcactcactcaaannnnnnnnnnnnnnntcaaattgctggcacacacatacccacacccacccacccatgacannnnnnnnnnnnnnnnnnnnnnnnnctattgcagagttaactctactctggtgttttattgttgtcatcattgtttatggtttgttttttacattggaagaagtttctcaatannnnnnnnnnnnnnnnnnnnnnnnnnnnnnnnnnnnnnnnnnttcataattaggttaccattaaaaggcctgggagattaaggtatacccttgcactatttaatatgttatctataaatattagtggaagcannnnnnnnnnnnnnnnnnnnnnnnnnaaggtttttctcatttttctttcagttatataannnnnnnnnnnnnnnnnnnnnnaa

SEQ ID NO: 7422 - DNA, 749 bp, Macaca Fascicularis
  misc_feature (1)...(749): n = A,T,C or G
caggtttatactgcannngacatttttatatctgacttaattgcataagtaaatgagaatcaacatacttgactgtagaaatgagaatgagccctctatgagannnnnnnnnnnnnnnnngatttgtttggcaatggtttttacatggaaattttggccacagttttaagtgaaatatatttttcttttttaaaatgggagcttatatggtgacttattaacatctaaaaatgtaaaaccaaatttcaaagaggtaaattgagagatatgtttgattaattcctctggtaaaacaaaatagcttttgatagatctttactaaactttttaaacagctttaaggtatatttgacacaataaactatacatattcatagtgtacaatttggtgtttgacaaatgtatttacctgtgaaattgtaacaagatataatctacatattcatccctcccaaaagatttcttatgttcctttgtaatcctttcctccccaaacaccaaccacccaccaactccagacaagcactggtcaccatagattagtttacagttttttaatgattttatataaatggaatcatataatatatacttttcattttacttttactcagcataattatttggagatttatctatgttattgtagatatcagtacattcctgtaaattgcttagtaatagtattttgtnnnnnnnnnnnnntatccattcacttgttgatggacttgtgttgtttccaattggaa

SEQ ID NO: 7423 - DNA, 660 bp, Macaca Fascicularis
  misc_feature (1)...(660): n = A,T,C or G
taaaggaccaaggcccttttaagccnccagccctccattttgatgagtatgctgagctagatgctttcacttgcctttctctctctgtccaaaagtaaggctttctggtgacagaggggcgccgtagtggggccttgaatgtctgctgtgtgctatcagggtctctgaggctcagttttccttgggcatccatggttacctctactagtttgggtgagactccaaccaagaagctagggaatgggcccaaataaaaccacacagggaagaacgaagagttgaagactattacaagaaagacatcaacttgtacttatgagatgattggacaaggaaacgtgcttctggcattgactggttggcgggctgtgtctgtggtgactttggggaattctgtgagaacatgccagcatgccaggttgaggtcaggcctaaggacttgttttcaaaacctatgaagtagacccgaaggaaaactggcttggagcattgggaactcaatcacgcagcacttggagaccaaacggaggcattagagcaaggagtaaaggcccagacgtggttgttttgaaagcaattcagagaaaggaggatttcctttttcactatatagccttttatactgtctgaattattaaccaaggctcatgtaactataac

SEQ ID NO: 7424 - DNA, 727 bp, Macaca Fascicularis
  misc_feature (1)...(727): n = A,T,C or G
atacctacacttggagcccaggcccgncgtnntccctgaccgcttccccctacctccccgcccccgctcgcgccccnnnnnnnnnnnntcnnnnnnnnnnnnnnntgcggggagatgtgagaggggaaagccccgctaggagggagagagaggcagccctctggggtacgggtgagggaaggctggctgaagttgctggtctcaggccgtaggtgcctggccagtttcctgtttgtggggcactggggcctgaggaggaggggttcacttcctcctcctaccccctgggagaggccctgcgctgtcactgacatctcattttaaaaaaactgctctcaaggtgtttgaggctttatgcaaccctttagccctcggttctttttggtgtaagaactccggctgtttacctcagactcagacccctgaaattttgccaaattcctcacataactgtttggggggtggggggagatgaaggagaattgcattttgtttacagttaaagacatctaatatcttaaaaaggagttttcctttagaaacacacacacgcccttcctcttgctgaaacgatctcactccatgatactgtgtaaaatatttttgcactgttgtgaagtatttttgacttttttctgtacataactgtgttctcagagctgaatgtttatatcttttgctgtgcaaaagaaacatgtaaaatgttgttcagtgtatatacagaaat

SEQ ID NO: 7425 - DNA, 508 bp, Macaca Fascicularis
  misc_feature (1)...(508): n = A,T,C or G
ccagcttcttcgcgttagagccagccagggataacagcttctttgtgcccaccacactgcagagaggggccatggtcttcatccatggagaagtggtgcacaagagcaagcagaacctctctgatcactcgcgccaggcatacactttccacatcacggaggcctctggtaccacctggagcccagagaactggctccagccaacagatgaactgccctttcccccactgtacacctaaaggctttcacagggcaggagccctggcccctcccgggtgaagatgtgggctgcagacaccagcgtcttgctcagcctcttggttgcaacagggaggtctcgtctcccctcctgggctttcctcatgccctgtgggcagcagcctgggatgggnnnnnnnnnnncatnnnnnnnnnnnnnnnctgcctccctactgccccaacatnnnnnnnnnnnnnnnnnnnnnnnnntcaaagggttctggccccttctcactttcctctcctctca

SEQ ID NO: 7426 - DNA, 737 bp, Macaca Fascicularis
  misc_feature (1)...(737): n = A,T,C or G
agaagcannnnngattcatataatggcannngcctaggatcagtacctgtgannnnanctgannntccacccctcccccacacaaaatccacaacaacgtgcagtggtctcttgtgaatgtgannnnnnnnnnnnnnnnnnnnnnnnnnnnnnnnnnnnnnnnnnnnnnnnnnnnnnnngagcaggaggaggggatatcatacatttaggggaaagacttaagcctttgagctctccagcttggaccacacattgcccttttctcagggaaggaaatggaaacaaaaagccaacagggcaggggttttgtaagtggaactctggattgactggtcagttgctacaatcagaatacgctttcttggaccatgtttgagactcagaagaatgggcctttctgccataattcttcactagttaagannnnnnnnnnnnnnnttgtataaagagacctgcctttaaaatcatannnnnnnnnnnttttagtcaaactacaacaggtttggaaaacctctgtgggggaggggcgaatataaagttttcctcttttttatctgttccctttgcccttcaaactgcagattttttttttttaagtggggatttctccctacttgattaaagattgagtggaattctagatgtggtcatttgtgtcataattttttgttttattttgtttttgatttttttttttcctcnnnntgagtgtatgcttagttgttgagtatatatat

SEQ ID NO: 7427 - DNA, 761 bp, Macaca Fascicularis
  misc_feature (1)...(761): n = A,T,C or G
cagtcaagccccatcaaatagaagtgcttattactttaaccattaaaaaagtaataacagactttgacttaatactctgtcttttcagaggcaaagtgggtgggtagaggggagctttaaaaatagaagtacaaaacaacatcctggaaacatatgaccccagacggnnnnnnnnnnnnnnnnnnnntgcnnnnnnnnnnnnnnnnnnnnnnnnnnnnnnnnnnnnnnnnnnagatttgctcagtcaaggaaattcaagtggcgagacctttccaccatgggcggtgagagaaacctgccttcaccaaaatctctgaaggggaaagaagcggcgagaaaggtttgcttcacttcggggactgnnnnnnnnnnnnnnnnnnnnnnacagagatatttgcactttgtagaaagggcaagagtatttgcttatatctgaagggaggcgggtggtttcgctggatgtttggtctgaaagagttnnnnnnnnnnnnnnnnnnnnnnnnnnnnnnnnttttttctgtgtgctttttttttaattactaagaaaaaattggtgagttcaatagctttggtattatgagtgcaaatcataatagctccaatttgaaaaaaaatcaaaagtgtaacttgtcactcaatgttagaaaattgcctaaaatgcagtgtaataaataatctttgtaccaaatggtaatttaaatggnnnnnnnnnnnnnnnggaaaatgtactgtttttatgtttccaaccctctgaataacca

SEQ ID NO: 7428 - DNA, 759 bp, Macaca Fascicularis
attaatgcacagaatgttcttatacgcagtaagtctctagagacagaaatgtgcttcctctaaatggtcaatgtaaagaattttaaggatatttcttgtgttgaaatttatgttcgattttgtgattacacttggaaatatgtgttaaattgggtttttaattgtagcccagaggtgcattaagaggtacattaagcaagtgtaacattttttccgcataaaacttagaaaactttagttacctgaaaagcaaggattctttactaattattatgctcattcttgatttgacttccttgatcacattttaaagtgtaagaggaagcactagaaactggcactattgttgcactaaaaaagtctataaatcatgataatagcaccatgaggtcttttgcagtgagacagacataaagaatgaatttctttaaaacaaacacaacctgaggtgatttacataaaccaaaagaaaaacaaaaaggctttaaggtattaggtactgtttgcctagcagccaggtggttataagacgttcatatgctttggtacactgaaatgttagccattattcctaaaagcttcttaaattgcatcagttgttagttttgaaatttttcaagaataaacgagttgaaaagtctttgtattaaaaatacacatagatttttgtgaacatttccagtgtgtagtgtcgtttgctttctatttctgacctcaaaagtgcctcacttgtatattatttccattaaaagcttgact

SEQ ID NO: 7429 - DNA, 729 bp, Macaca Fascicularis
  misc_feature (1)...(729): n = A,T,C or G
gcaaagggtgccagtctcactgtggtgatggttagcccagtgtgtgctgcactcacactgcagcacagggtaggtgcttgcaggctggtggatgctgtnntctgggttaagactgtatcccttctggggagcactggaggcttctcccatctgcagtgtttcagcagaagttggcagatatgaaaacaggccccctgtagggaagtagttccatgaaaatgattaattctttccaaaagacttaaaattctttcctatttcagtttttcctttcaaaaaaggaaatacattcatgtaattcaaaacttaacaagtctgttcagcannnnnnnnnnnnnnnntgtccccaaacactgagccccatcccccatccctggtagcaagaagcgtttccaatttaaaggttaagaagcaaagtccctggatttgtattagggatgtcttcctgagaatgtgagttgtgttccatttgaccctggcagttgacctcggcccactaggatcatgccgccctctccagggaggagggtctccccatcacccnnnnnnnnnnnnnnnnnnccctggcactgcccttccttgctcagcatacctttcccgtggcactcacgtgatgggtatttggtttctgaagttactggttgtttaccctgccgggatgtaagcccctccagggcaggggcttgtctcgtgttcagcgctgcatcccagctgctgggcacagtgcct

SEQ ID NO: 7430 - DNA, 274 bp, Macaca Fascicularis
accacacccaaagtattcctcattaaagagagaatttcaggttttcaaaggaagcactgcgcagattttcaaccagatcaccaggaggtgagatctttttcagtccctagccaggaatacccatttgatttacagggcgccatctaatcctgggccggacatgtggatctggaactgaggcccacctctgggtccaagtggactaggcatataggcccaggcggagggggaaagttaatcgccggccttttatttttttttttttttttttttt

SEQ ID NO: 7431 - DNA, 4192 bp, Macaca Fascicularis
  misc_feature (1)...(4192): n = A,T,C or G
tactggacacacactggcttctcttgcaggaccacactggctgtccctgtgggacttgaagtgcagagtccgctgctcaaccagaacagctgccctggctccctcccagcaagaacccccagactctcatctctcataaggaaaaggacttctgggtcctttaaaacaatcccaccgcgcccggcccagactgacattttaataactactcttaggcaaaatagtaaaagggcaaagtctcccactttctctctgggagctggctggcttgggcgctggctggaacccagtgtctccactgtccgtgacctcgggcaggccccttccccctcaggcagctgcaggcagctgttgggctagacctgtgggattctgacctgggttccacaaagcaagctcaaggactgtcctgtgggtgaagacaaccagcagcgaagcaggcagggctctgcctcctggggcaaaacatttgcaagtaataatgctgaaaagaatgtacgagttcccagtcccctctccttccagtcagtgtccagcccagccctttgaactgggtggtaagctcactctggaaccagagacaaagcctaaacagccactggaaggtctgggacccacatcagcccccacatccaccctgccttctcacattttttgtgctgcatgcctggtgcaaaacgtatgaatgacagctctgcctatccctgtaactggcttcttctacccaggcatctcccttctcctctacttcacctagcaggcatcttcaccaaagtgtgccagcgctaaaagaaacatttaaaatcaaaattaggtgaagcaccaccaccgttatgagattctatagagtcttattgttcacccagttgagatgctctgctaaattagacatggaaaattggaattgattgctcgcatgtggggcttaattaaatgctctattttttctccctggtaatgtcccaggagacgggtctacattgttttagtctagccttgccgaaccgcctttcctttgtgctgattgaataggggggaaatgacaagcaagttaccaggcagtttcttcacccctgttggctgaaaggccccttatgttacccagaagcgcttgtgttctctgaggccagtgggcacgactatagccaaaggtggacatcttccagccgaaggcaaagagaaaacagcccttcacggcaagccatttcgtgttgtattgtggacgtggttgccagcggtaactgggaaactttgactcagcatgttctagccagacagagttgagcccaagtagtgagctggggaagggtgaattaattcttcaatggcatgagagggatgcaagactgtaccggggaccactgactctatttcgatggctttaggactttagaatatggtaaaactggaagtcccactggaagaccgtcgatccgagcagggagtttccacgagggacgcgtgcacccctgcggatgacgtgcatttcacagtgcaaagtgtccagtgattccatcggattctcaagggaatcaatgacccctccagaaagataacaaattcttaagtaaatcaactccctcattttaaaatggagagattaagcccggcacagtggctcatgcctgtaattgcaacactgtgtgaggccaaggtggacagatcacttgagccaaggagcacgagaccagnnnnnnnnnnnnnnnnnnnnnnnnnnnnnnnnnnnnnnnnnnnnnnnnnnnnnnnnnnnnnnnnnnnnnnnnnnnnnncagctactcagccttccgagtagctggcaccacaggtatgcaccaccgtgcctggctgatgttttttattttttgtggagatggggtctcactatgttgcccaggctgatctcaaacaatcctcctgcctcggcctcccaaggtgttgggattacaggtgtgagcccaccatgaccagcctcgttgtcactttagaatgtggtgaccagaaggctcagcagaagactctcagcccaaggagccttagctgggagtttccacgaggttccagaggtctatgaacctctaggggtaggtgcactttaaaatgttaagagtttaacaatttcatcagattctcaaaggaatccttgactcctctccctgcccctgcaaaaggataggaagctctaaagtaaaccagttgccttattttaggatggaaagcccaaggagaccctaaatacatcagcgtatagatccttagaataaggagattctcacagaacgacagtgcatttctcaacttcagcacaattaacttccatgcgctactttaatctactgtcagttccaattttgtcagctgacctaataatatcctttatagcgttttttcctccagtacagggtccagcctaggatggaatataccagatattatatgcgtggatcctatatttttcgtctcctgtaatctggaccatttccccagcttttgacttagatggcattgaaattgtgagtcaaatatagcacgtaaacaaggcgctcattttgtgttcgtccactgtctcctggtgctttgaggccatgcattcctggccaggacattacataagtgacgctgtgtccctctcagggcattgtgtctgggagtgccatgtcctatgagttgtttattcaggtgagcccaggagtactggggaagtgaccccaggacatgctcgcaggggagtggagattgacagaggggaggaaacagggactgggggagtgccagcctggcctaacgacattcaactaaaaaatgaaattaatgttgtgcctgctcccgctccagcaggcagatagaatgtacagcaggccgggtatgtgccagccacccagaccacctctgaggacagcatctccccttacagacaaacaagtccccaaggctcagagcacgtcatctctctccacctgtgacaaggaggggaccctccgctgtccctccggaccctgtccagcttaggcatgacctgtctcacacattctttgagctaaaaggaccttaatggtcactggctccatcctgcccattttacaggtgtgggtgtggaggcccagggaggaggcataatttggcaagccacacagccaagggtggccatgccaagactcaaaacccaggctctgaactcctagcctggtgttcttaactctgtgccacccaccccccgcccagcaccagcctctatccagtgctgaggtctgtacgtgatgtctaaccaaggggcacctccaggaatctaatgtcggttaaaaataaaacaaagggaagccactgtccccccgggccctatggcctccttgtcgtccgcagctgtctggtctgaggtggactttgctgagttgaacagagcccagccctgcctctgcggcagcctacttccagatgacacgtggagagccgtggagccagtggctcagctgctgtgcggttttcataactcacctttgctgtaaggggaacaaagtcgaggggaacgctggggtccatgtgatgtgacttggaatgaattcagatgccctgagctaaaattagcctatcttactacttccaaaggtttccattgtacttggccaatgaccagcctgaaataagatcccctttggtaagttcagcagcttcaccttgcaccttcctaacgaagcattcagggcccccacctccctgcaaacctcagagaaacattaaacgatattaagaagtgatgctgtggcatccttggtatattggggtggggccactcatgaggccagctggggttgaccttgaggatgtgagagattctccctggaaagggggtggcaggggccagatatcactcacctcagcccaccaccaagacttgagtcaaaagttacctataggccgagcacannnnnnnnnnnnnnnnnnnnnnnnnnnnnnnnnnnnnnnnnnnnnnnnnnnnnnnnnnnnnnnnnnnnnnnnnnnnnnnnnnnnnnnnnnnnnnnnnnnnnnnnnnnnnnnnnnnnnnnnnnnnnnnnnnnnnnnnnnnnnnnnnnnnnnnnnnnnnnnnnnnnnnnnnnnnnnnnnnnnnnnnnnnnnnnnnnnnnnnaggcggaggttgcagtgagccaagattgcgccactgcactacagcctggtgacagaacaagaccctgtctcaaaaaaaaaaaaaaaaaaaaaaaaa

SEQ ID NO: 7432 - DNA, 1304 bp, Macaca Fascicularis
  misc_feature (1)...(1304): n = A,T,C or G
acannnnnnnnnnnnnnnnnnnnnnnnnntgcgctgtgaactgnnnnngctggagaagcggctgcgtgccacggnnnnnnnnnnnnnnnnnnnnnnnnnnnnnnnnnnngaggccaaggagaacgccatgcgggnnnnnnnnnnnnnnnnnnnnnnnnnngatcgcatcaaggaggccgtgcgggccaannnnnnnnnnnnnnnnnnnnnnnnnnnnnnnnnnnnnnnnnnnnnccgccccggacactacccggcctcatctccaacggccgtccatgccattcgagggggaggaggcagctcttcaannnnnnnnnnnnnnnnnaaataaatacaaaatatgactccacatagcatgtcaaggactacattaatcaccaattcctttatttttttcccccctacagtttccattttttttttatacttgcnnnnnnnnnnnnnnnnnnnnnnnnnnntttcaggtcttttgagctgtgtagagtttctgtgtgtacagatgtgtgctcggacttttctctttttgagaaatctgaaggagatggttgcagaagatccacttactactnnnnnnnnnnnnnnnnnnnnnnnnnnnnnnggtgttgggtggtttctgggtggttcctggagcctcctctgggcagtgcactgtcccatctgtacgccctaatgtgccattccctggaggggaacaaccaagtaccgtggaggcgggagaccatgctctgcctcaactgtctggtttcctgtaaaataaacacattattttatatttttagggaacaaaaagtgctgctctagggttcaaagttttcattctgaacacttttccgaaacaaattaccccgaagacacattttgaatatcttggtcacatctttggatctgtaaaatataccttttagtaatggcacctgttaaaatgcaaagcaaatttctttggggcagaaaaacaatctgacagtagcagtgtagaaattgttcattcagatacatctgtgtcaatgcaaaaagtcataaaattcacctccgagctgcttgcttttcaacctgcagcaactagtctcggctggccggtttgaacgtcattctttcagaagtgctgaaaatgctgcaaagttttaagtggaaatgtggctgcccctctcctcacttcttcctccctgatcgttctggagctggcattgggaacggctnnnnnnnnnnnnnnnnnnnnnnnnnnnnnngtattgctgaagaaatccagcatcattccagcagttgaaaaaggaagccttggggagaaagtactgacacaattttgt

SEQ ID NO: 7433 - DNA, 1103 bp, Macaca Fascicularis
  misc_feature (1)...(1103): n = A,T,C or G
catgacttcacactttttgttnnntagtttgttctgttgtatgatggcgtgtgtgtgtgtcttgggtactnnnnnnnnnnactgtnnnnnnnnnnnnnnnnnnctctcattgtgtttgaagtaaatattggagacgggacggtaactcataacaggttggcctgttgattacagctagtaattgctgtttcttgttcctccccctctctgacaccccagcttcccaannnnnnnnnnnnnnnnnnnnnnnnnnnnnnnnnnnnnnnnnnnnnnnnnnnnnnnnnnnnnnnnnnnnnttatcctannnnnnnnnnnnnnnnnnnnnnnnacattatcagnnnnnnnnnnnnnnnnnnnnnnnnnnnnnnnnnnnnnnnnnnnnnaccagcatgttccatttccaatttagaattagccacataataaaatcttagaatcttccttgagaaagagctgcctgagatgtaggtttgttgttatatggttcccacccccccaatttttgtgcttttttcttgttttgttttgttttgttttgactgcactgtgagttttgtagcgtcctcttcttgccaaaacaaacgcaagatgaactggacttacgtagacaaatcatgacaccagtgtatccttcctttcttcannnnnnnnnataatgaatggtcaactcttttaaaatctagatctctctcattcatttcaatgtatttttactttaagatgaaccaaaattattagacttatttaagatgtacaggcatcagaaaaaagaagcacataatgcttttggtgcaatggcactcactgtgaacatgtgtaaccacatattaatatgcaatattgtttccaatactttctaatacacttttttataatgtcgtgtgtggtgattgttcaggtcgaatctgttgtnnnnnnnnnnnnnnnaggtcttcagctgcccttctggcgagtacatgcacaggattgtaaatgagaaatgcagtcatatttccaatctgcctctatgatgatgttaaattattgctgtttagctgtgaacaagggatgtannnnnnnnnnnnnnnagtatccttttgtacacattttgaaatgcttcttct

SEQ ID NO: 7434 - DNA, 416 bp, Macaca Fascicularis
aaaaaaatacattttccagtggatttttaggaaacaaaggtatgtttgatttttcgattttagagttacttcttcattgatagtaacatgcacttatatcatgatctaaaccataagttcagattgcttgacattttgttttgccactttcttttatgataatctgattcttacgctttacttacattttcctttgtcttgccagtctgttggccgtcctgaaaaatatcaccacctgctgtttcatatacagagaggaattttttaaaaagcaaataaagtttcactgtcttcgtttccagtagaaatatatacgaactatggttttactctttgtaattcagctttcttgaagatactaacaagtatatgatagatcactttgacatctgataattatatcagtattattattt

SEQ ID NO: 7435 - DNA, 715 bp, Macaca Fascicularis
gaacataccaatcactcttaaatataggacccaaacttataccacagaattgtgtgtgtgtgtgtgtgtgtgtgtgtgtgtatggacttgaattgatttttattttaaattccacttctttgcatggtagacaacttctcttagatttccaaagataaaaacatagattcattcattcatttattcactgtttgagtgcttagtaggtgtcaggctctgttctttgtgttaaatattcaatggtgaatgaaattcatgtgatttctattcttatggagcttactctttctcagtgttaaattttctactctcctgaacttactttctataattcatgtctttttatctttaagtgcttccatgtcactaataagagttttcctcatgagaagaacagatttgtattttgctattctgggataaacaagaccaatatctttacatttttcttgcagatccacatccttatctctttggaaacaatgaatgctttttgctattctctttcaaatttaaagttcaattgagtaaaatattaatatatgctgatgtaatgttgactataaagtattaactcctgtctcgattgtggtttattagtcatgcttgaattttgtgtttattgattataaacatttactttaattttctcatagattttgatttcaaatgtaatttttgccacataaaggcccattcaaactctgtaatttgg

SEQ ID NO: 7436 - DNA, 1722 bp, Macaca Fascicularis
caactctctagaaacaaagtcaaattaatcacaaaagacataattttggtttgttgtggaatttctatttcaccgtcaactctgtatctatgagtatgtctgttccacatacagatgaggcaggagtgatggtgcactcaagaaagttcagaggaggcataagttgtggaggttggaaaggaagaaagagaagagctgaagtaaatgtatggtagaaattaagacgtttccttgcaaaacaaggaaatcacacatatgcacaactacatatttatggttactatgattattattatttttccaatcaagcaaaacaccattatttctaatatttaaaagaccagatcaaacacaatggaaataaagctactacgtatatatgctagtgtttctctagtacgattatgtttcttttactagaaaactattttctaaatattaacactgaaaatgttttgttagcttttccttctttctctccagaagaaaagcggatagatgatagctgtttcattgtttgtttttgtcaagcatattcactttcctccttgtcctctgattctgagcaagggaaagggccttagactctgaacttccctcacgtgcccttgttatgtgagacttccattcagattccagagaggttctcacgctccccgtccttatttgtagcagttgtagcaactaattctactaagtacaagggagttttacactcttccatttttatatcctctgcatttattttgctttgttaggtacatgtaaatacatgcctgagtataaatactctctctacctattaataacatcaaccaacatcttttccaagttagggtcacagaacagcaacatttgtctgagagtagtataaggaataatgatagctgtatccttgagaagtatttcctttccgtgtttttatatagtcccgttagggtttaaaaccatattgatcaactagaaagaaaaatatgaaaagagaaaaatattttaatttaaaaattgtaatacattggtttataaaatgccttctctgatactttcgaaacagatgtgaaaaagagaaaaaaaaaattgtctgaaatgtttattttgcgaaaaagtgcaatagaatctagttatgccttcatcattgttgacagtaaatactgacagccccttgcagtgtgttagttttagatcactctgttttagttgagagaaatgttttatatcatggtttttatatgaatacaaattacttctcaaagatttatagcacacgctattctcaggaattctgtattacatgaatgctgcttatatattttcatattctaacttgtcttttcaagtgaataactaatatatatgtgcatgcactctgccttgacaagttgttccaagatgaagagctttcactgtacaatgtgtggaaaatcacagtagatcatgcctgaaatagtttgtaattgtctgagtctgtgcacgtacttttagataaaatgctgctgagtgactgcatgatgagatacaacttctgaatgctgcacattcctccaaaatgattcttagcacaatctattgtatgatggaatgaatagaaaactttttcactcaataaatcattatttgatatggtattttccctataaaaaaaaaaaaaaaaaaaaaaaaaaaaaaaaaaaaaaaaaaaaaaaaaaaaaaaaaaaaaaaaaaaaaaaaaaaaaaaaggccaca

SEQ ID NO: 7437 - DNA, 737 bp, Macaca Fascicularis
  misc_feature (1)...(737): n = A,T,C or G
gacgcttcttgtnnnnacatggacaaatatatcaggtgttacagagtctcagttacaaaaactaacaaacatgctacttggttaaaatggctacactcatctggttcattctttgatctattctattttagttggtttgcatcttgccaaaagtgcatactccaaactcttaacattatcttcctcatcgtcatactagcggtctccctggtgtgctgtaatctctaaaagttttaaatgtttgcgtgctgccatccatcaaatatcaaatggtctctatttggctggaattacataaactcaaagaaatgtgtgatcaggaggatatcataacctataaatgatggaagccaaaaatgatgataactgaaggtaatgctaatgctttaagttnnnnnnnnnnnnnnnnnaaagtgagagtctaaagactccaaattagagccactcatgctacatgctacatactccaactggaattttaaggaagcagatctcaaaacagactagtgttttctgaaaacagaagattccagtctccctgagtcaacatcataaggaagtcccctctgctttaacatttaccccaaaaaaaagtaacctnnnnnnnnnnnnnnnnnnnnnntccatttatttctatggctctgtttactggttccaatttgacaaaacccattgttctgtgattgtattgcccagggggagctatcattgtgttcgtagagtgggagctgccccaa

SEQ ID NO: 7438 - DNA, 755 bp, Macaca Fascicularis
  misc_feature (1)...(755): n = A,T,C or G
cagaccnnnnnnnnnnnnnnnnnnnnnnnnnnnnnnnnnnnnntnnnngccggaggccaacctgctcaccttccttttctttnnnnnnnacctgaaaagggtggcagagaaggaggcagnnnnnnnnnnnnnnctgcacaacctcgccacggtctttggccccacattgctccggccctccgagaaggagagcaagctccctgccaaccccagccagcnnnnnnnnnnnnnnnnnnnnnnnnnnnnnnnnnnnnnnnnnnnnnnnnnnnnnnngctgnnnnnnnnnnnnnnngaggccannnnngccccggacagcaagagacagagcatcctgttctccaccgaagtctaagagccccagttcatctcccnnnnnnnnnnnnnnnnnnnnnnnannnnnnnnnnnnnnngccatccgtagagtgggaaccttcctgaggtgtccttgggccaccaagtgtcgggccatctgccaagaaacagcgacccaaaggcaaaggacaggtggactgggcaaatcccgcctaggtctggaagccccagactggcctcagactgtggtttttttccctgtggccacccgagggcgccccaagccagtgcatctgagagtccaggcctggccctgggagacagggtgaaaacagtggtttttatgaacttaacttatagagtttaaaaggtttctactgnnnnnnnngtcaagatgcactctctgtggggagaagggaatgtgaccagatccctcactgttg

SEQ ID NO: 7439 - DNA, 496 bp, Macaca Fascicularis
gagaatgatataataattttctgaattgacatctggatgttgaaattaggatggtgcaaaaggggtacagggccacaggctgggtacagcagccagctccccacgacgcagaagctgcttcaaaaccccctcagcaaagaggggcacatgcaagtcaacaaagtgggaagccttcaccaaggccacacccaaggtctactgattgtctacccaaagttcattgattcctggccatgaacaaacacaacagaaaaatacactgagggtcctagtggctacaagtcaatggtgaattggcacatggtctagcagtttttaaatctaacagtagagtatggcaatgggtaagggccaagaagtccttctgagatgggaggtctcgctgtattcgggctcagtggaggtctgtgaccagtgtctggacactagctacaggggactgggcagaggattctgggcagaaggcaaatgtctaaaagtacttggaagggtaaag

SEQ ID NO: 7440 - DNA, 725 bp, Macaca Fascicularis
  misc_feature (1)...(725): n = A,T,C or G
gccaggcctgcccccatctcgttggtgtgcctctgcatatactacgcactcatcttcctgctcctcttttcccttgatcagtgtcctttcatcctagttcagctgtcccttgcatcaccctcagcctaagagagtgggaaggaaatggggtgttttcctgctgacttgaggctatggggtcacttgccacttcctaccttccctgggggacttgagggtagaggcgacttgagggtagaggcaggggaagatttgttgttgcagctgcctctgcccccttggtccaaatgaccatcatctctgatggagatgggttgggtacccggccctcatggcaccctcactgctagtgatgccaaggggcaggcctggagcccttccctcctgtctcttctcagtccttcctctctgaacagcctcctacctcccctgcctgagccccactccacagccctccnnnnnnnnnnnnnnnnnnnnnnnnnnnnnnnnnnnnnnnnnnnnnnnnnnnnnnnggctggggctgggttggaacaggtgtgtgtgcccaccacattagctctgtgactcttctccctcnnnnnnnnnnnnnnnncttatatttgagggacctcaggagagtgaggaccctaccatccactgtccatgttcagtcccagccccagtgcccttcctctgtcccctccctcagccatccaattcttgagttttctcactgactggttttc

SEQ ID NO: 7441 - DNA, 724 bp, Macaca Fascicularis
  misc_feature (1)...(724): n = A,T,C or G
cgaggagcagaggcttaaggaggaggaagaagacaagaagcgcaaagaggaggaggaggcagaagacaaggaggacgatgaggacaaagatgaggatgaggaggatgaggaggacaaggaggaagatgaggaggaagatgtccccggccaggccaaggatgagctgtagagaggcctgcctccagggctggactgaggcctgagcgctcctgccgcagagctggccgcgccaaataatgtctctgtgagactcgagaactttcatttttttccaggctggttcggatttggggtggattttggttttgtcccctcctccactgttcccccccgccccccaccttttttttttttttttttttaactggtgttttatctttgattctccttcagccctcacccctggttctcatctttcttgatcaacatcttttcttgcctctgtccccttctctcaccatatctcttagctcccctccaacctggggggcagtggtgtggagaagctgcannnnnnnnnnnnnnnnnnnnnnnnnncctggagcccagaggggggcaggagaagggggtggtgtctctaatcccccagcactgaggaagaatggggctcttctcatttcaccccgccctttctcccctgcccccaggactgggccatttctgggtggggcagtgggtcccagattggctcacactgagaatgtaagaactacaaacaaaattc

SEQ ID NO: 7442 - DNA, 738 bp, Macaca Fascicularis
  misc_feature (1)...(738): n = A,T,C or G
cttgannnnnnnnatgggctccatattttnnntcttaaatgtgcatcaatcatgccttgcccctaacctttaaatatattcttagacctggtaaatgcactcagacttgcatctttaggaatttttaactttctttcactacattggcacttaaattttttctttataaaatgttttgaaggtcataaacaaagaccaaaattgatagacctaacacatttcttctgtgtgtgtgtaacattccaaatcctttttttttcttttccactgtttgtaaggtgcaacaatttaatattttaagggactttttaagagttccttaagaaccaatttaaaattacttcagtgcagtcctacacagtatcaacattagaattttgatattagtcttatgttatcttccattctatttttatctgctttttgctgctagtttcaaactgccagtatttttccttttgcttttaaaatagttacaatatttttcataatagccacagtattgccacagtttattataataaagggtttttatttgatttagagcattcagagcttttttccatcacttttgtgttcagaatataacctttgtgtgcgtgtatgttgtgtgtgtgcatgtgtggcgtatatgtgtgttacaggttaatgccttcttggaattgtgttaatgttctcttggtttattatgccatcagaatggtaaatgagaacactacaactgtagtcagctcacaa

SEQ ID NO: 7443 - DNA, 760 bp, Macaca Fascicularis
  misc_feature (1)...(760): n = A,T,C or G
tcatggcaaatgacnncnnnaagcagcctccttttnnntnnnttcnttttgctatgcannnnnnnnnngtgcagtggggcggttgtgatcttaccgtgcaagtcaaccatgtgatcttgcccagtacagctactagctnnnnnnnnnctcgctcagctcccccaacttctattgaagaaaatggtactcctcattcttgtagtcaactacaaagtannnnnnnnnnnnnnnncttggtggtataattggtttctgtatcgttttgtttcaactcatgtattcactgaactaaattggacacttacagcagattgtgttgtggttaacccttgatgcttgtctttctaacacactattaattaagatgattctaatggatttcattataaaaatatttctggcatgatttttaagttaaatacttctctgttctttaacatgactgatgtgtaaaatgatggttnnnnnnnnnnnnnnnattttttattgtaatttgtttaggtttgtgtcagatagattcctataaatttctatgtaaaattctgtgttaatggtgcttttaaaataatttaaaaataaccccatgtttttgccttagagtaagttaacttactgttttcagatagtagcatgacannnnnnnnnnnnnnnnngcaaaatttattttcaattttatttccaaatatacatccagagaaagtaatttgtatttttttttaaagtaggcatattacacatgagggaatatgtgaatatgtat

SEQ ID NO: 7444 - DNA, 1590 bp, Macaca Fascicularis
agaagcaaccgacccagagaaggagccagactgtggggctgtgtgcaaagtatgcccgcaacagcatgtgttactgcgccatcacatgcacatggcagtgatggtatgcagctgtgtaccatgtttgttttagtgtggctaggtgaccagggatgcatctctgctacattcgtgtgtgatggcgtgtgcctggtgtggccatggctgaggctttacctgcagctgtcaggacaacagcaggaacaccttgggcattatcaggacaagggggcactgggagagaagcactcagaggaaggtctctgggaggggctgaggatggggaggagaaacgggaaccaggcttccctgctgcacctgccccgcccaccattagtatccctgagattccagacccaagagctaggtgctttgtttacaacaaaggcagcccctgcctggaccctgcctgccccactgctccagcctctcccctgcttctccagctggcactcctccagctggactcctcctgttccccagtaattgttcccatcctctcctacatccacgctttggttcatgctgtgcttgtgcccagatgccctcctgagaagcatctgagttccctctaactctgtctccatgaaatgcttcctgctcattccctctcttccttggactgaaacccactgtgtgctgaggcctaattctatgggcccttgtctcatcccaggaacttgaaagtgctgggggctggagatgccagagagggcagtccaaggggagaggtatggacaaagcaaggtggggacctctgagttaatgagacaaagcaccatcacagaatcccctgaaatgaaagaactgaatattcagattgaaaggggcgtactgtataccagaaaagttgacacagaataattgacatgaagacacattgatttggctgggtgaggtggctcacacctgtaatgccaccactttgggagactcaggcaggaggatcagttgagcccaggagtttgaggccagcctgggcaacatagtgagacccttccctctaaaaaagaaaaaagacacattgatttagttaccaaactttagggctaaagtaagaatacttaaggcacctagacagaagaagcaagtcatttatttacgagggggaatattcagtctggtctcagacttctccaaggtagcatttgacaagtgaagacaatatctacagagttctgagggttaaaaagtgtcaccctaaaccataaccaacagagtggttgatctcaatcatgaatttgggggatggtgtactcatgagcctttccagaaaagactactcaatgacaaaacccagtcagccaagagattagtcaagttcaggagctgaagaagggagattcatggtaaagaactggtggtgacattaattccatttgggaattaaccttaattcaatttaggctaagattacactgtgggaattttagttacaaaacaatgtaaatacagttgacctttgaacaacacgagtttgaactgtgcaggtccacttgttcacagattaaataaaatcagtaaaagttaaaaaaaaaaaaaaaaaaaaaa

SEQ ID NO: 7445 - DNA, 741 bp, Macaca Fascicularis
  misc_feature (1)...(741): n = A,T,C or G
ttttttttaaagagaaacaaacaaaagacttgccagtcaacaactttcaaagagaacaactttggcttattcatattctgttcaaagacagtctattttttcactgtagaaagcgtccttgtgtgattgatagttacgtnnnnnnnnnnnnnnnnnnnaccgggcccacggctgtaccttggcttgcttttttttttttctttttcttattttttctaccatcagaaagttgctttgcccacagaagaatgggatgcccttttttcttttttggctttttccccccccctttttgtttcatttttataaattaaattttcagacatatcaaatacagttctgagggtagggtcatgggggaactcggacccagcagcgttgggttcaaacccatggggtacagttgagggagacgctgctgtaaaagagagatgacagtgccccctccgccccctccgagagcccaagctgtctccccgtctcccgcccccaaggagacggagaggatcctgcttcttcggggacgggggctgtatgactgtgctgccccacatcagggaccctttcccccctgggactatggggcagtttgggagcaaaaccagaaggacgggaccccctctacccacccgagcannnnnnnnnnnnnnntttgtacaagggcagatctgcagttactttcaacactgtttattccagcggaagcagcgggcggttttcccacccccgcntagtagatat

SEQ ID NO: 7446 - DNA, 2106 bp, Macaca Fascicularis
aatatgtaaattggtttttaaaagaaagaaggttttagcctctataactggtgtcaaaggtctaaatcaatatgtattagaatactgtacttatactacattaaatcttcctcaaggattagtaaagaaagcacgcacgcgtcagttacaacagaaatactcttgggaaaataaagtgatgtgaatattttgctagttgatgtacctgaaatacatacccgtggcttttaggaaatcaagcatacaatcatctgaattaaatggaaataggtcaaatgaggacaattcaatttttacagcttatcttttttgtttgttgcttcagagctcgctcactcacacacacagatgcagctatgtccctaccccatggcttatatttttttctcacaaaactcatacaaactcttacatacccatacactactttatagatacaaggtttcacacttatgacttgactttgatgtcttaagtattttaaatatgtataacagaaatgatatcttccttgcaacattgttgcaaagattaaatgaggtaataaattgtaaaacaaaacccaaaacagttaaaggtcttaaacatagtagctattgttatttttatgtgtgcgatgatatcctgttaccactatcggcaatgatgtgataaaactaggaacagtcagcgtggtatgcttattcgatgccaaatactatgatgaatgtagctttatatacctcagcccatttaatttgagtagacaatattatcccgttttacagctagagaatatggacttaaatacaggtgtgtatgccatttgttaaaaaaagattcacttctgagagctcatgacagagtagttaagagcctgaatgctgtggtcagatcctctgggttctaaccctgggctctgccacttccttgcagcatgacttgggccagatgcctatttactctgttgtctcagtttctttatttgtgaactaggaataatattcttatatataattcataaggctgttacaactattaaaggaagaatgtttatgaggcactctagaattgtgtctggcacatagtaagtgctatacaagtgtttgcttaatgaaataaataggctttaaattacatttgactggtagaaaaatttcaaaagcaatttttaattgtcttgtttaggatttttattcttcattttaaaatcaacccccaagcatttggaaggaatttctgtgagtttgttatagcccacagatctaaaaaggtttgtgttaaagttatttggaagcaatattagattcagaagagggcaaatgacctgacattctcagatcataaacatcttttgtgtaagtcatgtccacagaatcgacttgctagttatgttccatctcactgaggtacctccaagagcttgactatcactggttccagtttgaggagctaggccccttttgtagttaaccagaatccatatctacctagaaaacatgtagctcccgaacaatgagaacacatggacacgtggggggaaacaacacacactggggcctgtggggtggagggagggagagcatcgggcagaatagctaatggatgctgggtgatatgatttggctatgtccccacccaaatctcatcttgaattgtaactcccacaatttccacgtgtcatgggaggaacccactgggaaatgactgaattgtgggggcgggtctttcctatgctattctcgagatagtgaatgagtctcacaggatccgatggtttaataagggaaacccgttttgcttggctctcattctttctctgcctgctgccatccacgcaagacgtgacttgctcctccttgccttccaccatgattgttgaggcttccccagccacttcgaactgtgagttctccattacacctctttcctttgtaaattgcccagtctagtgtatgtctttatcagcagcatgaaaatggactaatacactgggcttaataccaacatgatgggttgacaggtgtaccaaaccaccattgcacatgtacctatgtaagaaacctgcacattctgcacatgcctggaacttaaaataagttaaaggaaaaaaaaaaaaaaaaaaaa

SEQ ID NO: 7447 - DNA, 119 bp, Macaca Fascicularis
tggggccagcaggagtatagcacgaggagagaaataccatagaggggccagatttacatatctgacaaccatcagacaccagagcccacaccgaggcatcaccacaaaaaatggtgtgg

SEQ ID NO: 7448 - DNA, 699 bp, Macaca Fascicularis
  misc_feature (1)...(699): n = A,T,C or G
ttggtgtgcatgctnnnnttcagttgnnnncctcttcccataccctgtcatgtgctcttgaaactccccatttacttggnnnnnnnnnnnnncttggcaaagctttcccctataccctgacccacatcagggaacgtttctcctcattgctctcacagcaccctgtgtgtggccacgaccagactgtgctatcctctttgatttctgtctctcaggggctaggtcctgcctnnnnnnnnnnnnnnnnnnnnnnnnnnnnngtaacatcctaagcaaatactgggtggatgaaaatcactactgttcaaatcttcattgtatttatcagtaaaaccgaaataatatctaatggcgtcgagaacatttactgaaaatatgtatnnnnnnnnnntttgcagattttctaaaaatactgtagctatgtgcattgctattatattcaggagatttttacttttagacagtcccaagcttcagcttaaaatctgtagactgcaacccgtttctgagatgtttgtactacgtgttgactaggaggaacaatgacagactctgtagtcacgagaaatacttaaggaatcatgaggtactatgtatttccttaaatttgtactgttttttaaagctgaagtatttagtaattaatgggttatccaaattgtcagaaaattcaactgtaatttaatgtctcaccttcat

SEQ ID NO: 7449 - DNA, 681 bp, Macaca Fascicularis
  misc_feature (1)...(681): n = A,T,C or G
atgagtgtatgattagaaaaaaannnnntagctatggttttcctgtctacctcatagggttggaataaggataaatgagggacaggttggatgtcnnnnnnnnnnnnnnnnnnaatgacataaagagatttctagactagttgatggttcatttatttcaaatagtagctggtataacaaattctaaaatgtgtttttcatctgaagttgcacagaatcttggaattttatgttgagtgacataataggtatggaaatatgagggaaaatagacattgcaaatgtgaagcatggtgattatttgtaagaatgagaactcctctgactaaatatttgggcctatgggctggggannnnnnnnnnnnnnnnnnntgttctggagatcatctgggttcttttagcccttctcnnnnnnnnnnnnnnnnnnnnnnnnnnnnnnnnnnnnnnnnnnnnnnnnnnnnnnnnnnnnnggagggaaccccccctcagttatgagtctccaaccccagtttaagctatttatatggcagtttagggtcacaggtttgatcccggtgtgcccagctagtggtattaatggatggcattatgtttggaggcagcagcatagaggactgttgtttatagagaaaagatttgggaaagactggttaaaatgtgggtcagcctgaaggctgggca

SEQ ID NO: 7450 - DNA, 756 bp, Macaca Fascicularis
  misc_feature (1)...(756): n = A,T,C or G
agccaaggnnnnnnagcagagaggagcggggngcaatgcaggtgaggccgtgtgtgctgcagccctgaggagcgagggcctgagggtnnnntgtcactattactggcagaagaaacacacagcaggtgtttctgtgctcttggttttacttttctgttcagaataccctttttatcaactccttagttttatttgaacttaagggaaaaaattagtaacaaaattcccagcatcagtatgaacctattttatttgcctaaannnnnnnnnnnnnnnttaagggttcaaacaccagtgtcagttacctggaaggctaataaggtaaataagcaaagcaggccaggtgtcaggaaagcagagattgtgcctggtgctgaatggccttggggcctgatcttggcatggcagagacctggggactgccactgtccccgaggtacatgtacatggagccaaactgtgtgtcctgtggcattgtcagagttttgttgaaatctttatttgaaaatgttagcaacttatttgtatttttaaagaccaaacaagagctggtaacttatgtggcctcaagcatctgtccttcatgaatgtggaatagtgggacgtagtgcttaatggaaactgataaatctttttctaaaaagtaacagtggatttttaaaatgtatcgtttttcgtgctatttcatttgtcctttgtatttatctaaaaggggttgatacgattttatatcttgctctctattcctaatagtat

SEQ ID NO: 7451 - DNA, 167 bp, Macaca Fascicularis
cagtccctgatgcaggctcccgtcctgatcgccctgggcttgcttttcgcggcccctgcgcaagcccacctgaaaaaggtgagtgcaccctcctttaagagtctgtttgcagcctcctggcccagctacgggtatgcgggtctggctgagatatgggggtggccact

SEQ ID NO: 7452 - DNA, 744 bp, Macaca Fascicularis
  misc_feature (1)...(744): n = A,T,C or G
gtgaccagaagagggccctcactaagaagtgaccaggctggcaccctgatcctggacttctggcatctggaacgtttattctctccacagtggttggggcagtctgagagaaaatgaccannnnnnnnnnnnnnnnnnnnnnnnnnnnnnnntccaagtttaggtcataaaagacattgaagtttctgctttggtctcttgaatcaatttctctgggggaaaccagctactgggtcataaggacactcaagcagccccatggaggggcccaagtggagagaaactaacttgccagcattaacttggtagttgtgcnnnnnnnnnnnnnagtggatcctaccatcgcagtcaaacctctgataactgaaggtcccacctatacttgactgcaatcttccgagagaccccacccaagctgctctaggattcctgacctacagaaactgtgaggaataagatatgcttgttgttttaactcactaagttttggagtgatttgttacacagcaatatacaacaaatacacaagtcatcataggtaatatttttattaaatatttgcatagtacaaacctgggtctccatctttgtaggtcttgattnnnnnnnnnnnnnnnnnnnnnnnnnnnnnnnnnnnnnnntaggttttgttacaatcacacctaacctcaatgtaccaatttctgtaaatagataatgctagatactataacagataaatcttgacatctgagtggattaata

SEQ ID NO: 7453 - DNA, 2546 bp, Macaca Fascicularis
  misc_feature (1)...(2546): n = A,T,C or G
ttaatatctcagtgacctttggcaaattgcctaacttgtctaaacttgtcccagatgtgtaaaataattgaaataatatagactgcatacagtagtatctgagcaggttgtagagtgagactgcttgttttttaaaaatcataatactatcagctatcagccttgtggctttgcactggttatttaacctccttgtgcctgttatcttaaaaatggtggtgataaaagtactgtcctaaaaggattgttgtgagaatcaaatgttggatgaaaagcatagcttgacatttaataagtgttcagtaaatattagctattattctgaagctaaatcctttccataattttctcagatgacaagcaggcagcaagctaaaagaaatgatcaattggtaatgcttaagcagctcaaataccttttatgaaatggtggactcatagctattctagacccctgagaattcaaactctggtctagttcgcaaggtttcaagtatatgatgatttaattaccctccacaatgaacatttctgaattttaaagaggcatcaagaactactgtagcagactagagaatacagtcaacacttcatagtctttcttttttcctcaacctttccctcagtacatagtattcactgatgggttatgataatgcaaatttttttttttcttttttttctttttttttggnnnnnnnnnnnnnnnnnnnnnnnnnnnnnnnnnnnnnnnnnnnnnnnnnnnnnnnnnnnnnnnnnnnnnnnnnnnnnnnnnnnnnnnnnnnnnnnnnnnnnnnnnnnnnnnnnnnnnnnnnnnnnnnnnnnnnnnnnnnnnnnnnnnnnnnnnnnnnnnnnnnnnnnnnntatgttggccaggctggtcttgaactcctgacctcaggtaatccactcgcctcagcgtcccaaagcgctgggattacaggcatgagccaccattcccggccacaaatgttcttagaatttcataatcaaatgctttgcagtttttaaagacttttacagtatttcacttgatgtttgcaagaaagtaagctttatttattcctttttagattccattacagagtatgtttattttatattgctgctgtgcaaattaccacaaacttagtggcttaaaaaaaaattatcttacagttagtgtgacatgaatctccctgagctaaaatcaaggtgtgatcagggccacattccttcctggaggcactagaggagaatccttttccttgcttttctagcttctagaggcctcccacattcctccaccatcaaaatccgcaactgcatttcagaatgagtctttcgcaatggcatcaccctaactttctctcctgcctgcctcttgcagaagacttttaaggacccttgtgattgcatcattgggaccaccagtatatttcagaatactatccctattttaattcagctgattagtaactttaaattccatctgccaccttagttcctttttgtcatgtaacctaacatattcagaggttctggggtttagaaaatagacatctttgggaggccattgttaggcttaccacacagagcaattaatttatgtggaactttcattagggaaaaaacaagagcagtaatagaataaagaaaatgagctgaatagtagataaggaaggattcattacttgcctttgttgtgatagttatattacccacaactcaaaaataaataagtttgcaacatttatcaagcatgctgctatggtctgaatgtgttcattccccaaatttatatgttgaaacttaatttccagtgtgacagtattaagggattagagcccttataaaagtgaatgaaggaagctaactagcccttctctctgttctgccaactgaggacaccctgaaaaaaatgccatgtatgggacaggtgctcatcaaacattgaattggctgacactgaccttgtacttcccagcccctagaactgtgaggaataaatttctgtttgttataaattacccagtctcaggtattttgatacagcagcaggaatggattaagacacatgttttttattcaataaacatttagttatacttctgaattttaagatgaatgttttatatatttcacattaacgttttattttaaaatatgtacagtgttttctgatttattcattactgaatctcaactgtttaacttaaagctgcctccttaaatattttaagttcagtctaaaggtttctctgtatatagtgaactataacctaaatggagttgtcaacagactgagtctactcttgtgccagtcaccaagttttggccagttaaagggggtcagttcaaactgttcaaataaggtaaattctgcactgtaaccaatctagctgtttctgtcactcatttccattttctgtatgtcactttcctttttctgtctataactctgcatccatcacatggctgcactggagtctctctgagtctatcattctttgctcaattaaagtctgttaaatataaaaaaaaaaaaaaaaaaaaaaaaaaaaaaa

SEQ ID NO: 7454 - DNA, 782 bp, Macaca Fascicularis
  misc_feature (1)...(782): n = A,T,C or G
agagtgtgnnngaggccaccatgccgcaaagggggtcctatccnnnnaggnnnnngcatccatggagatatcctcacccaaagggannnnnnnnnnnnnnnnnnnnnnnnnnnnnnnnnnnnnnnnnnnnnnnnnnnnnnnnnnnnnnnnnnnnnnnnnnnnnnnnnnnnnnnnnnnnnnnnnnnnnnnnnnnnnnnnnnnnnnnnnnnnnnnnnnnnnngcaagaagccagatggaagatgaggtagaaagtgttaggagttatcctctttgcctggcctttgagaataacttactgtgtgactttgggcaagttccttccccactctgcgcctcagtttctcacttgggaaagcaaggagtttnnnnnnnnnnnnnnnnnnnnccttcctagctctggccaccaagaatttgggaatattagcactcctggtctggtgggtggatccagagctgctgcctggtctctctgtctccagagtggatttattggacctcagaggtggcagggccctatggagcaccaactcccctcaactccaccccctgcccaggactgggaagggattgatgtcaggctgtggccatagctagcctgagttgcccaaggaggagcagagcatgtctttgctgaggcttggctgaggggcttgtgatagggcctgcagcacctcactgccccctgtggatgcagacaccctgaggtttacccaaacaaatacattgattagcaggacaagggctctctcctcagtttctgctcccttccatctctgtcccat

SEQ ID NO: 7455 - DNA, 2129 bp, Macaca Fascicularis
aacttgatggagtttgcggtccagtgatccccggatctttcatcatgaaagccttccttcctctcctgatgtctgaggcctctagatctagactggggttctggcaaggaggcttctatcaatagtgtgaaatccaataatatgttagtgttggtattttgcacagtaatattaaggctagattctaaaaatgagttcaaatgaataagtttctgtgatgtaagagattagatatgtgtgatttcagaaccaaaggcaggggggaatcccagaaagaaaacaataatataagcctagtttctatatattattcttattcattactgtatatgggtagacatcaatattcttttttatcctgttactattaatgaacacattttttaaccatgccattgaacttttgggtgcactaaagtggaacccaagctcctcattacataataatggcatttggactgtgggccatattcctaaatttccagtaaagtggttgatatagagaggacaggataaagccccatagtgtgcagttatatcaaaacagctagtctccactttagggaatgcctttactagagattacatgaaaggtctgcttataaaataagcagatatggcaccactaagcagccacctgaattgttttcctacaggaatgattaatgttcagatccatttatgttttcgtgctcaatacttactccccttccctgcaacacccaaagggtttacttttgaagtcatttggtcttccgtctactactgaggaatagagaggcactaactgctttacccagggtcagaactcatgttcttaccttctactaatagagtacttgagtcagatggactaactggtctcacattttctctatcttggtcttacctccataaacatcattatctttacccacgtggtttttctctcctccccttttttccatatgtattagggttcaggaactatgaagctaatgatcacatttcttcctagttcctaatttcattagtgccatttcctaatatctacagaaacaattctcaatacatgtagctgcttgagcctcatttagaagggtagcctttcttccccaagtgttgtcagaatgtacacatttagtctgtctttttccctcttaggagtctttgttttgagttgatggtaaaattcctctatttacatgtgagatttttgatttcactgaattctacctagatttttatggacattggatttggaagaggaaaacactcgttttcttagtaagatattggtgatacatagctacgccgctgacttccaaactcctgggctttggggagggcgacagtggccaagtagcaggcagaataagatcatcactcatgtcctgaatttttaagtaaagtggatcttagccagatttgagtctaatggctgattcatcggcatagttcttggcgttaacatctcagtgctctcttttgttctcttcgagaggattcatgtcattgagggcctttgtgcctcctgttgtctcggtgtgaggaagagctttggtgtgagggcagagctatgtaaagggctgctgggttgggggattagttcatatggtccccacaccatctatctacttttggagagaggggactttgagtgggtgggtatggattgatgttcctcaaggaaaccctgctggctaatgggcactacatctgtgtactactgtgattatctctgtaagctccccatgtggccaaggaccctcctcctacctgggcacttcctgctgccttgttgcactggtctcagccattcagcccgctgctgctccaccatgttgggctgcggtaggatagggaaggggttctgttgattgctaagtgttgcctaattttatttccctcttccacatttcacgcaagagagtggacctaacacatgacttgcgttctcttcctatgttcagaaactccagggcttgccacgtgtatgtatgagtgaccgatggaacttggaattctttatctatatgatctatccgaaaatgagatcttttgtactggaatttgtgatgtagttgatcattcagagccaaacgcatataccaacaaagacaagagtgtcaaaaaaaaaaaaaaaaaaa

SEQ ID NO: 7456 - DNA, 2086 bp, Macaca Fascicularis
gaatcagggagggactgaatactcaagggacagatttgtggataaggacttggagggaggagaaaccgggagggggcaggtggcgtagtgctggggaggcggggacacaggggaagagagaaggggaaaggaatcccctgaatatctattcccaaacttcaggcctgtcactcgcagtctcggtcgggcctcccctagttgcaacctagctgtcggcagggtgaagagatggcttccccgtctagacagcccccgccaggggggtcaggactgcttcacgggagccgggctcgttcatatggaagcctggtgcaatcggcctgctccccagtgagggaaagacgcctggagcatcagttggagcccggagacaccctggctggactagcactcaaatatggggtgacgatggaacagattaaacgtgcaaaccgcctttacactaatgactccatcttcctgaagaaaaccctctacatccccatcctgacagagcccagagacctgttcaatggtttggattctgaggaagaaaaagatggagaggaagaagtacgcccaagtaacgatgaagtttggccacactcaactgagaggaagaaacaagagacaggagcaggacgtgccaatggtgaagtcttccccacacctggccaggaaacccccacgcccatccatgacctctctgcctctgatttccttaagaagcttgattcacagatcagcctgtccaagaaggctgctgcccagaagctgaaaaaaggggaaagtggggtacctggggaggatgcaggtctccacctgagctcccctcggatgcagcaacgagcagtcctaggtcccgtgccgctgacccgtacctctcggacccggacactacgggaccaggaggatgaaatcttcaaactctgatgtccccagaactgactgagagaagcaagatgttgaaggagaaacttcagggggagaggagcctgaggtgaggctcaagaacatggcttaccagcctgcctccctccactccagccatcttccccagcctccttgtccgccaaaaattccttggcctggggcagttttattggcaagattagggaatgggaactggacctttcccagttcttgggctgaatctagagttgagtcctttagactcaaaaggctctttttatatccctgttgcctttcctatcctttttaccattccctggccttagaacagggaagcagaggctccccctcagcttcttcctcatctccaactgtgtgacataatttatttggtgctaatattgaagtaatatttatttgctatattttattccttcccactcttagctaaaaaatggaatttctgtagccctggggtgagagaacctgggaacattgagccaatgagtgctggttctccaccttccccaccttgttggccagacatgtgattgaggatgaggcaatcggtgacctagcctactgcagagaatggatgactgctggccttttctccaatcttaaagggacagatttgaactgagtttttttttttttttttttttggtaccccattcctgttgaatgggctcagtcttgactaaccaattccctgtaactttttcacaattcttgaccctgagaaaaagcagcactgtagggacctgaaccctccattctaccagttcacccttctgacctgttctgctcagcctgtgatgaggggaacagatggaaggaggctttccttggggtttgaagaggaagccagttgtgagagtctctttgttacgccccctaccctctagaccctctctctctatgccctcctcctcactgcatatttatttgtaatttgtagcactgatctatggtacagttttgtttgtttctcaaacagaagtaggtaagggaacctcaataataatggaaatctccctcagtctcctgtttggaaatgatgaaaggtgagagaagtggtgtttatatacctcctttcttctgtgatgactataaggtatacgaagctggacagattaaacattgagccctgtgcataaaaaaaaaaaaaaaaaaaaaaaaaaaaaaaaaaaag

SEQ ID NO: 7457 - DNA, 1733 bp, Macaca Fascicularis
tattctgtcatatttctctttgctgttcttcctctcacttttcttcaaatattgatgtacttttttttttcttttctaaaccccatttttgtttaaccatactctccctagatgattttatcaaattccatggatttaaatatatttgtaagcacattcaaatttagtttggtttcaactttgtgttttgtatctgaatgataagcatcagcattataactaaacaaactgtgtgattaagattatgctcaatttttccctctaattatctgattttcataattaccccccagaatgtgagaacattatttttataatcaaagtattttaagaaaccagttgagtggactctaatatggaaccatcaacatgtatcaaattccacttaattataagcaaattcattatgaaattatattgtatttgaaaaagcatttcatgattacatttgttatttaagaaaatgttatttaaagaaatttatgtaagtttcattatacatgtattttagcttactcatctctggaaatggaaaacttagatactaggcaagagggctttagattttttaatgagatattttaatagaccagtacctaggtcttaatatttgggtttttcaaaaatttacattgaaatcctaatccccatgactatagtattaggaggtaaggccttttggaaggtgactggagcagggcagcaccttcatgaatggaattagtgcccttataaaatagatccaagggaattttttcatcccttacaccctgtgagaacatggtgagaaggcaccatctatgagccagaccaaacactgaggatctatgatcctcaccaaacactgaatctgctggtgccttgatcttggactttctagcctccagaactgtgagaaacaaatttctgctgtttataagctgttcagttaatggaattttgttattgtagcccaaatatactaagacaacgaatatagttaaaattactatgcccgttgcactttatattaagttctagtgtacgttgtgtaatgctcacattaaataaaaggtaaggttaatttacataaaacatgtttaggtaggataattgtaaaaattattagagaaattggtaaaattgtggctttggatagaggcaggagaaagaaaagagcaaggcactagtgagaaaaattgccatggagaatattgagaatagatacaaagagacctacaggtttacaacattaatattggccaatacttgattggacagtttgaatttttcaacctgaaaggcctttgttccccaaagtttggtaaggagattttgtaaagacaaacaacaatagcaataaaaaataatcagggaagattaagagattccataaggagcaagaatttataggtaatatttcaaaggtatagatatgattactattttggtgaataataagcacatggtagactgaaattcggcaacagctactgtgcaaataaacatatctgtgattatggcttatatcgggttggagacccgggctgtaagccattctttttagtacagattaatctccatttctcaatcacagttctgttcttttcctctgtgggaaatactgaattctgtttcagattttgattgtcttttgtattctttgtcatccaatagaattgcacatttcactttgtaacattttttataaatagcgtttgacacttgaaaaaaaaaaaaaaaaaaaggccaca

SEQ ID NO: 7458 - DNA, 730 bp, Macaca Fascicularis
  misc_feature (1)...(730): n = A,T,C or G
atttagtcttgttnctagaaggaagggaaataatantnnttgagcatttactaaggtgttgggagctgtgctaagtaagtgttaagtctttcagttttatagatacagaaaacaagggtgactctttaccacaggatgaataaagaactaagtaatgtgggaaatgcannnnnnnnnnnnnnnnnnnnnnnnnnnnnnnnnnnntatcacactgtaagctttcaagttctctgggcaggaattatagcacctgtcccctgcaatggccctgctgtgcaatgctcattgcttcccttcatgctggagcagccccccaggtgtccatctcctacctttttgttccaatcttctgtaagttccagctagcaggctttacatctggggaaaggaaaaccaggggttttagctctgttctctgctcccatcctttgctcnnnnnnnnnnnnnnnnnnnnnnntttttgcaccatgtacccatggcttacactacttagnnnnnnnnnnnnnnnnnnnnnnnactttctgagttcatggagaacaccggcactctttgacaaaactgtgagtgaccctttttaaacaatgctgagcagaccctgggctataatcaacagtgagctttaatgtctatgctgacagttaggttttgctcttttttgtaacaggttacgtagaccagcagtgtttaaatctaaataggttgtgagtctgttatctgtcctatcgcgttt

SEQ ID NO: 7459 - DNA, 673 bp, Macaca Fascicularis
  misc_feature (1)...(673): n = A,T,C or G
cttcttgcgctgtctagtgctctgagtgggcagtctnnnnnnnnnnnnnnnnnnnnnnngaagcaccacgatgcagagcaccacagaggtgagaggccgggcaagccagattaggactttgtcctcatactcttacagtgctgcaaagttgtgtgcatcgctaaagagagccccaacctatacagagagcaaacaatgagataagaggaactgtcgcaaagctttccactgaaacacaggtcaccctggaagtttgcagggtttgctgtgggcatctgtagatgtctcgatctcgttagattgcaggcatcttgacatcttggcaactgcctagttaatgccagtggcctgtaccatattatggaaaactgttaactgcttaattgggtaattttcaaagaaagtaatgttgttaaatggggcgaaataagaagttaaatttgaaagtgaatgtgttcaaatgaaaggtttgataattgcatctgttactacttagtttcataggctttaattctagtatgcattaaatattgggcaaaattgcacttgactaattttttgaagaaaagtaatttattctgtcaagaaataaaaaaataggctttgtgtatggttaaactgtaaatcttatgtttacaaaatactgtaagattttcaggaaatntgtattagg

SEQ ID NO: 7460 - DNA, 748 bp, Macaca Fascicularis
ttaagatgttattacctgcatgttggagcttatccagaacctcaacaaatttatggaaatttgaacctttttgaaaatcaccagcatactgaaatttgaaagcctctcccaggtaccagggaacctgctagtatttccagagggaatgagtggctgccatcttcccaagatgctcttgtaaccagatagttggaggagcctcagaactggcctctctccactgcaaccatggcattgcagaaattctgctctcattttatttaatatgcatattttttacatagctaatctgaaatggaaacatttttatccctatactcaaaactgcttttgttttatcagctgacattttacaactcattaatttataatgcgggtttaatgccttcgaatgttcctgggataaaaaattaaagtggccaagctagtttgtataaaggctgactatagtatgttaataataattatttataacaatgttttgtattggatagcgcattccatctgaatatttcggagtggcatggtcccttcttcctagcattaattcattcatcttgcatccccaagtaataaaggtattcccatttttaaatggagaaatcaagactcatgcatttcagtgatacaaattcagaagaaaatctgtttgaatttgtctttgccttgttgtatttgtcactaagtctccattattaaataagaaattgaaccttgtatttagtctctatgatctttacccacccaa

SEQ ID NO: 7461 - DNA, 729 bp, Macaca Fascicularis
  misc_feature (1)...(729): n = A,T,C or G
agcgacaagggggcgaggccgcaccaaggggctggggggctgtgatccgaggcttcgnnnnnnnnnnnnnnnnnnnnnnnnnnnnnnnnnnnnnttaggaccggtccggggcaccaggcccgccgactcgtcacttcctggacctccaaacgccccttgtgacgggtcttgttcctcaggaacaannnnnnnnnnnnnnnnnnnnnnnnnnnnnnnnnnnnnnnnngaactnnnnnnnnnnagtgatctgcccatctcagcctcccaaagtgctggtaacgcctttgtgaaccacaactttannnnnnnnnnnnnnnnncctatcaacaagagtatccccctgttaattttttgcatttttcaagatgagtaaaannnnnnnnnnnnnnnnnnnnnnnnnnnnnnnnnnnnnnnnnnnnnnnnnnntaaatgtccagcccacacacccacctttgaagaaagaagacttacatcggatttcaaaagactccttggaatctgattcagaaagcctcactcaagagatgnnnnnnnnnnnnnnnnnnnnnnnnnnnnnnnnngacaacgatatggagcgcgacagcttagacgaggaaagccctcgacggggaagcctgcacgagacaggagaggaagcaagtggaaaagcagctcggatggctcgcgagcaaaaccaccatacctgggaccagggnnnnnnnnnnnnnnnnnnnnnnnnnnngtgtaaga

SEQ ID NO: 7462 - DNA, 758 bp, Macaca Fascicularis
gctggagtgctgtggcacgatcttggctcactgcaacctcctcctcctgggttcaagcgattctcctgcctcagcctcccacagtgctggaattacaggtgtgagccaccatgcccaccatgcccgtccagttctgcccatttttatgcggtcatcttgaaattgtttcctgttgggaagggagcacataaattgggggaatttcagcccctcctgtttacagggtctcacttcccagcagcacctgtgaccctacagtttcatccacctcttcaacttgtcagacctgaggcagcactcagaactcacagccaagggatgtttacaaacctaaggcaatgtctggagacggaggggctgtaattcacggggcagaggacccaagcgcctgccgccctggaggagtggcctagagcctcgggtcccacggtctcccaggtgtgtggagggtgccttggtgcattttcttttttatgagccctacgtttctctcatctgtgattctaaaattgtagaatggttgcaatcctgccgtttgtcctgtgtccctccagtgcacattttattagtaattcttgtttacactcacgctgcttaaactctagtgtgccaagaaacagtttttctgatttcatggaaagaaagacacagagttctaccacatgacagattgtggtagaactgtcatggtagaacagaccttctaaaaacattaacttcccacttttaaatgtactagttgtcattgttgcatataa

SEQ ID NO: 7463 - DNA, 705 bp, Macaca Fascicularis
cttagcacgagtgaccacagtttaatagaccacacacatcgtttaacctgctcttggtcattgaaaatttacactgaacaaagtgcaattaactgcagaacagttttactaaaacttgactgaacaaaaggggaccgtcaacattgtagacactggaggcctcacagagtgctagcctcttccttcaggactcacctgaggcctgctgcttttatattttgaaagagtttaagggctaataatttttaatttaagaactaaaatctcccttctttctggctgcattgcttttgcatgttcagatgtgatataagtttttttgagatggagtcttgttctgttgcccaggctggagtacagtggcgcaaccttggctcactgcaacctttgcctcctgggttcaagcgattcttctgcctcctgagtaactggaactacagttgtgtgccaccacaccctgttaattttttgtagttctaatagagatggggtttcaccatgttagccaggatggtatcgatctgacttcgtgatccacccgcctcggcctcccaaagtgctgggattacaagcgtgagccaccgcgctcagccctgaataagtttctaatattttgtctgattttcactctcctttcttcactttttaaggatagcgttgaaaaaagaatgcacatgtgagttactaaaaagttgtatagaatac

SEQ ID NO: 7464 - DNA, 1291 bp, Macaca Fascicularis
  misc_feature (1)...(1291): n = A,T,C or G
ttcaaaaatgatgctatgaaaacattgtactaaaaaggaagaaaacaatatttggagccaaagaaatgtttcttgattgagttccttcctcttgctgtcttgctggaagcttggagagatgtccatgttaggcatttaactgtgatctcggtaggagggataggtttgccatccttcttggatccctgatttgtattattggaagtctcagtcatcgtaggaattgactcatgtaataaaacaattgggaagaacaaaggagatggatgtgtgtgggattactgataagcagccttcactagaacataagctcttggggcctgtgactgtgccttctatgtatacacatgtgcatgtgcacataagtgcctccatatgtttgtgagatgaattggaagtgtcccaattctgaaagattgtcatgttttgttttatgttctacagttttagcttttcctgcatatctgctagggataaaccaggaccggttgaaagaaaagctaacaagccggcagatggatagcaagtggggaggcaaatccgaatccatccacgtgaccctcaatgtggagcaggcctgttacacccgggatgcgctcgccaaggccctgcactcccgggtttttgatttcttggtagatgtaagtaacacaagttgatgttggtgatgcttcatatcttagctataaagagtcaaactagtaggctgggcgcggtggctcacacctgtaatcccagtactctgagaggccaagctgggaggatcgctgcagcccaggaattggagaccagcctggacaacacagcaaagcctgtctccataaaaaaaattttttttaatnnnnnnnnnnnnnnnnnnnnnnnnnnnnnnnnnnnnnnnnnnnnnnnnnnnnnnnnnnnnnnnnnnnnnnnnnnnnnnnnnnnnnnnnnnnnnnnnnnnnnnnnnnnnnnnnnnnnnnnnnnnnnnnnnnnagaccctatctttaaaaaaaaaaaaaaaaaaagcaaacccaaagatcccctttatttgtcgataattagtatgtgcctctaagaaatcattcttatcacaccttaaacatgaagaattcttttatagtatgtaatattatcagtattccaattccgttgttttcctataatttcttttttatagttagtgtgtttttatttaggatccaaacaaggcccatacactgcacctgattgctatgtctcttacgtctcggcttttaacaattttcctttcccctttttgttttcttgggtttgttaaaaaaaaaaaaaaaaa

SEQ ID NO: 7465 - DNA, 524 bp, Macaca Fascicularis
  misc_feature (1)...(524): n = A,T,C or G
cagcctggtcgacagagtgagaccctgtttcaaaaaaaaaaaaaaaaaaaaaaaaaaaaaagccagtataggaaaatcaaatccatagaaacaaaaagtagatttgtggtggccaggggctggtggaagaannnnnnnnnnnnnnnnnnnnnnnnnnnnnnnagtttctttttggggagataaagatgttctggaattacatagtggtaatggttacaaaacactatgaatatactaaacatcactgacatacatcaaaaaggtgagttttatggtatgtgaattatatctcaattacaaaaattgtctttttatgtttggaaaaataagagaaaaagacctatactgccagttctttagcaaaactgctgtnnnnnnnnnnnnnnngtttttaaaatgtataatttaaatatatttgtatgtaaatagtgtaaatgtattagtttcatcaaatgttaaatcattgtattattagcatttttctgtcatcaccctgtctttatatttgtaatcattaagcactc

SEQ ID NO: 7466 - DNA, 1669 bp, Macaca Fascicularis
ctccataccgccagcagcccgcccgggcacccaccgcaagcggccaggggcttccgaggaacctgcctggtgccttcctgctcataaggagaggctgagcaccatggggaggaagccacacagcgcagtgttcctggcttgtcatccaagggggagagaagtggggagagagatgacagagggtggagtgggtacgtggcgtcgaaataggctagccagagagaggggcacttgtgggattctgctggctggagccaggaggcaagtgtgaacagggaggccgaagatgaaagttgtctaaaagagcctgcaccccctataaacacggcagaggaatgtcttaagagccaccaacagtaattccctttccagatgttaacaggttatttgtatctcatgtagcgtcgtaaagcattctggagtggcacacagcgtcgtccccttcccggtggtctgaagaggaggaggggaccagggaggggtccttggccagcccctagcgaatggagtgggtccttcttctgctctacagaaggcaggaagcctgggtctggggagcaggcctgatctctcccaagccagtgaccaagatcccatctgatgtccaaggggctcctgagccagtacccccacttcccaagccccccagccttcctcacctgcagaatcagtcgcccgggtacagcactgtctcctttctttttcttggaagcggtctcaggggcctgagtgacgggcctgaccaccccagctactgcccactgccatgcgactggatggctgacctggcccaaacacccaccaccaggacaacaacacaaaccaaagtgcactgcgaaccgccctttggcctccttcttgtaggtgccttgaaacttcaatgttgagatgaatgtgattaactacttggtcatattttctgtttgtctgttttcatagaaaatgtccaagtccacttgccttgttctttcttgaaataaatagaaagatttaacttttacagtcatctctgctgctgactctcggcttggcaccccaacgggccaggggccaggtgtccggggcacatgcggtctcagcggcccacacccctccccgggccttgcccccgagggtcagctccgttcttggggtgccctggctcagaggcggtggctgggcaggatagagactgttcgctctggcactgtcccaaccaaaatgattccgctgcaggaagaagggccctctgtccccacccacaggccccagaggtctactgacacctgagtcaccatgaggggacccagagctgaacgcagactctgagagggtctctacatggagaagtatgtgtcagcaggagctgtgggttatcctggaagaggctccagcaaccaagtggctcccggctaaaagtgggactgtccgggtgtttggggacatgaacttatgccaccaccccaaacgcccccatcccctagatgtgcccattacactcagctctggagcctcatctgcctctctcacaccccaaagggagggggacaggaaggaacaaaatttccatgagaacaatagcagtttctgctaaatttaacataaaacaagaactcattaaaaaaaaaaaaaaaaaaaaaaaaaaaaaaaaaaaaaaaaaaaaaaaaaaaaaaaaaaaaaaaaaaaaaaa

SEQ ID NO: 7467 - DNA, 739 bp, Macaca Fascicularis
  misc_feature (1)...(739): n = A,T,C or G
aaggtgatagatgaannnanaagactnncgccagctatgatgcactgttatcacaaaagttgtaatgatttgtacctcagagtcacaaatgttttaaatgactaccaaaatgaattttaggaaagtatatagcatggtaatggctttcatagtggtaccaggataaaaattaaaacacaattgtaagtttttaaatttattattgaaataaactggtgatttggtgcggttattcccaatgtaacagaaatgtctctgttaaactgtatctccagatttatgatttctactaaataatattattaaataatattacaactatctatattttagtgctgtaatagagactgttttgctcaggaaatccatgataaccttttcttagtcacacagcaagactgtagtttccaggttccttgctttaggtattgccacatgactgggttccagaataaatagaatattctggagcctgtactggtatacagcagttccatgtctgacctatatagaacatgcagtcctcactttctttactcacctactggctgaattgagaggaatctaagcatatagaagatgacagagcctcaagatgtaaagaaactttgtcactgaatgactgtgtagaacagagtccctcattcgactgtaaattgttgaaagttaagccactgaaattatggaattacttgttaaagtttttgtttattcttataaatgcaaacacctgaaaaaa

SEQ ID NO: 7468 - DNA, 753 bp, Macaca Fascicularis
  misc_feature (1)...(753): n = A,T,C or G
aatacacaattatgtgnnngagaatttaactgaagtannnnctacctcattaatcattaatcctaaaaaaggtagcattaatacagatgtttacaagtgttttacactaaaagtatgtgagaagacactaaaagttcaaaactcttagagaaatcttttcacctgtgaaatccagtacagcaaaaggtctagtgaattacattctaaacattttcatttcatttaccatgtgtaataatatgtacttggcactattttctacttgaatttcatgaaaatgaaaaaaaaatactaaagtatttgtactttcttagcattttctgtattctaaacagtatatttatattttcagaatggtattaagaattagtttaagtaactccagctaagttttaaaaggaaaaagaagactgcactgattccctgaggagaaatttatttgcagttacttagatgatgtaagaaggtaaggttttagggttgtaacttggtgaaagcacttttgtgatctgttatatgttgtggctttaagggtggcagtacattacattaatctataatcaccacattgttttaaattgtttattttttttttttaagaagtctgtcttcagagtacaaccaatgtgattaattgtgcctttaacaaagtcattcaatgtctaaacaagttcagtatctgaaacatcttcatgaggaaaacagaaggaaaagaatttcaaaacacagaccaggaaacaatcacaaaatata

SEQ ID NO: 7469 - DNA, 1974 bp, Macaca Fascicularis
tactggatgtgacacagtgaagatggcgtcgcccagctgcctgtggctcttggctgtcgccctcctgccatggacctgcgctgcccgggcgttgcatcatctggacccgccggcgccgctgccgttggtgatctggcatgggatgggagacagctgttgcaatcccttaagcatgggtgctattaaaaaaatggttgagaagaaaatacctggaatttacgtcttatctttagagattgggaagaccttgatggaggacgtggaaaacagcttcttcttgaatgtcaattcccaagtaacaacagtgtgtcagacacttgctaaggatcctaaattgcagcaaggctacaatgctatgggattctcccagggaggccaatttctgagggcagtggctcaaagatgcccttcacctcccatgatcaatctgatctcagttgggggacaacatcaaggtgtttttggactccctcgatgcccaggagagagctctcacatctgtgactttatcagaaaaacactgaatgctggcgcgtactccaaagttgttcaggaacgcctcgtgcaagctgaatactggcatgaccccataaaagaggatgtatatcgcaaccacagcatcttcttggcagatataaatcaggagcggggtatcaatgagtcctacaagaaaaacctgatggccctgaagaagtttgtgatggtgaaattcctcaatgattccattgtggaccctgtagattcggagtggtttggattttacagaagtggccaagccaaggaaaccattcccttacaggagacctccctgtacacacaggaccgcctggggctaaaagaaatggacaatgcgggacagctagtgtttctggctacagaaggggaccatcttcagttgtctgaagaatggttttatgcccacattataccattccttggatgaaacccgtacagttcacaacagagctcagggagcccctaactcttccaaaacacatgggagacagtttccttcatgccaagcctgagctcagatccagcttgcaactaatccttctatccttatctaacatgccctacttggaaagatctaagatctgaagcttatcctttgccatcttctgttaccatatggtgttgaatgcaagtttaattaccatggcgattgtttttataaacttttgatgtggtcaagctgttttagaaagggagcctgttgcagatcagtgccagaactgtgcccaggcccaaaggagacaactaattaaagcaatgagatagattctgagggcaaacgtttttccaagatcttgccagatttcaagcaaagaggtacccaggcctgaggtactcacataaatgctttgttttgctggtgatttaaccagtgcttggaaaaatcttgcttggctatttctgcatttcttaaggctgccttcctctctgaatacgttaccctctgtgctatcatcttattattaggcaaatcccactggcctagtcttgcttctgtggcacccactttgtctcctcaggtagtgatgaattagttgctctgtcacaaaaggagggaagtagcatccaattaagttgcttaagagaggaaatgtacatcttgtataacttagggagtgaagaaaatgtaggcacgaaagtgaaaagtgaggcagctagttcttcctattccattcttgaccaacctgccctttcttaatatgactagtggtcttgatgctagagtcaacttactctgttgctggctttagcagagaataggaggaaccatatgaaaagatcagcctttctgacttcaatccccaaaacatatttaccagcatactccaaactgtttctgatgggttctgtgagaaaaggattgtttgctcaaaaagcttggaaaatactacacactccctttctccttctgggagatcacccacattagagggtctgaggactctgagaattcggtgg

SEQ ID NO: 7470 - DNA, 729 bp, Macaca Fascicularis
  misc_feature (1)...(729): n = A,T,C or G
gttgcagtgagccaagatggcgccattgcactctagcctggctgacaagagtaaaagtccatcttaagaaatatatatatattatatatattcttagttctaagatttcctttaattctgtgattctctggatttaaatgctttattcatatttcttgaagcttagacaaagtctaatttacagcaaccatatctgttttatcctggtgaggatagcagtccctaatggaatagaacaaaatcccattataacaattgaaaaattatatatcatgaatccttctgtctgaataactcaataactttctataaaagccaatggaattcaaataggagctaggagacaagttacataagacagtggaggttgtattccttttatattgctgagaaaactagttaaatgatcagattcttgctgttaagaaatatttagtttaatgggatctgtacaactgattaaaaagaaatactacgaaaagccccaaagcatataatctctattccttatagtctctaggattaaatgtactcatttagacagacatattaaatgcatgttttagccacttcagagaagcctcatannnnnnnnnnnnnnnnnnnnnnnnnnnnnnnnnnnnnnnnnnnnnnnnnnnncctactccacattgcaacatttgcatcagacagcatttcaattccagtattatgtatattnnnnnnnnaacattttaaaatatttgtttc

SEQ ID NO: 7471 - DNA, 1867 bp, Macaca Fascicularis
gagaaagcagcttacttggactgaatcagcaggccaaatttagaacaaagattttaactatctccctttataaattactgagctattttgtagccagctactctttaatatgaacaaaaaatattataaaactttgttgttaatctatacaactttgttgttaaactataaaatctgtaattgtgaaatgaatttggataaaggagatacatttttaccctttcccagggtttaggagagacaaaatggtgagattttaactctgaatcagaggttcttattagaggtggttttgttcctcctgacccctaggggacatttagcaatgcctggaggcattgatggtgggcagatgctactatgcccagggagactgctaaacattctacagtgtataaaacagttcctcgtgacaaagaattatccagccccaaaatgtcagtagtgctgaggttgagaaaccctcgtctaaactcttgggtttatttgctaacctttacagtggatcagcttttacttagttcatgcagaggtgaaattaatactagtgctcaaatacgtctttgacttggcctgggttccctgagcaggtctgggacaagctcctgccatgtgttgaggacctgaattcaggcaactgacaacagtatttgaactgtgttctcagtggtgggagtgaaggagatgagcccatgtgctagtaagtgcatagggttgcatgaggaaatagagagtaaagctgcagtgtggagccctgctattcagagtgtgcttggagaaccggcaggggaggcattattggggagcttgatggaaatgctcccctcagacttgctgattcagatctttaatttagcaagatccccagcgaggcttgtgcatgtagaagttagagaagcatggggtaaacttttctttttttttgtttttactttggaggaaaatacaccttttttcacatcatggctctgactcttactagctgtgtgaccttggccaagttataaaacctcactgcaccttacttattttagctggaaaatggagatcataatatcacccatcctatgagattgttgtaaagatcaaacaagcttatttgtgtcaagaactcatatggtaaaagctcaacaaactgtcgctatgatagtaagaaaaagatcacaaaagtagaaaacattaggcagacagcttacgtcttaaacctcacagttgtcgtcaccaaacaatacttgtgtttttgcagatccagtttctctgaatactaaaataaaaccggaatttgataaacttctatagacagtggtccttgtcagtagcccaagtggcagagagtacatggatctcgggacaagcagcctctactgctaggaatgttccatcctcctggcttgagttacacctgctcattgtgattccgaatttgaaaggaacacagtaggaagtttcaagaccttgggtagaggaaggctgtggtaaacaggaaggatgagattagaaggagtttaggtcaggtaaacccttgttttactagtagggtttaagaatatccaggtcaggtgggcgtggtggctcacacctataatcctagcactttgggaagccgaggtgagcagatcacctgaggtcaggagttcgagatcagtctggccaacacggcgaaaccccgtctcgactaaaaatacagaaattagccaggcatggtggcacatgcctgtaattccaactactcactcaggagtctgaggcaggagaatcacttgaacctgggaggtggaggttgctgtgagctgagatcgtgccactgcattcctgcctgggcaacagagcgagattccatctcaaaaaaaaaaaaaaaaaggccaca

SEQ ID NO: 7472 - DNA, 729 bp, Macaca Fascicularis
  misc_feature (1)...(729): n = A,T,C or G
attacaggtgcttgtagtgagtnnnnnnnnnnnnnnnnnnnnnnnnnttgggtgtggcagatctactnnnnnnnnnnnnnnnnnnntcttcccatttagacctttagcgaaagctggtacttggaaaccacaggctcaccttctctgtctatccaataattattaatgaagagnnnnnnnnnnnnnnnnnnnnnnnnnnnnnnnnnnaatgtaccaattattaaattagtctccaagccattcagtgatgtcttcagcgtcactatagaattgtcttgtgtcactttttacttccttctgggtggaggctttcagactcccaatcatgaaggcaagttaatctttctctccagttagtgacttttgccccatagttgggtannnnnnnnnnnnnnnnnnnaaaagcagctacagtcaatcctactctgtttccctcatttggtgatcagtcagtcacacataagctccttgtattctaaatttcatgcacttctcccagatgctatagggttttctctcacnnnnnnnnnnnnnnnnnnnnnnnnnngtgggctcatatcttatggttttgtgcaatcactgttgtattgtagtcctaagactcattatagtgtatttttgatatttttgaaatgtgttaaattttttaattcaataatatgagccagannnnnnnnnnnnnnnnctattgtttgtaaaataacaataacaataataaacaaaataaag

SEQ ID NO: 7473 - DNA, 1508 bp, Macaca Fascicularis
ctcttccagttggaattgaagaatattcccaagtccttcacgcggctggcccagcgcttcgggccggtgttcacgctgtacgtgggctcgcggcgcgtggtggttgtgcacggcatcaaggcggtgaaggaagtgctgcctggaccacaaggacgagttctcgggcagaggcgacatcccgcgttccacgcgcacagggacaggggaattattttcaataacggacctacctggaaggacatccggcggttttccctgaccaccctccggaactatgggatggggaaacagggcaatgagagccggatccagagggaggcccacttcctgctggaagcactcaggaagacccaaggccagcctttcgatcccaccttcctcatcggctgcgcgccctgcaacgtcatagccgacatcctcttccgcaagcgttttgactacaatgatgagaagtttctgaggctgatgtatttgtttaatgagaacttccaggggctcagctgtccctggctccagctttacaataatttccccagcttactacactacttgcctggaagccatagaaaagtcatgaaaaatgtggctgaaataaaggagtatgtgtctgaaagggtgaaggagcaccatcaatctctggaccccaactgcccccgggatctcaccgactgcctgcttgtggaaatggagaaggaaaagcacagtgcagagcgcttgtacaccatggacggtatcaccgtgactgtggccgacctgttctttgcggggacagagaccaccagcaccactctgagatatgggctcctgattctcatgaaataccctgagatcgaagagaagctccatgaagaaattgacagggtgattgggccaagccgaatccccgccatcaaggataggcaagagatgccctatatgcatgctgtggtgcatgagattcagcggttcatcaccctcgtgccctccaacctgccccatgaagcaacccgagacaccattttcagaggatacatcatccccaagggcacggtcatagtgccaactctggactctgttttgtatcacaaccaagaatttcctgatccagaaaagtttaagccagaacacttggtggatgaaagtgggaagttcaagtacagtgactatttcaagccattttccgcaggaaaacgagtgtgtgctggagaaggcttggctcgcatggagttgtttctattgttgtctgccattttgcagcattttaatttgaagcctctcgttgacccaaaggatatcgacatcagtcctgtaaatattgggtttgggtgtatcccaccacgtttcaaactctgtgtcattccccgttcatgagtgtgaggaggacccccagaatcccctgctttcaaacaagttttcaaatggttttagctctggcttcctcaaaccgattcctttctttgcatatgaatatttgaaaataaatattttcccagaatataaataaatcatcacatgattattttaactac

SEQ ID NO: 7474 - DNA, 729 bp, Macaca Fascicularis
  misc_feature (1)...(729): n = A,T,C or G
gcaaaataaaaaaannncctgtgctagggtgcccannnnagcttttgacattgcccctgtacttttatagatgctctttttgtccgtgttggtagtaactaatgactagtgaattttcatgtaaatgaagcaaaataaatatttcagattttattaatctctcataacccggccaaatctgatgacttcattttaattgcttcccagaaggcacttccccttctaccttctattctattctattctattctattctattctattctattctattctattctattctattctattctattctattcctaatctgttctgttctgtttttagaataacacactaggtaaagaaactttaactgcaaggagtcagtgacttttagtgctccctgataaatgatgttattgacaaaagtaaaaaattatttcattgtttttttcctgtattactatctcctctcctgtgctcttgacagtgtgtttagtggatggataatacgtatttctctttcccattcccagattccaaattccctgcctttttggcccacctcaccacaaaagctccatagtttattaatgtaagtttgaatggatgcttctttagggaaactgcaggagttaatggaagagtttcagaaaggaatgagaatgcctcaggagttgttctgtgatggaaattggtctgttgttctgttaatgcggatggaaagaaacttacaacgctcaa

SEQ ID NO: 7475 - DNA, 754 bp, Macaca Fascicularis
  misc_feature (1)...(754): n = A,T,C or G
cagaggtacannnaatccatcttctccannnnntccttcaggaccagctatgagattcagtgcatttctgtcccagcggatgttcattctccgctaaacttcatcttttactaagcaaagggggattattccatgaggcagccaggagcaaggggccatgannnnnnnnnnnnnnnnnnnnnnnnnnnnnnnnnnnnnnnnnnnnnnnnnnnnnnnnnnnnnnnnnnnnnnnnnnnnnnnnnnnnnnnnnncctgctccannnnnnnnnnnnnnnnnnnnnnnnnnnnnnnnnnnnnncttgaaaactccatctgctacattatttctggagtttaaacacgactttttctgtctttgagtatagatgtgtttgtttaattaannnnnnnnnnnnnnnnnnagcagaaggctccaagctgtattctatacttgggaacccttggtgccatctttattttaccaagtgccnnnnnnnnnnnnnnnagtcggtgtatattacagcctgtgtcctaagcttagacgctttaatgtacttttttaaatgaaaaatattagagggggttgaacattgtaactaaagcataaagctagaccaatnnnnnnnnnnnnnnnntatttaatattgtgtgagctgagtccatctgtataaattatttgcacacttttcttnnnnnnnnnnnnnnnttttttatagttgtttgtaccagacggtggcattatttttgtaaaaaactttgacactgaatgcaataa

SEQ ID NO: 7476 - DNA, 787 bp, Macaca Fascicularis
  misc_feature (1)...(787): n = A,T,C or G
gccagacacagcaaacgcttacaaattggcacagacataaaggataaaaggaaaatacnnnnnnnntctgctgatggtccatacttctttaaacacataggcaatagaaaatacacacaagtcagaatgtgaaattaaataacggtttgaacagaaaattcaaacaagactctttccaatttaaagggccaaaccctaccaaagagagggagttgactggcttttaaaaaatatttaaataccacaaaaaacatttaatttcactgtattcagctttaagttgtacacaatgaaaccacactttaaaacaagcagnnnnnnnnnnnnnnnnnnacattatttcttgcattaaagtactactaatgcatnnnnnnnnnnnnnnnnnnnaaatgggattgtcaccatagaattagttggtactatgccatctttcacaannnnnnnnnnnnnnnnnnnttatgaccaagattcatcctcaaataagccacatgtacccttctgacaaagctgtgtaaagtattagaatccgatgctctagagagatcctagttgcctttgtgtatatttactgcctgcttgagtgtttctatgtgtgggttttccctgtatcttgtagaaatgttggggtgtttccttctgccatatggctcgtggcctgcgagccaactacttcagctgtattttaccttcatttttgatgaggtgatttaaattttgtttcactttgtgtagtgaattccacagtagttttctgattgttgttaaaaatgacttaacatatacacag

SEQ ID NO: 7477 - DNA, 740 bp, Macaca Fascicularis
  misc_feature (1)...(740): n = A,T,C or G
aaggatcaaatgnnncagagaagtgggcatgctggagnnnnnnnnnnnnnnnnnnnnnnnnnnnnnnnnnnnnnnnnnnnnnnnggaggacttcccatgtacaaaggaatgcactggtgagagtggccccaaagccactcagctcaggaatggcnnnnnnnnnnnnnnnnnnnctgatgacagatgaaatcagagaannnnnnnnnnnnnnnnnnnnnnnnnnnnnnnnnnnnnnnnnnnnnnnnnnnnnnnnnnnnnnnnnnnnnnnntgcaaggcagaggccatgatcacaatgagaggcgagatcagcggggcacccagggggttcctgnnnnnnnnnnnnnnnnnnnnnnnnnnnnnnnnnnnnnnnnnnnnnnnnnnnnnnnnnnnnnnnnnnnnnnnttaatttctataagaaagcaagtgtggattaccaggaggtacnnnnnnnnnnnnnnnnnnnnnnnnnnnnnnnnnnnnnnnnnnnnnnnnccccagaatctgttgactgaagaagcagagctcctcccaggaaggacagtaccacattacannnnnnnnnnnnnnnnnnnnnnnnnnnnnnnnnnnnnnnnnnnnnnnnnnnnnnnnnnnnnnnnnnnnnnnnnnnnnnnnnnnnnnnnnnnnnnnnnnnnnnnnnnnnnnnnnnnnnnnnnnnnnnnnnnnnnnnnnnnnnnnnnnnnnnnnnnnnnnnnnnnnnnnnnnnnnnnnnnnnggcaca

SEQ ID NO: 7478 - DNA, 700 bp, Macaca Fascicularis
  misc_feature (1)...(700): n = A,T,C or G
gcttagcagnnnnnnnnnnnnnnnnnnnnnnnnnnnnnnnnnnnnnnnttacaagaatgtgacatggcaggatctatggaaccaaacggaaggttttgaggtgatgtaggtctttcatagttagcnnnnnnnnnnnnnnnnnnnnnnnnnnnnnnnnnnnnnnattatttcagggggaatggcgattgaagtgctacaacagagannnnnnnnnnnnnnnnntattgatagacaatttaggaggtttattgttgctatttgattactgtttggggtaggaaaactttttcatttatgggttttgttgtaagatattgctttaacaacaacttctttttttaaaggctgttagagtgatcttcctttgaaaagtgtgctcacatgaaaatgaatgtcactgagatcactggaaatttctaggggttctgacattggtcatcacccatgtgggctttagacttggctaaatccaatatgctttccaatgcaaagcctgcgaattggatttaaacttnnnnnnnnnnnnnnnnnnnnnnnnttccttttagcttgagtttaaatcattttatttttattggctaattataaattgctatggaattgtcttattatacattattctgtttataaaattacattgatgataaagcaaatgaggcaaaatgttaatgagtagctatttgggtaaaggtatatgggt

SEQ ID NO: 7479 - DNA, 745 bp, Macaca Fascicularis
  misc_feature (1)...(745): n = A,T,C or G
catnntacngggagcctcnnnnnnnnnnnnnnnnnnnnncaagttcatcccaatgcctgtgctnnnnnnnnnnnnnnnnnnnnnnnnnnnnnnnnnnnnnnnnnnnnnnnnnnnnnnnnnnnnnnnnnnnnnnnnnnnnnnnnnnnnnnnnnnncagccagacctnnnnnnnnnnnnnnntgtgcctctgaccagggtccatctcttcnnnnnnnnnnnnnttgtctgtctggggctactttgnnnnnnnnnnnnnnnccctgcagccatcatcttccccctcatgttgttgggccttgtgggnnnnnnnnnnnnnnnggagagggtcnnnnnnnnnnnnnnnnncnnnnnnnnnnnnnnnnnnnnnnnagaggaggagagaagcatccctgagaagnnnnnnnnnnnnnnnnnnnnnnnnnnnnnnnnnnnnnnnnnnnnnnnnnnnnnnnnnnnnnnnnnnnnnnnnnnagaaatcaacatttctgtgaattagctggagtaggagtctgggagtggagaccccaggaaacagcatgagttcacaggtgcttattcaggaagtcaggacactttnnnnnnnnnnnnnnnnnnnnnnnnnnnnnnnnnnnnnnnnnnnnnnnngaagggcagctgccaatacctcnnnnnnnnnnnnnnntgagggtggagagtggcaggaagcaagcatgtttgctgtgcatttaggaaaggctggtgagccagagggacggatcaggcccca

SEQ ID NO: 7480 - DNA, 470 bp, Macaca Fascicularis
  misc_feature (1)...(470): n = A,T,C or G
tcttgaaatgagnnnnnnnnnnnnnnnnnnnnnnnnnnnnnnnncagnnnnnnnnnnnnnnnnnntgtgaccggcctctggccaagaccaagaagaagaagaaggcggagggcaccgtgttcatnnnngaannnnnnnnnnnnnnnnnnnnnnnnnnnnnnnnnnnnnnggctccttggagggcacggtgaagaggctttcaatccggccgcctccttcgtactcctcttctggccccaggacccgcccgtgnnnnnnnnnnnnnnnnnnnnnnnncaggaccaccctggctcgaggaagcagtggagcaggagcagtgtggnnnnnnnnatggaggtggtgggccagaagtcctgggaggatatacacacagactggaggtggcttcttcagccctgggcagagcgtcttcacctcccnnnnnnnnnnnnnnnnnnnttgtttgctttcgcccaggtagggcctcttga

SEQ ID NO: 7481 - DNA, 717 bp, Macaca Fascicularis
tgagggagtgaaaggccacaaacccaccctaggttgatgcacgggagctaggagagtccccacggcaatggggctggagcatccctcatctggaagaatcctctattgatggcagggctggccagggggaagagggcagtatttgttgcgtcctggccttccctcatgtgtgcgtgcatatcagcccgtgtgtctgactgatgtataggtccatggcatcctggttcctatctgtgttgctgcctacagtgtctgtgatgtctgcatgtccaggcctgtttggggttgcctagtcgactcttctggcacagggtgtgtctgtggtatacctgtgaggtggctgacaattagtagtttaatcacagggtgtgtgtgtgtgtttatgtgcacgcatgtatatgcatcaccacgtagccaggaggggcctgttggggtttgagtcactgggatcttcccggtgagaggtaagagaagtcactgggcttagctgggcctctgaggcctgtatggaactcttggttgctgaggcaaccatgggcctgttgctaggagatagctggggaaggcccaaggctgcccagggcagagagaggagatgaagagtttgggacagtgggggaggagatgggaaaggatgggatttctgggtcccagagcgggtgggatactcatgcacagcttcttcactggggggggcacgcattatttctcactggt

SEQ ID NO: 7482 - DNA, 675 bp, Macaca Fascicularis
  misc_feature (1)...(675): n = A,T,C or G
ccctgcaaatctataccnnnnncntagtannnggtggatggaaacttcaatttctctcgccagctnnnntctttgacaagagaatcgagccatcctggctatctttctgcagcttaaaaaaaaaaattttttttaataaaaataaaccacacacacagatattgtgcacacaccccctagtggccacatgtggaaacacatgccctacaaagtgtgcgttgggattgataaccgcttgggtttgagaaggaaaccccagataggactgcaactccatcctaggaaggaggatggtgaaagatgatcttatgtggaagacagtgaaaaaggaaaaagacaaagaaaaggtgggggagaaagaaaagtgtgatggagaaaaagaaggcaagagaacaaacggaagattaaagaaagatgtataggaggacagagagaaaacaataagacaagcttaaaggagggatgtttctcaatgtgaagtctttctctgtttcaaatataactacaaaaagtaataatggaaaataacatgaattggtgtgtccagggtcagctggccatcctgtatacaggaggtggtgacagggtccatatctgaccccatcactgcctgactgggtaatcttttcagaatccaaagctttctcatgtccctatttctgagcttgtaaaggg

SEQ ID NO: 7483 - DNA, 754 bp, Macaca Fascicularis
  misc_feature (1)...(754): n = A,T,C or G
actgagaaagccaatggagcagagagatgtgagtgactggtgggtgacattcttgcccttcccccctccaatggtatccacacatagactcgtgggggaactgaggcacagacagggagcaacttctcaggccctcacagttggcaattccaggattaggactcaagtgcgatttccaggcagtccctgtttctgtcgtacctgttgcacctatccccctggggcgtaggggtccattctcagnnnnnnnnnnnnnnnnnnnnnnnnnnnnnnnnnnnnnnnnnnnnnnnnnnnnnnnnnnnnnnncctgtcgtcaccatgacctgatgtgtgacatgttatcggtgtcccnnnnnnnnnnnnnnnnnnnnnnnnnnnnnnnnnnnagtctgtgggtgctcaagtccctgatacaaaatggtgtgatatttgcatataacctatacatactttaaatcatttctagattacttatgcctaatacaatggaaatgccatgttggctgggcacgnnnnnnnnnnnnnnnnnnnnnnnnnnnnnnnnnnnnnnnnnnnnnnnnnnnnnnnnnnnnnnnnnnnnnnnnnnnnnnnnnnnnnnnnnnnnnnnnnnnnnnnnnnnnnnnnnnnnnnnnnnnnnnnnnnnnnnnnnnnnnagcagactcaggaggnnnnnnnnnnnnnnnaggcaggagaattgcttgaacccgggaggcagaggttgcagtgagctgagattgcgccactgtactacagc

SEQ ID NO: 7484 - DNA, 721 bp, Macaca Fascicularis
  misc_feature (1)...(721): n = A,T,C or G
aaccaaatgaacannngggtcaggtaccagatgnctgctgcctagaatagctttttctaggtgtctaccaccttgaattggtctcttaactgtgttcaagtctttgtcattgannnnnnnnnttcatatcttagattcagttgtgtatgatttaatttccattaggagtctttaggcagggagggaagaaaaggcagatttgttcatatcaatgtcagtatccattttggcacataaagatttttcatgaaccctgtttgcatagagccagatcttttcccctcccccaagagtatctacatcagggatgtgacttggtgcgaagagtcaggggaaaggggaaaaacccaaattctaaatgacctccttgtccagcttactaaaatgactgcagagcagacacaggatgaatttgaacctgacacaggatgaatttgaacctttggtctcatttctggaaaaacttgtgcaattttttttttctgtgctacactacatacaaatcaccaaattacagattacccctttgatccttggtgttctgagcagttnnnnnnnnnnnnnnnntttctgggaagcgggagggaaaggagcaaggtnnnnnnnnnnnnnnnntttgtattttggtcccaaaatgtaaatacaattttctatgttacttttttgtggtaactaccgagatgaatattttaattagataagttatannaaaggaaaattc

SEQ ID NO: 7485 - DNA, 102 bp, Macaca Fascicularis
cagaaagcgagacgttctaccatcacaaagtcacatggctcttcagtgacagacaagactccttgccaaggtactagtggcagaagagggcagcggttggca

SEQ ID NO: 7486 - DNA, 2172 bp, Macaca Fascicularis
tgcctgattgcatatttaaatttcctccctgtttttctactattttattcaatcttggctgatcgtggcaggggaaagaggtatgtgactaaaccgaatgaaccagccacctgctgtcatactttgtgcatgcccttccagtaccatgtcttctaatgggacttttcctggtgctcctgctttctaacactgacccaaggaatgtaacagcaacttccagtggactgcttgtgaaatgggtgaccctccacatcagggtcaatgtgggtgattctcctgtgcgtgcatgaagcaattgatatacttaataacgactgcagttacatcccaacacaacgcctccttcctgccttgattctgtccttagcctggtgtagtttcctatgtctgtctgtacttacctttattacagcagatgagtaccaaaccgagtaaccagtagctcgctggagtgatactaatcttcctcaacaaccgtctctatgtgaatcatatatacagtatttatatatagagagagtgctgaagaattttttccctgaaaaccctcagagaatgggggtaagacctcttgaggcaggtagaactaattcatacagcatctatccgcaacgcacagccatgagtgataaggaaaagcaaatcgataacctccaaacatgtaaacaattaagtgggttagaatatttttcctatgctatcctataggatgttcttttcagactgcaggcatctagggttccagtgatggtaagtgtgttcttctcaggtgtcttcaaagtcatctccagaggcatggaggggctccggcctgccctcctctgatctgagtggttgaggctcttcccatgatgctggacaaaacccacacattcttgaagacataaatacaaagaggacagttttctcagtcacaattgtgcttttaagtgaatcagaggagaagaaaaatgacagatatacttgatctataatcacgttatttttggaggctgctaagggctaagaaaggatgtatatttttctaaattactcaaaagaaacaccaaaggagggcttatatgctaaacaaggcacgtttcacttttccaaaaagccctttttcactgtgttaatccttatcctaaactgccctaataaccatcatcacaaaatgttttaatcttgtatattcaaaagccattccaagcaaataaatagggtagacatcaactcaattcccattaccaactttaaaacttagtaatgaaaacttcagcatactttggagtgcctgagaccaaattttcttttagataaacgtacagaattctttccaaaattaataattttacccaatcacaaaatcttctccatcaatcaaaagctacctattgagcatcttccatctgctgagcagtgaggcaactaccttggtgctttttgaaagacaactaggcataggacagcctgtccttcaaacaacagaacacagggtgtccaggagcttaggctctgtgccagagaagtttgactttgaatcccagctttgcctcttctcttccaggataacttctctcatcctgtaaagtgtagacaacaatagatggtcattgttagagtggaaggccacgttcagtaaagcaactggtgttatgcccggcacaaagtgagcaccccacaaaggctggctcttgtgttgctaggaacaaattgctaaggaaacaaaatataagaatatctaattatcaaagtgacaaaacctgtgtggaaagtaccaaatgaacagaataaacagaatgtgttgagagcagattcatttcaaggtgcagtggaccagaaaggcactaccacctgttctcaactttcacttacagattgaaatcacatggacagctcttgaaaattcagatccccaggtcttgccccagctcaatttactggaatcttccagggaggtgctgagcatgggtaatttttaaaagctgcccaggtgattccaggtgtacaaccagggtcaagactggctggagtacagtagaagatgtagcattacctctggcacactaaacatggggtttttcttccccagaagaaaaagtacgacaattgttttctaccgatcaatactcactaccatgttctctgggtgctcagtaaactaaaaaaaaaaaaaaaaaaaaaaaaaaaaaa

SEQ ID NO: 7487 - DNA, 570 bp, Macaca Fascicularis
ataacatttaaaaaataattgtgttcgaccccaaatgactttatacccaattctacataaaaatatagaagatctatcttttttgttactttcagatgttcattaactcagtttttaagcagacgttttcagggcaataaatatatgtcgtgtatgaaatatctcacaagctggaacataaatttacgttactcaaactgccattcataatgtaaggcaacaattaaattttgaacgtaaattttagatggtttgtataaaaaatcctaaaagcagtatctgttatttagctgtaaaccaagtaggaagttattcagataatttcttaaatattgatgaactttggagtattgtttcttctttcaaaatgaatgtaatttatgaataaatgcaccttatatgtttaaacaatttttgtatactttggggatttttggtgcttatatgctaaatcacattcagcatgtgtattttgacatttaaaatacttctctctaattctgtaaattaaaagaatagttattttacagttctagggattgtgaaataaatgtcacttttttaaaaata

SEQ ID NO: 7488 - DNA, 1723 bp, Macaca Fascicularis
caaatttctgatgcatttttcagaggaggattattaaattattttttatatggaatgtaatactaaatttcatgtaagattgggatgtaacgttttatatggaataataatattggatagaaaatagaaatgctaaatatggtttatgaatattttaatataaaagagaaaacaattggaggcgtaagaagatttggtttcaaatagaatacaaaaaactgcaacaataactaactagtatagaaaatgggattccttcaatcatattagtgactgtggaattaaaatggtccttaggaatactatttctaaagtcaggatctcgatggatatgtcattcattaaatattttaatatgccactatatgaagtagccaggataataatagcttataaatatgtaaggaaactgacaaagtacagcaatgtgggagattggagtatgtacaaggttctatgggagctcagcaagaatttaaattagaactgtctggaaaatgtagagtagcatatcttagtctaatctgtgctgccataacagaatgtctgagactgggtaatttatgatgaacagaaatgtattagttaacaattctgaagactgggaagtccaaatcaaggtatcagcatcttgtgagagccttcttgttatgtcataacatggtggaaagaaagaaggctagagagaacaagagggggccaaactcattcttttatactggcaccaaccacacccatgagcatgaagccttcatggcctaataacctcattaaggtctcgcttcttaatactgctacaatggcaattaaatttcaacatgagttttggaagtcccaaatattcaaaccttagcgcagtgcaaacaaaacaaagattcggcataaacacacactcaagacacgcaggatttttattcttgctgctagtgttattgttgtttagcctttttaataacaatttctgattataaaagtcattatcagccgggtgtgatggctcaagtctgtaatcccagcactttgggaggccgaagcgggtggatcacaaggtcaggagttcaagaccatgtcttaaaccatggtgaaacctcgaacctactaaaaatacaaaacttatccaggcacagtgtcaggtgcctgtaattccagctacttgggaggctgaggcaggagaatcacttgaacccaggagacagagtttgcagtgagtagagattgtgccactgcactgtaacctgggcgacagagcaaaactctgtctcaaaagaaaaaaaaaatgtgattatctgctgaatgttaataatatagaaaacacagtagcacaagaaaacaaaattgttcatattctgaaactccttctgtcatatactcactatttgcattttgatatacttctttccatacttttcatgcatatctatgtatatattttctctttagaaaaagtattataataaatatattgttttgtaccaatgtttatttcaggtgttaagaatatttaattgcatcaatgttttgtaaatgcttagatctatccacaatgtttcaggatgcagacgttctaggttgtagatcttgcctcacaatgtattagctgtgtaactttgaatgattccctgaaatgttctgaaattcagtcattttgtttgcaaaatgaagataattatagctagtgtttattaaacaggcactgttcaaagtgaaaaaaaaaaaaaaaaaa

SEQ ID NO: 7489 - DNA, 664 bp, Macaca Fascicularis
gcacattaaccaagtctgccatggagactgtgaggacgtcttcttggaccagatggtgggcgggctggcgcccctgctgctgcacatgcaggaccctcaggccgccgtggccagagcctgcaggtttgccctgcgcatgtgtggccccaacatggcgtgtgaagacctctcagccgctttccagaaacacatgcaggagggacgggccctgcacttcggggagttcttcaacaccacatgcaagcacatgatgcaccatttcccagacctcttgggccgcgtgctgaccacatgcgtgttttacttcaagagcagatgggaggacgtctgagatgctgcaccactgttcactgggttcttggtgctgcacgcggagcccaggcagcagccgcaggtggacctggatcagctcattttggcgctccagatcttgttgaaggacccggcccccgaggtgcggaccagggctgctgaggccctgggccgcttggtgaagctcgcctgaggctccagccagcacccccagcaaggagtacgcacccagacctgtgcgtgagctccaagacagggcctcccgaggaccccagcccgggcacacagctggaggggcctggccccagaacaggccctgccagggaccaaaccgcagcccctcagtgaggcc

SEQ ID NO: 7490 - DNA, 702 bp, Macaca Fascicularis
ggtacatgaatggagtatgatgattttataacattttttatcagaatggaaaaagaactgtttaaaagtttgatacttttaaatagttggtttttttgcttactctggtaatggtgattttctacaaatacataataaattgttttttttgattctatattctgtatgcagttgaatatccattacttattctgctgtgctttaatagaatggaatgtttacaggcccttaaaatattattttttaaaaaccttctgaagatgcataccaaagtttttctaagaagattttataatcaatttaataatgtaaggtttatcagattcgattatagttattaaggcaattttatgttagagactattttgtaatgtagtgaatggtacctttataagaaaagtgactgccaatatatttttatagctgatctttttaaattctaatgttgagtttttaatgattattttaaatgtttatatactttagtaaaatttgcgtctcaaagtatcatttttatattataggaagtaaagttttcaaattggctaatacttgctttgtaaattttgtatgcagtttatctaaaattcagaaatactgtcagtacaccagtgtttaacatctgtatttccaatttgtatacagtttaaaattgtactgcagaactgttgtgtgcttcttacacagtatgtatcatattgt

SEQ ID NO: 7491 - DNA, 1151 bp, Macaca Fascicularis
tgttttgctatttaggggtctcttgaggttttatatgatttttaggatgtgtttttctaattctgccaaaaattcaataggaattttgataggatgcatttaatctgtggatcactttgggtagtacagacatatactactagaagattagtttgattggaatgagattacagacgtgagcgaccattcctggacctatttctgttaattattttaaatgtggctactaggaaatttaaaattacgtatgtgacttgcattatacttctatattttgtatttgccaaaaaattcatttaaataaataaaatcacatgtgtcccagaaacaacagcactggtttagaaataaggtgatgagtaaataccagaagatatcacagctaagatagtgagatgtgagtgtttctggggaaggaactggggaactgggaggagaacagggaattatgatattttgttttaagactattaatgtcatttgacttttaaaataagttcccatatatgactatgaaatacaatttaattaaaatatatttatgactggtttcctgatctttttaaggaactacataatactttatgatatgaagttaccataattgctgtaattagtctttttgatggatacttaaattgcttccagatttttttgctatttcaaatattgcttaaatgaatatctctgaatatgccatattatatctgcaagataaatatccagaagtgagctttctgggacaaagggtatgtgcatttactgttttgataggtctatcaaatttctcttctgagaaattgcactggtttttactcccacaaacaatagctgcttctccacactttggtcaacattgactattatccgttttttagtcctcatccttttgctgttatttgtggatattgagcatcaagtgtatagtgtcccctatatgttgatgtcctttgtttttctttggcctgctgcctttctaaatgatttgtaagagtggatagataatttcttagtgaatcctgagggctgttgtaaatgtcaaaaatgtttgttctcctaggaaagacaaatccaggagtgtctgatgaggacatagctgagaatgctaatgttggccacattacacatttggcaaaaaaaaaaaaaaaaaa

SEQ ID NO: 7492 - DNA, 738 bp, Macaca Fascicularis
  misc_feature (1)...(738): n = A,T,C or G
tgcttgcagaggaggcacagggctcgctggcctcgtgttgctgtttaagtgatagctttatggagatagaattcgcatactgtgaccttgacctttnnnnnnnnnnnnnnnnnnnnnntttgctnnnnnnnnnnnnnnnnnntattagggtcatccagagaaacagaaccaatagaaggtgtgtacgtgtgcacagatagagatttattcttgtgaagagttgactcatctcatttnnnnnnnnnnnnnnnnnnnnnnnnnnnnnnnnnnnnnnnnnnnnnnnnnnnnnnggagagcccgtgatgtggctctggtgtccacctgaaggcccaagacccaggagagccaatggtgtcgttctggtcctgagacccagnnnnnnnnnnnntgtcagtttgagtctgaagcaggaaaaaactgatgttccaggttgaaggcagttaagcaggaagaattctgtctcactcaggccttgtgtcctattcggaccttcaggtctttgtcacaaaatgacaaaggcccgatcagaacaaatctgagaaaaacaaaaccctttccttctatcggttttggattcattggctaggaccctggaaattnnnnnnnnnnnnngattaacaggaaacaagcgtaacaattcaagtaagnnnnnnnnnnnnnnnnnnnntcataaggaaatgaagacgcagagaaaccgttagcctgagcggtttttgttttgttttgagacaaagtctc

SEQ ID NO: 7493 - DNA, 998 bp, Macaca Fascicularis
  misc_feature (1)...(998): n = A,T,C or G
agctttttaagagtcnnnctttttntttcnntctttctttcttttttgaatggatttctttagggcaggatcttcattagcattctgttcactcctttctgttttttacaatgttcctagtgcatttggaaaatacatttnnnnnnnnnnnnnnnnnnnnnnnnnnnnnnnnnnnnnncattatctcatattttttctttcttttttttttgtttttcaataattctggagtctttggttgaaacgaacaacactacctaaggacaaaatactattattaaaaaaaaagtcttctagtatgtattgtctgtaacacatttctggagctggtgtgaataaacttttttattttctgtagtgccatctatacaaacttctactctttgaaaactgagatttnnnnnnnnnnnnnnnnnnnnnngaactctgacatataaaaaactctattaagtaatcaatgatcatttttgcttttcccaattgccatttcaaaggctatcttgtttgttatattgactacataaacagtagagtgtttcccatagacggggagagagacagagtgcataagcaaaagattatgtgtgtttgagtgtgtgtgtgtgactgtgtgtgactgtgtgtgtgatagcaaattgaaacccttctgtctgggattcccaaaccattatgcaaaagggtgtttaaattactctgctgggggcactgcagtaaccgtacttagtaaaaaataaataaaaattaagaaaaaaactaaacaattgtttgtatctattgactattcatttacagcatgtttaattatttacatattataacacatcaacttaagccataaacagaattagcacattgccttaccataaaatacaaattagaagttaaaaatatttaagaaatctgttttaatatttacacacgctcagtgaaagttatggttgctcacattacatgtactctgtacatttagccaaatggcatgattgctacagttgtga

SEQ ID NO: 7494 - DNA, 724 bp, Macaca Fascicularis
  misc_feature (1)...(724): n = A,T,C or G
accgcgacaaggcgctgcttaaacggctgctcaagggcgtgcagaagaagcggccatcagatgtgcagagcgccctgctgcggcggcacctcctggagctcacccagagcttcatcatccctctggagcactacatggccagcctcatgcccctgcagaagnnnnnnnnnnnnnnnnnnnntcccccccagatccggcccttcagccaggatgacttcctgcgtagcctggagcatgccgggccccagctcacnnnnnnnnnnnagggcgactggctgggnnnnnnnnnnnnnnnnnnnnnnnnnccccattttgacggctggtaccggcaacggcacaaggagatggccctgaagctggaggccctgcacctggannnnnnnnnnnnnnnnnnnnnnnnnnnnnnnnnnnnagacaagtccgaggtggaggtcgtggacctggtcctgaaacttcgtgagaagctggtgcgggctcagggccaccagctccctgtgaaggaggcaacgctgcagcgggcccagctgtacatcgagacggtcatcggctccctgcccaaagacctgcaggccgtcctgtgccctccctaggacagagccaagggccacggtcccagggtcctaggtctgcctgagcctcctgctcccnnnnnnnnnnnnnnnnnnnncaagcacacgctccccttccttggccccccgcccagactgcaggctcctccattgtc

SEQ ID NO: 7495 - DNA, 789 bp, Macaca Fascicularis
  misc_feature (1)...(789): n = A,T,C or G
tgatgcggcccgcactgccaggctggaaagtggagtgtgtgggggatgacattgcttggatgaggtttgacagtgaaggtcgnnnccgggccatcaaccctgagaacggcttctttggggttgcccctggtannnctgccaccaccaatcccaacgccatggctacaatccagagtaacactatttttaccaacgtggctgagaccagcgatggtggcgtgtactgggagnnnnnnnnnnnnnnnnnnnnnnnnnntgttactgtgacttcctggctgggcaaaccctggaaacctggtgacaaggagccctgtgcacatcccaactctcgcttttgtgccccnnnnnnnnnnnnnnnnnnnnnnnnnnnnnnnnnnnnnnnnnnnnnnnnnnnnnnnnnnnnnnnnnnnnnnctttggtggccgcagacccaaaggggtacnnnnnnnnnnnnnnnnnnnnnnnnnnnnnnnnggggnnnnnnnnnnnnnnnnnnnnnnnnnngagtccactgctgcagcagaacacaaaggatttttgggaacaggaggttcgtgacattcggagctacctaacagagcaggtcaannnnnnnnnnnnnnnnnnnnnnnnnnnnnnnnnnnnnnnnnnnnnnnnnnnnnnnnnnaaannnnnnnnnnnnnnnnnnnnnnnnnnnnnnnnnnnnnnnnnnnnnnnnnnnnntagggaagtcaccttgcagaaaatactagcaatttgatattaattaacatcttctatgtgccatagacnnnnnnnnnnnnnnnntcc

SEQ ID NO: 7496 - DNA, 198 bp, Macaca Fascicularis
tgtttcaggatacaccaggaccccgtagaggagcagagacacagaattgtgtgattgggtcatgtcattgtcatgctcagctagcagtgacatccaaaggctcctgggcagacagaacaggactacccaggggcgcacaggaggccaaaaaaaaaacatcacagatcacagcaagtgacattttgtaccttgagattc

SEQ ID NO: 7497 - DNA, 751 bp, Macaca Fascicularis
  misc_feature (1)...(751): n = A,T,C or G
tcatgcagtgnnnnnnnnnntgagttcatgaatgagnnnnntnctaaacaaagattaaacgatgannaagccaaattggtgaagcaggttcaggagnnnnnnnnnnnnnnncggaggctaaaactagtcaaaatgtatagatcaaaggtgaatagtgataaatacatcagagaaaccacagttgaggcacattctacaaaataactgactattactctacaataaactgtcaaggtcatcaaaaacaagacaaaactnnnnnnnnnnnnnnnnnnnnnnnnnnatgacaattggccgggcgtggtggctcacgcctgtaatcccaacactttgggaggccgaggcaggtgggtcacctgaggttgggagttgannnnnnnnnnnnnnnnnnnnnnnnnnnnnnnnnnnnnnnnnnnnnnnnnnnnnnnnnnnnnnnnnnnnnnnnnnnnnnnnnnnnnnnnnnnnnnnnnnnnnnnnnnnnnnnnnnnnnnnnnnnnnnnnnnnnnnnnnnnnnnnnnnnnnnnnnnnnnnnnnnnnnnnnnnnnnnnnnnnnnnaaagcaaaactcagtctaaaaagaaaagaaaaaaaaaaggaaagacatgacaaccaaataaaatgtatcctgatgagatcctggaacagaaaaatgaccttaagtaaaaactaaggaagagtgaataaagtttgtgctttagttaataataatgtatcaatattacttcaatagttgtgacaaatgtaccatactg

SEQ ID NO: 7498 - DNA, 723 bp, Macaca Fascicularis
  misc_feature (1)...(723): n = A,T,C or G
tttgttatattctcaattctaccctcacttccaagagccaaaatacattacccgggaacctccggagctgagtcctgtctaaagattaatcctgtcttcatagcagcacatgtgagcaatgtaaagtatccttatnnnnnnnnnnnnnnnnnnnnnnnnngtaacgtcaaggatgctcgaggcgaggttgtgggtaaacacgttttcatcaggagtgtgacgcagtccccgtggtcgccccttacagcagacctacnnnnnnnnnnnnnnnnncagggccgaggaggtctccatccagcattctnnnnnnnnnnnnnnnnnnnnnnnnnnnnnnnnnngttttgtaacttattccagcgtgaggagcgtgcgattccgccctgaaacatgaggcggcacgctggtgattctannnnnnnttttagggggctttctcagaggggtgaggaggagcnnnnnnnnnnnnnggggcatccgctctagagagctctacagttcctcatcccgcatgaagtcactcaaagnnnnnnnnnnnnnnnnnnnnnnnnnnnnnnnnnnnnnnnnnacnnnnnnnnnnnnnnnnnnngaaggggaaaatcctttcttctccgacgcttccccatgttcagttnnnnnnnnatttttccactgaggtctgttctttgtctctaacactgatttcaaagccaaggaaaagctgcctcctcctcctgaactcgctga

SEQ ID NO: 7499 - DNA, 716 bp, Macaca Fascicularis
  misc_feature (1)...(716): n = A,T,C or G
acgtgtagagtatgtggtgcttgctgagctagaggctcacggatggtgtcccttctgctggttccagtgagtatgtgcctctgaaattcgaggggactgtggagcctgcttccaggctttgagagcccaagtctgttgcaaattgaatgtattcacaaaaaggaacgttgaagtcctagcctctggtgcctgcaacttcatttggaaatacgaaatggggtctttgtagatttttttaagatgtgaatggggccaggcgcagtgactcacacctgtaatcccagcactttgggaggctgaggtgggtggatcacgaggtcaggagtggccaacagagtgaaatctgttgaggtcaggagtggccaacacgagaccagcctggccaacagagtgaaatcctgtctctactaaaaataaaaataaaaccaaattagccaggcatgatggcggtgcctatatttctttttttcttttttttttttaattgtactttatgttctagggtacatgtgcacaacgtgcaggtttgttacatacgtatacatgtgccatgttggtgtgctgcacccattaactcgtcatttacattaggtatatctcctaatgctatccctcccatcggcagtgcctgtatttctgnnnnnnnnnnnnnnnnnnnnnnnnnnnnnnnnnnnnnnnnnnnnnnnnnnnnnnnnnnnnnnnnnnnnnntgcctca

SEQ ID NO: 7500 - DNA, 663 bp, Macaca Fascicularis
  misc_feature (1)...(663): n = A,T,C or G
acttgcaagttgtctgaatcctttagcttcaaaccagcctgagttgagtgcttgacacagcagaacctgtccttaccacaggtgggaaggaaaggaccagtttctagccgtgtcgggctactcctcttttaagcatctagaagggaggcattcacaaaagctgccccaacagctttcgaaatgaccaggaggactgggcggcgccgagcccagaacgctcctcgcgcagccttggctgcgggcgaccggaccgattactactagtgcggtggtggtgcaggccctagcctgtatgcaaatcagggatcagacgatcggaatttccaccaatcagcgggaagcctcggccnnnnnnnnnnnnnnnggagacagcagcgccacgccacaggcttttccgctggaagggtggggggccaggtggggctctcgccccgacccttccccgaggcccgccctcctcgccttttctctaaattcctcttttgagtgccctcccttccggttgagaggtgggggttggcccgtagttacacactcagtcaccccgcactgtgaagacggggcctcccttgtgaactgatttgcgtgggatttggttgttttattaagagattttaaaaatttagatgacttactagtatgannnntnnctcgtattgctcc

SEQ ID NO: 7501 - DNA, 746 bp, Macaca Fascicularis
  misc_feature (1)...(746): n = A,T,C or G
taggggaggtgggctgggccctcgctcctgactgttgctgctccccagcccatggacgggagatcctgggttgggcctctctctgatgaccccagccagatgagcgagtggggctcagcgtggcccgtggtgcctgtcactcagcattcccatgcctgatgtttaccaagtgctgtgttggacactggctttctnnnnnnnnnnnnnnnctcctccatgctccctacacacctgagatgtaaactggccgtcagtgttcactcaggacctaggattagaaaacggcagnnnnnnnnnnggatccaacttgcgcttctatcaagcctcgttctttttcctccagcctggagtctttgnnnnnnnnnncagaggacacggtcttgcctctcagtgcttattttagtgagaaaaacagcaaataccaggggtacaaacannnnnnnnnnnnnnnnnnnnnnnnnnnnnnnncagccagccacatttccctgtgtctggctagagccaccgttagactcagacagaatgcttcaggaacctttgtcaccccttcaattggagcaggatggaagggtgtctgtacttgggagggagtggggagtggtgggaggggagttgnnnnnnnnnnnnnnnnnngaaactgctgtccctcagctgggctggggtctccagggacctgaggtacatgcaggttgtaagctggaaaagaaagttgtagactgtggcccagaatagggctggggcagctc

SEQ ID NO: 7502 - DNA, 1992 bp, Macaca Fascicularis
  misc_feature (1)...(1992): n = A,T,C or G
actgtgcaaacaaaaaaaggcaacaagcatgctgggaccattccgtctgctgtttgggtctcacttgccctgacaactaaaaatcatcagtggaaaggtattctacatttcttatttgaggcatagaacggtggatgatttcatctggatatttagatcacaaagagatcaagacagacactgatatttgacctaggatagaagaaaggccatgaggaggccttagacctcagcaaaccgtttccatcttactgccatattcttacatgaacaggaaagcacaccacagatgaaccatgcttttcgacgaaattcaactccgaaatacacggtagctcatgtgcgaacggcccacacggagaatcaatgttcctgtacctttggtgctgggtctatgtgatacctgaagtttcatggcattttattaatttctatttgaaaactaaaagtgcaccctgctctgctaaaaggcacagaaaacatacagaatgtaaactgagaacatggcatgccacagaaaatataaacagaaaaccctgacttagacagacatgtaaaaactagagcattttacagacatgcccactacctggccaaactggattcaagaatttggaagcgcatattggaaataagcgaggtttccttacaagtcagttgatgagatatctgacttcgagaatgtttaagcaaatatgaaagctcaaggaattgcaatattgagatttctgaaaatatgattggatccagaaatggatgagagattgtcttgaagattaagtgatttaatcacagaccattacttcctctgcaaatggaagagggcagaaagatgaggactctgcttactgctgtgatgctgaagaaggttcaaccaaagaagcttcacatcgtttgttctcttcgctgaaaaccagaaagaagagccatgttaaaaaaaaaaaagtacgtttcaaattgatgaatgaaaacagcctttgaatgatggattagaaaatgtatttgttccataaaaaaatacctcacggtagaaaataaatgttctcaatatcaaggttttcaattattatcaaataaaccatttgagtcatgtcttttactattaaagtcaaggaaagcattggtgtcccatttgctgtgattcatagtaagtttagcagattcacgatggctgggtttattcaaatttgtaattgaacattagcaattctctaaatacagtttctatttcttatcatataaatnnnnnnnnnnnnnnnnnnnnnnnnnnnnnnnnnnnnnnnnnnnnnnnnnnnnnnnnnnnnnnnnnnnnnnnnnnnnnnnnnnnnnnnnnnnnnnnnnnnnnnnnnnnnnnnnnnnnnnnnnnnnnnnnnnnnnnnnnnnnnnnnnnnnnnnnnnnnnnnnnnnnnnnnnnnnnnnnnnnnnnnnnnnnnnnnnnnnnnnnnnnnnnnnnnnnnnnnnnnnnnnnnnnnnnnnnnnnnnnnnnggcctcatccctgtgaatttcttattgtacaaaagttctttcactacctgtgtgcagtgctctgagaggacagacaaggctcgagtgtatatgctgaccagatttcattgaaatatcagcttgtttggtacgaggcacaagtgtagcatgtcacatgtgatcatgttggatcattgacagtttttaggtatgtattgacctacatttatgatgaagatcctgagtggaggttaagatactaagttattttctgtatgaatcaaaattatattgattctgtgcaatcaaaacaaaaggcagaatagaatgctgagattggttaagtttcaatgaccatctttatagatttctgctatgtgtcatcaaaacatctagttctgagtaacattttcacgattgttataaaattatagatgtgagcttctaaaataaaggaatggtaataaaatgaaaaaaaaaaaaaaaaaaaaaaaaaaaaaaaaaaaaaaaaaaaaaaaaaaaaaaaa

SEQ ID NO: 7503 - DNA, 655 bp, Macaca Fascicularis
  misc_feature (1)...(655): n = A,T,C or G
gcttnnncatgtnnnntcagnnnnnnnnnnnnnnnnnnnnnnnnnnnnnnnnnnnnnnnnnnnnnnnnnnnnnnnnnnnnnnnnnnnnnnnnnnnnnnnnnnnnnnnnnnnnnnnnngtactgtattaggtgtaattatgaccttattattgtctttatttgaagattatgtatgatttcaggagatgtggatgggttcaagctgacaaagttgtgatggttaatattgagtgtcaacttggttggatnnnnnnnnnnnnnnnnnnnnnnnnnnnnnnnnnngtgagggtgttgccaaaggagattaacatttgagtcagtggactgggagaggcagacccaccctcagcctgggtgggcaccgtcttatcagctgccagtgtgaaagcaggcatggaaagaacagacctgctgagtcttctggcctccatctttctcccatgctggaggcttcctgccctggaacatcagacatcaagttcttcagcttttggacacttggacttnnnnnnnnnnnnnnnnnnnnnnnnnnnnnnnnnnnnnnnnagactgaaggctacattattggcttccctacttttgaggtattgggacttggnnnnnnntcctgcttgcagacctattgtgggacttcatcttgtaattgtgtaagtca

SEQ ID NO: 7504 - DNA, 543 bp, Macaca Fascicularis
tttattattacataactgtcttaaaggaatgaatgctttacaaataatatgactttttacttgcttttagataattcataagcagagatgaagaaaatgagtcttacataggatacatcctggcacaagagtttagagtgaggagaactttggacaattcaagacagaaaggaatctagaccagaacagacaccattttactcaaacgtggctaagtcattcattcctaaattgaaagaatattagatgttcatacaaggttattttgtgttggtaagggattgagaaaacccaaattcctgccaatagaaaattggttaaaaaaataatggcaggccaggtgcggtggctcacgcctgtaatcctagctctttgggaggccgaggcaggcggatcatgaggtcaacagatcgagaccatcctggccaacatggtgaaacctgtctctagtaaaaatacaaaaattagccaggcgtgggggcacgtgcctgtagtcccagctacttgggaggacgaggctggaaaatggcatgatcctgggag

SEQ ID NO: 7505 - DNA, 692 bp, Macaca Fascicularis
  misc_feature (1)...(692): n = A,T,C or G
caannntagcaataggcagaaactgcagtactttacagaggtgcctcatttgagatggggcttgtttttacagcattagaaacttcaaaagaattatctttcatttttgaaccttttctaatagaaataggcagatctaaggagtaaaagtaacttctacaaaatgaattgaaatagattttttctgtctnnnnnnnnnnnnnnnnnnttgaaaaggactacatggagataactttttaatcacaccttgttttaaaacccctagcttagttaacatgtcatttgataagaggtgttgcttatgatctagagctagaaagttttcattcattttgaaatgatgcagtgnnnnnnnnnnnacagcatttagaataacattaaagnnnnnnnnnnnnnnnnnnnnnnnnnnnncctcaataaatttttgtctatgtaaccagcacccagatcaaaacacagaatacctcagacatactcatcctgctcccttctaagtacttaacatgccccagcccttgccctttccatgaggaaccactgtccagatttccttagtataggttggttttgcctcttttgatgctttatatatagatatacacacatacacatgtatatgtacacacactatatataatatatatatatgaaactgtataatgtgttcagtatctgactgcttttactcaaca

SEQ ID NO: 7506 - DNA, 2225 bp, Macaca Fascicularis
cgtatgatgcctggtcacagagaaggtatttgtaattgggattctcctggaccagcctagcctctgaagttctagaattaggtgcctcctttgcccaaaggctatcagctattggagggtagggtggcagtatgtcccccactgggtagctgtgaacattaactgacttcaccagtgtaaagtgcctggcacagggcctggcacagaggaagccagagtcaatgttgtctagtatcactttggaaggagaataagtctatgaaattgcattaaactcagcaggtgaagtcctaaggagtgtagtttctccaggggccacagaagaccctttgtgtctctatgagatgtcccagggcaacacggggcagaaaggtcttcctggtgagggctgttcaagtactaagtgacagtaccaggaggagtgcaaagccctggctcacaccactgatctactggcaagatgggtctggagaaggctcatctggcccagccagtggggggaacagctaccttggtgttaaacccaccccctcacctgccttttgtggtatagctggtgaccctaatcatcaggccattgcaacatagcatggaagatggtgcgaggtggcatgtggtccctggccttctccctgtactgccttgcaccatgggccatgtcctccaagcagcaccagttgagcagacttcagaagtggcttgagcccttataccatggttatgtcaaagggagtgggcctggggtggagggtaccctcatcatgggtggcagccattaactatttccttccctgcctagtcctggcataagtcctgctttcgatgtgccaagtgtggcaaaggccttgagtcaaccaccctggcagacaaggatggcgagatttactgcaaaggatgctatgctaaaaacttcgggcccaagggctttggttttgggcaaggagctggggccttggtccactctgagtgaggccaccatcacccaccatgccctgcccactcctgcgcttgtcatcgccattcccttcccagcagctttggagacctccgggttcatttctctcatgcctgccacatatcactaatgacttgaacttgggcatctggctccctttggtttgggggtctgcctgaggtcccaccccactaaaggactccccaggcctgggatctgacaccatcaccagtaggagacctcagtgttttgagtctaggtgagagcaggcccctctccccacacttcaccccacagagctctgttcttagcctcttgcgctgcacgtccaccatcagctggccaagacacctggggacacatcttggcgcccagaggagcagcagcaacaggctggagggagagggaagcaagacaaagatgaggaggggggaaggctgggtttcttagatcccagagattctcctctgtgggaaagaaggtgggtttcctggtgtccctcagagtaagcctgaggagtcccagcttagggagtcactaccgcaggcagagaggcaggcagcggggtcctaggagccgctgcttctccaggcctcttgcttagagactttgtggaagggatagcctcccactaggagtgggaggagaataacccaggtctaaggaccccaaagtcaggatgttatttgatcttctcagacatctagttccctgcttgatggagggatcctaatgaaatacctgaaacatacattggcatttatcaatggcccaaatcttcatttatctctggcttaaccctgggtcctaaggctgtggccagcagagcccaggccagggttctgttcttgccacacctgcttgatcctcagatgtggaggaaggtaggcatagcctcagtcttcatccaaacacccctttcctttgccctgtgacctcagaatcttccctttaacccaagaccctgcctcttccactccacccttctccagagactcttagatcacatcattccaccccttccaggccccaggttaggagtggtggtgggaggaagggaaagggctgggcctcactgctcccagcgactgaaaggacaacactatctggagccacccactgaaagggctgcaggcatgggctgtacccaagctgatttctcttctggtcaataaagctgtttagaccgaaaaaaaaaaaaaaaaaaaaaaaaaaaaaaaaaaaaaaaaaaaaaaaaaaaaaaaaaaaaaaaaaaaaaaaaaaaaaaaaa

SEQ ID NO: 7507 - DNA, 141 bp, Macaca Fascicularis
ggcggtcaggctcgcccccagagtagctgggcagagagaaaccaaccaaggtcagcacctccgtctgaagcatttggcacacaccttcaaaacacatcaaggctgcttccagtttcagaaaaaaaaaaaaaaaaagggcgg

SEQ ID NO: 7508 - DNA, 712 bp, Macaca Fascicularis
  misc_feature (1)...(712): n = A,T,C or G
ggtgggagtgagaccctcnnnnnnnnnnnnnctccagatgccagcaggaccctgcccacaattctgagtagccaagggcacctgagcctacctgtgtgctgcccaggcctgctgcctgtgctggtgagagggactggaacccacccttcagcctgggaccctgacctgcaccctccccgcccccatcccgnnnnnnnnnnnnnnnnnnnnnnnnnnnnnnnnnntcttggaccccagcctgtgccacccgtctccgaccccatgcaggctcaaagctgcccctcctctgtggtcactggcactaccnnnnnnnnnnnnnnnnnnnnnnnnnnnnnnnnnnnngcccccaccccgcgcccagattatgaacctcacccatcctgtggtccatggagggtcttaccccatagaaactgaggatggacnnnnnnnnnnnnnnnnnnnnnnnnnnnnnnnnnnctgctgtgaaaagagcctctgtaacaaggcagccacagcgcggcgcggcctttggnnnnnnnnnnnnnnnnnnnnnnnnnnnnnnnnnnnnnnnntcctttgggccctgctgtgagcccagcccaccctggcactgcccctggtgggtaaataggagcgcagggcagttgccctgtgcagccctcagctcctgccctgatgccctcgcctagctgcccagcagcccagagacccccctcacccagcagcctag

SEQ ID NO: 7509 - DNA, 425 bp, Macaca Fascicularis
  misc_feature (1)...(425): n = A,T,C or G
ctttccgcgccgccacaatggtgcgcatgaatgtcctggctgatgctctcaagagcatcaacaatgccgaaaagagaggcaaacgccaggtgcttattaggccgtgctccgnnnnnnnnnnnnnnnntctcactgtgatgatgaagcatggttacattggcgaatttgaaatcattgatgatcacagagctgggaaaattgttgtgaaccttacaggcaggctaaacaagtgtggagtgatcagccccagatttgatgtgcaactcaaagatctagaaaaatggcagaataacctgcttccatcccgccagtttggtttcnnnnnnnnnnnnnnnnnnnnnnnnnnnnnnnnnnnnnnnnnnnnnnnnnnnnnncacacaggagggaaaatcctgggattctttttctagggatgtaatacatac

SEQ ID NO: 7510 - DNA, 767 bp, Macaca Fascicularis
  misc_feature (1)...(767): n = A,T,C or G
atgaaagagatgaaagnnnnnnnnnnnnnnnnnnnnnnnnnnnnnnnnnngcttnnnnnnnnnnnnnnnnnnnnnnnnnnnnnnnnnnnnnnnnnnnnnnnnnnnnnnnnnnnnnnnnnnnnnnnnnnnnnnnnnnnnnnnnnnnnnnnnnnnnnnnnnnnnnnnnnnnnnnnnnnnnnnnnnnnnnnnnnnntcctctatactcnnnnnnnnnnnnnnnnnnnnnnnnnnnnnnnnnnnnnnnnnnnnnnnnnnnnnnnnnnnnnnnnnnnnnnnnnnnnnnnnnnnnnnnnnnnnnnnnnnnnnnnnnnnnnnnnnnnnnnnnnnnnnnnnnnnnnnnnnttgtctacccttcttccccagttattgttnnnnnnnnnnnnnnngcagaggcttcannnnnnnnnnnnnnnnaacttaccctctnnnnnnnnnnnnnnnnnnnnnnnnnnnnnngagtttggaataaaccataccttnnnnnnnnnnnnnnnnnnnnnnnnnnnnnnnngtgtagtgataagagatgcaagtaacatcagctctccttttcatgcttttccttcccagnnnnnnnnnnnnnnnntgatggggactggtaaatctgtgcctctgcctcctaggatttannnnnnnnnnnnnnnnnttacaaggggatctggatgacctgctgatggagatccagcttgccagggatttaggtttatcctgttttgtttgctactggttacaaattctattttctgtacaattagtcagactaaagt

SEQ ID NO: 7511 - DNA, 708 bp, Macaca Fascicularis
  misc_feature (1)...(708): n = A,T,C or G
ttatnnnnnnnnnnnnnnngggnnncnctcagatcccccgcgagggaggccgctggacnnancccgctgtcccccacgatagaagtctgtaaatacctnnnnnnnnnnnnnnnnnnnnnnnnnntgggtcacctctgatggccgccgtccactgagaatgtggacagtgtccaaattcctgtactgtaatgactaaaaggcgttttctctgagactgacaaggcagaaacttccatgtgtctcctgccaggctctgtccccctacgccatcccaacatgtccccattcccccgaaacctggctcagtgcaatactcccgttgccatgnnnnnnnnnnncatggtactgtctccacagcccctcagtccccaccccaggataggcgcccaccacctcctcctcgtctccggtggtcaatcgctcttcctgtccccaccccagtcccatttttatggctgagctgattctgaaacaaaacgaaactgcaaacctcgtgtgtcttaactccccccggggattccactgcattcctctgccctgtggtctggtgcgtgacaatccaaagcgccgcgcctcgtggccgagacgagggtgctgtgtccctcaaacccagagccgtgggcgcctctgaaaccatacagccactcctggccccaaannnnnnnnnnnngcagcccaggttccccgcccacccatccccaccacacc

SEQ ID NO: 7512 - DNA, 737 bp, Macaca Fascicularis
  misc_feature (1)...(737): n = A,T,C or G
agttaaccagcnnnncagaatacgccagtcgcatgcaggccggcacccgcaacatctactacctgtgcgcccccaaccggcacctggcagagcactcgccnnnnnnnnnnnnnnnnnnnnngaaagacacagaggttctnnnnnnnnnnnnnnnnnnnnnnnnnnnnnnnnnnnnnnnncttcnnnnnnnnnnnnnnnnnnnnnnnnnnnnnntggagacggannnnnnnnnnnnnnnnnnnnnnnnngagaagtttgaggacgggtccccagctgccgagcgcctgtcagaggaggagacggaggagctcatggcnnnnnnnnnnnnnnnnnnnnnnnnnnnnnncaccaacgtgaaggtgacactccgactggacannnnnnnnnnnnnnnnnnnnnnnnnngagatgggnnnnnnnnnnnnnnnnnnnnnnnnnnnnnnnnnnnnnnnnncccaggaggagcgtgcacagctccnnnnnnnnnnnnnnnngatcaaccccaggcatgnnnnnnnnnnnnnnnnnnnnnnnnnncgggcaagcgagcctggcctggnnnnnnnnnnnnnnnnnnnnnnnnncgagaannnnnnnnnnnnnnntgggcttgttgacgaccctagggccatggtgggccgcttgaatgagctgcttgtcaaggccctggagcgacactgacagccgggggccagaaggatnnnnnnnnnnnnnnncagccccgccgccttgagcttt

SEQ ID NO: 7513 - DNA, 707 bp, Macaca Fascicularis
  misc_feature (1)...(707): n = A,T,C or G
agccagctggctgctgtgccaaagcgtgttcagagttaataataatcattagctgaatggtgctggagcctttcagcttcagatctctaagcacttgcaggctgagtcagtcagnnnnnnnnnnnnnnnnnnnnnnnnnnnnnnnngtgtaacagaatggggaggcactgtggaaggatgtcaggaannnnnnngctagccatgccttgcactnncgtctgggagtgggcactgtgtcctctcagtgaactaataagacnnnnnnnnnnnnnnngtcaagatatgtagggaacacagtatatgctaggctgagacctatggtggtggcagggatggctgctgagcctannnnnnnnnnnncctggccttccttctgtttacctgtcttggcctccagggggcacccctggtcttgatgcctcaaacccagcnnnnnnnnnnnnnnnnnnnnnnnnnnnnnngcagggaggcttctggtagtgctcctgatgctcctgtgtctggttggcacaaagaccctgtgtaacatgaaatgaaaggtgcatcggcttgggggcnnnnnnnnnnncagtatgggtttactccgtccctatcactagcgtggctgtgggcaaaccacttattgcctgacctacctcacagggatgttgtgaggatttgatgagacaatgaatgttaataggaattggaaaatcaaagcataaaca

SEQ ID NO: 7514 - DNA, 712 bp, Macaca Fascicularis
  misc_feature (1)...(712): n = A,T,C or G
gagcccgagcccagcccgtgggggccgctggacgacgtgcgcttcctcatcgcctgcacttcctggtactgacggcgtcttccggaggatgccgcccgtctgtctgccgtcccctgtggttcttgcttgccttgtctcctctccccacgtccctgcgtctcttacacccccttccacccgaggctccccagagatagcagagaattcgaagaggtcgccagggactggaaagaagtcccggccgggccgccttcgcggcctacagcccagcctgcacccagacccagctcagaccttcgtgttcaccccatccctttctccggctggctgggtcgggggcatccctctctgtcgctggcttccagaggcagggcaggcctcctgataagcccgtaaagctgctcatctcctgacttcgtctgccttttattaatatcttaattgctgatagccgtgctcttgactgtgtgtctccggtcatggcaccaggggccttgactttggagaagcccttgccacagtgaccctccccatactcnnnnnnnnnnnnnnnnnccatcctggatcctcannnnnnnnntggcagaccagatgcgtgaggcagctcccagacaccccagaggaccccggttctcctcccggagcttaagattacttttggaacctgatctttgttccctcatcccagggaaatnnnnnnnnntgtatttct

SEQ ID NO: 7515 - DNA, 763 bp, Macaca Fascicularis
  misc_feature (1)...(763): n = A,T,C or G
catgcacatcgccatacgccacacaccnnnctgnnnnnnnnnnnnnnnnnnntgccttaatgcatgtggacaggaactccctgaggtcaccccgtgccccctggctctgccaggtacggacgccctggaccctgcctccaggtggggtgggcgaggggcccaagggatgggctccagagacaagtgcagggcaggaggggnnnnnnnnnnnnnnnnnnnnnnnnggcccccagagcgggcggtcccgctggacgccatccctctgcctgggatccactcagccctcgcgcgcccgccacgcccgcgccccatgccattgcagtctgccatcctctggccgtgccggtggctgcagcttccccatttgcgccgttgcctctggctgtctgcacttttgttcatgctccaaagaatatttcataatgccttcagtaccgacgtacacttctgaccattttgtatgtgtccnnnnnnnnnnnnnnnnnggcctttttttggtggatgtgttaccccgcacacttcaatctcaactttgtgcaccgtccgttttctagggatagacgcccagggaatgaactctagttttnnnnnnnnnnnnnnnngatattaacttacacggacannnnnnnnnnnnnnncacaagaatgcgccagtgcgggtttgtgggggacgtcgggtgtggggtcctgcggccaggagggcggtggaaggttctggggatccctgctgccacggggacgagttcggacgnnnaggtggacct

SEQ ID NO: 7516 - DNA, 729 bp, Macaca Fascicularis
  misc_feature (1)...(729): n = A,T,C or G
caaagtgctgggcttacaggcgtgnnnnnnnnnnnnnnnnnnnnttggattttcagtagagacgaggtttcgccacgtgggccaggctgctcttgaactcctgacctcaggtgacccacctgtcnnnnnnnnnnnnnnnnnnnnnnnnnncaggagggtggggagtccgggagctcggatgcaggaaccacaggaggccccggctgctcgctgctgccaccatgaggccaacgcccggccaatacttatttttaatcattcaatttgcaatttnnnnnnnnnnnnnnnnnnnnnnnnnnnntatttagttttaatcgtgcaatnnnnnnnnnnnnnnnnnnnnnnnnnnnntttcaaagtgtgcactggaatggcgtttagtgcaatcacaatttggcaggatttttatttttatttttattnnnnnnnnnnnnnnnnnnnnnnnnnnnnnnnnnnnnnnnnnnnnnnnnnnnnnnnnnnnnnnnnnnnnnnnnnnnnnnnnnnnnnnnnnnnnnnnnnnnnnnnnnnnnnnnnnnnnnnnnnnnnnnnnnnnnnnnnnnnnnnnnnnnnnnnnnnnnnntggccctgcaacctgttttatcagcaggatctttgggacctgtatccgtgtcaacctcttatgtggtcctatgactgggaagcccaggaaagtagcccaagaaggagcggctccggtttgaacgcctctgacattagcagctactgttg

SEQ ID NO: 7517 - DNA, 2669 bp, Macaca Fascicularis
aaaaacaaggttagtcggcagcacagcggcagcacagcggcagcagcagccaccaaagtgggggctgaaagggaagagaacttagatttgacctgtgcaaggaccacagaggagcctagacacagcccactgctgagatgaagggagaagctggacatatgctacacaatgaaaagtcaaagcaggagggatacatctggggctctatgaggaggacagctttcatcctgggctctggacttctctcatttgtggccttctggaactcagtgacatggcatcttcagagattttggggtgcttctggctacttttggcaagcccagtgggagaggctgctgactacatttgaagggaaggagtggatcctcttctttataggtgccatccaagtaccttgtctgttcttctggagcttcaatgggcttctactggtggttgacacaacaggaaaacctaacttcatctctcgctaccgaattcaggtcggcaagaatgaacctgtggatcctgtgaaactgcgccagtctatccgcacagttcttttcaaccagtgcatggtatctttccccatggtggtcttcctctatcccttcctcaaatggtggggagacccctgccgccgtgagctacccaccttccactggttcctcctggagctggccatcttcacgctgattgaggaagtcttgttctactattcacaccggctccttcaccacccaacattctacaagaaaatccacaagaaacaccatgagtggacagctcccattggcgtgatctctctctatgcccatcctatagagcatgtggtctccaacatgctacctgcgatagtgggcccattagtaatgggctcccacttgtcctccatcaccatgtggttttccttggccctcatcatcaccaccatctcccactgtggctaccaccttcctttcctgccttcgcctgaattccacgactaccaccatctcaagttcaaccagtgctatggtgtgctgggtgtgctggaccacctccatgggactgacatcatgttcaagcagaccaaggcctacgagagacatgtcctcctgctgggcttcaccccgctctctgagagcatcccagactccccaaagaggatgcagtgagagagagcctaagtgtcatcctggctgtccctcagccatgggatacagatgcggcttcctgattgctcctaacaatttgcctccttcggccacatcccaaatgatggtgccaccagggtagagggaaggtgggcttcccagaaaagcagggctaaggatgaggcttcctccaaactactgcccttgatgtccctcaatgggatcaggagttagcttaagaaaaaggaaaacacagctccccagactggaggctggtcagagggaggatacccctggtcctctgctgtggaaggagaggggttcagccccagataactcctttgtggcctgggcaggatgcagaaaatgacaaagctgaaaggagggggactggaggctgcctggattaaaagcaaagaggtacagaccaaactttaacacctttagccttatgtggaaaccaaaaaccaactgctgagaaactgtgaaaatcccttttacccacaaggggaaggatcaaaattgctgccctttggggacacccgagacccctaattagcccatctgaatgaggaccagaggttagaaccctctttctccctgaagaaagagcctggaaaaacatggcggagcaaaggacaaaatcctttctgccccgaatgctttaccactttctcagcaacgtttattcaaaacgatttttaccaggaaccttatcaaaagcaaaaaccacagctgcttgggttgaagtccccatcctggcctcccctcagctgccagacatggccagaaaccctgtggttcccaagaacaatttaaagatcactctttgatttgaaagaccaccattatcattttactaaattcttatatatatttgcaccttttccaactttcagttctcttaagaaaaacatccactgtagctttataaaataccttatcatcagacaggtccaagtctccaggcaggactatcaaaatgaactccttcctatcagctctagaaccccagaggacttgcccaataggccagctaagcacttaccagacagcatctccctggctttccagtctcgcctgcctgtctctggccttggtggacctggctccctccctaggaggcttgtgccctcagcttgagtacagctcctggtgcatcaaagctgtaagttctcagctgctggcctgcacccatcacctcttcctacaaataaacatttggaaaaaagtccatcttcagtatgcttaaagagaagggtaggagataaggagaaagaacagatatgcttttttttccctttaaggccttcagattttgaggtactgtaaggggcctagaaagacaaaaggctgtcattccctcttccttttggaaggcaggtgatcagaccttggcagaagggcccagccctgtccttttctatatcaaacaaaatccttgaggttggtatacaagttaaggctgaaaaaaggccttaaattcccagtaaagaacgtgaaagcaagcatgtaaaataaactggtcttcatgaaaaaaaaaaaaaaaaa

SEQ ID NO: 7518 - DNA, 747 bp, Macaca Fascicularis
  misc_feature (1)...(747): n = A,T,C or G
ctggagctagcttggccctaccattctggggccgtttccaccacagttggggctctccggcctttannnnnnnnnnnnnnnnnnnnnnnnnnnnnnnnnnnnnnnnnnnnnnnnntgcggccccnnnnnnnnnnnnnnnnnnnnnnnnnnnnnnnnnnnnnnnnnnnnnnnnnnnnnntgtccggagccagctcactgtcttccnnnnnnnnnnnnnnnnnnnnaggcnnnnnnnnnnnnnnnnnnnnnnnnnnnnnnnnnnnnnnnnnnnnnnnnnnnnnnnnnnnnnnnnnnnnnnnnnnnnnnnnnnnnggcggagggcgnnnnnnnnnnnnnnnnnnnnnnnnnnnnnnnnnnnnnnnnnnnnnnnnnnnnnnnnnnnnnnnnnnnnnnnnnnnnnnnctgtggccnnnnnnnnnnnnnnnnnnnnnnnnnnnnnnngccttagtgcccgggatgggcacagtattttgaagggaggtgggagctcttgctctcctggtcactgcagaatgacagagaaggtgaagctccgggcatgtgtgcgcgggtgtgtgtgcgctcagggtctctgtttaagtattagctaaacatgtgcctcctccgtgtnnnnnnnnnnnnnnnnnnnnnnngctacagtgtccctgattcttggaaaagcctggagaaacgggggagatgcaattcacaatgccttggtataggaggctgtgttgagctgacattcaaatgnnnctctaataataa

SEQ ID NO: 7519 - DNA, 758 bp, Macaca Fascicularis
  misc_feature (1)...(758): n = A,T,C or G
ctcgggaaaagagccatagtcagctggagggnnnacatttggannnnnnnngaaaaacttgagggtttggggttcaaagtcagcccatcccacctggcaanntcttcctggaaggaggtccttcaagagcgtaccagctgaatgtcatgaagaagtatctctgaatgtatccagcagaggaaactgcatacccaaaggggtgaccagccctcagatgtgcttattggattccagtacaaatgccaccaaagccagcccactgctctcctacgaggaaggaaagacctgcacgtgtaaaacatggggcagccttggaacatggtgttttttggagtttcctttctcacagttttccatctccccacttctttgatcagtcatgtgtctgtgacctcattccatgacatcaggatagctgtgtttgcatgccatgctccatgttcatttggagccaggagaggttctcagtggagcctggcttagggaacagggagcgatggaagaatgccaacattagagttggtcgtctcttgtcaggaatgaaggatgcttgcacacatgcaccccctcactctcacacttgcacacacatacacacacgaaatggttggtttgtcaaaactcactgtagtacataaagcttgcactctgcgtcctatatctagcagcatggggtaagttnggnagnnnnccccattagggggtaaataatttatgaccattcatctgtttttatgaatttttttatctagacaata

SEQ ID NO: 7520 - DNA, 705 bp, Macaca Fascicularis
  misc_feature (1)...(705): n = A,T,C or G
cacagagagaggnnntttttnnnttgagagtttcgctcttgtgaccaggatgaagtacagtggtgcgatannggctcannntaacatctgcannttgggttcaagtgattctcctgcctcagcctcccgaatagctgnnnnnnnnnnncccaccaccatgccagctgattnnnnnnnnnnnnnnnnnnnnnnnnnnnnnnnnnnnnnnnnnnnnnnnnnnnnnnnnnnnnnnnnnnnnnnnnnnnnnnnnnnnnnnnnnnnnnnnnnnnnnnnnnnnnnnnnnnnnnnnnnntgtgcccagccagagaaaggttttaaatatatgtttactttaatattaagttgtaacataactttcatattattgaaaagctcttcaatctaggatcacatcacttcagtttcagaaacatattgaggtggggaatttgtattaggtttctctaaagggacagaaacaataagatagatgtatatacgaaggggagtttattaggagaattgactcacacgatcacaaggtgaagtcccacaataggctgtctgcaagttgaggagcagagaagccagttcgagtcccaaaaccccaacagtaatccattcctaacgtcaggatgcatattgacttgtgtgtgacatttgccacgcagagcgtgcactgctgaggagaatggtgcccaagaaggacactgtgacccaaaaatc

SEQ ID NO: 7521 - DNA, 662 bp, Macaca Fascicularis
  misc_feature (1)...(662): n = A,T,C or G
aggcccccccaaaaccaaagtcccctcaagttcaggagtcccagcctgtgcccccaacttcctacccacctggccccgagcatccgcacacagagaaggaacaagcaaaggctccggggggacaggatggggcagggcatacagtggggggtcgggggtcagcaggaaggagggaggaacaaaacattttcctttgggtttttttttttttttcattttttttttctttctttatttttttaaaccctccttactctttgggtggtgttgcttttcctttccttttccctttgagattttttgttgttgttgtttccattttgtattttactgannnnnnnnnnnnnnnntactctccttctagctttctgcttaccgcacaccggataacacacatgtacacacccacaaaaatgctcatgaacccaatccggagaaggttccggctgggtcccccgccctccccacgtcctgctactcctcctgacggtgaggacaggagggggacaaggggacacctgggcagacccgccggctctccccaccccgccccacccctcacatcatactccaatcataaccttgtatattatgcagccattttggttttcgcggacgcgcctacctaagtaccatttacagaaagtgactctggctgtcat

SEQ ID NO: 7522 - DNA, 733 bp, Macaca Fascicularis
  misc_feature (1)...(733): n = A,T,C or G
caggtgagcagagagaaactcggtcccgggaggaacgggcgggaagaaatcggaaccctcnnnnnnnnnnnnnnnnnnnnnnntgtagcacttttttttccntccattctgaggcctagaggtgttagtatgagtttctttgtgttgattgtttgacagagaggagaatttgctaagtcagatttcttgtctgccaatatatagatatttagaacctttaactaagacatcaccccaccccccatccctacgtttaagaaactagtagtcataagctctccaggtgggaagggctcctgggattctaatgttcacttgagaaagcccagccaaagttttgtccacccataaatgtccaactctcttccactggatgttgcccttacagctttagaaggtcccaaattgaccttcaagagtcatctcctgttagctccatttctnnnnnnnnnnnnnnnnttcaggcgagtccctagtgcaaggaaggctggaagcacaggggcctgggagggatatccatgtagtcctgctggtctccactggcctctttaagcaacttttgctgggagnnnnnnnnnaagtctagctcttatatcttgcccatagctaagaggcatccctcccctttccccatttgtaaacagccctatatgcttgggttttgtgttttgtttcattttctcttaggcaacaaaatgtatgttcacccagagtctcctaatactggtcccac

SEQ ID NO: 7523 - DNA, 745 bp, Macaca Fascicularis
  misc_feature (1)...(745): n = A,T,C or G
atagaccagtnggcagatagccagttgaatactctgtgcatggtttgatcctttattagttcactctaatattttctgtagatccttttgtcctggactcagaatcnnnnnnnnnnnnnnnnnnnnnncgtcgctctcctaaggtttgtgtttccttcaaaatgttttagttgtcttcaactaaatttgatttttgctgttggacatgacatatttttatggcatacactatgttacttttttctcctacaaatcaattgtttgaactttggtgagaaagaacatatccacaaattgcataaaagtataaaaacagtactgtagacttttttttaacccttagaattaccagtacaataatgtagtggagtgggaagagtgcctagaatcannnnnnnnnnnnnnngctgaatttagctgtgtgacctcatgcaagccatttaaactctctgtgcctcagctgcctcatttttaaaaggaggtttgaactctctgtttacttccaactctgatcctgggattctaatccacaggacgtgggcgttagggtggaacctagaactgtgctgtccagtgcggtagccactagccacatgtggctgctgagtacttgcagtgtggctagcacaaagtgaggtgtgnnnnnnnnnnnagatacataccagattttgaagactagtattaccaaaagaatgtaaaatatcacattaataattttatattaattacatgttcaaatgatatt

SEQ ID NO: 7524 - DNA, 755 bp, Macaca Fascicularis
  misc_feature (1)...(755): n = A,T,C or G
acagaccnnnnnnnnnnnnnnnnnnnnnnnnnnnnnnnnnnnnnnnnnnnnnnnnnnnnnnnnnnnnnnnnnnnnttccccgccccttccctnnnnnnnnnnnnnnnnnnnngggctcctcttttccnnnnnnnnnnnnnnnnnctcctccagccccctttcggcctcctcttcctgcatccccaccgcttgaagtccccttcccttcnnnnnnnnnnntgcatcccctacctnnnnnnnnnnnnnnnnnnnnnnnnnnnnnnnnnnnnnnnnnnnnnnnnnnnnnnnnnnnnnnnnnnnnnnnnnnnnnnnnnnnnagcggcttccgagacagtgtccctatccagggtatnnnnnnnnnnnnnnnnnnnnnnnnnnnttggccgagacctgagtggcttccctgcacctcctggagacgagcctcctgcttgaaccacctgaactgtcatcacacggcaaccccagccccagcctcagccctgccccctttccctccttcctggagtggtggctacagaagcttggggccaatcctggctcctctttccccagcttctgtttatctcactgtcttccctcccctcccccagctgaggtgtggcccccaggcctggtgctgccttggagggctgggggaagtagctgtggaggagggaggagggtggagactgaggctaggtgccagaatggactggagtgaaggcatgtctagagtgtgggcaggctgttgtgctgggaagctgggacacgtg

SEQ ID NO: 7525 - DNA, 745 bp, Macaca Fascicularis
  misc_feature (1)...(745): n = A,T,C or G
cagactcacacagccagtcagggtaatatttgagtccaagatgcggttgacactcgagtnntacagcattcttcatgtgtgtgcatttgcatgcatacttagatccctgtgaagtggaaatggatttgtggtattcttctatttgcaaacccagataaccttaaagggctaaagagattttgctctgattatttagaaagattgacctttataatacccagtgtaggactgtctctctcaaagacatcattgagaagagtggggcaggcaatagcaaacatctggtcagttatgaagatgcatgatctcccgaatgttcgtgatgtgcttttaaaccacatacagatctttgttaaatggcaaatgtgaagagattgtaaaaggcaaaaacgtttgttactgaaaattagaaaagactannnnnnnnnnnnnnnnnnnnnnnnnntttgaaagtagcttgattctctgtagatttttctctagctgaaagtgtaatcaagtagagggttttatgactagaaacttgttttcatgttcaacggtaaatatttactaaagtcagattacatacacatttacagtgtcatgacttaaattatttatgcattcccatttttcccttatgtcatctgtatgattgttctttctgctgttttcctcatatttctagaaatgtttgacatttcatctacatttttttctgtcagaatgtggggtgcttgaaatagagtggatgagttgtata

SEQ ID NO: 7526 - DNA, 741 bp, Macaca Fascicularis
  misc_feature (1)...(741): n = A,T,C or G
gacagnnntgacgtgagtgantnntggacnnncatgcagatggacaacgtgcgtgtgttngctgggnnnnnnntcgggnnnctggtggaccctggccctgttctgctggatcagtgaccgagctttctgnnnnnnnnnnnnnnccttcaacttcccnnnnnnnnnnnnnnnnnnnnaagcccctgctaatggggaggtggctggggacaggtgtgtttgcgcttgctgttgggctctnnnnnnnnnnnnnnnnnnnnnnnnntgtcctgggggttgctggcttccttctctcctcaggtggactgtcagatggttcagaagccactgaaagttcactttgtaaaaagctgaatnnnnnnnnnnnnnnnnnnnnnnnnnnnncaaaaggcctgattgtcatgcttaggtctgcagtttcttacctctaactccatcattaaagcctaaaggagcttgagaactgaacctgtaacctgagctctagctaggtgttaggggaggggagaggtaggggaaagctggggaaagaggtgatgtgagggctgggagtgtcctcagtaggaaccccacctttagggtctgagtgaccaagtgaaaggaggggccgcacaggccatttagggacattctcttccnnnnnnnnnnnnnnnnnnnnnnnnagaccagagagctaaagtgaattgtttaatatcacccacctgtttctgtagaaaacagccttggagttcaataatagcaagt

SEQ ID NO: 7527 - DNA, 710 bp, Macaca Fascicularis
  misc_feature (1)...(710): n = A,T,C or G
agcgnnnngctgnnnntgnnnnnaggggctggcctggcctggtgttgctaccgactcccaggagcccatctgcagcgatgcagctggggctgcaggagggaccctgcgtgcagtgggcccaaggatggcccacacagggaccaccccctgggcggcgttcaccccatggagttgggacccacagccactggacagccctgggccctgggccccgagaactctcatgagcccagcagccaccctgagaagcctgtggcccgcagtcccgcctgacccccaaggtggttcctcagcctccaccaacaatcccagtgctgcacctgaagttctggagctcagagtctgacagcctctcccccattctgtgtatgggagaggacagagggaaccatttaagaaaagataccaaagtagaagtcagaagaaagacacgttggctaagcatgnnnnnnnnnnnnnnnnnnnnnnnnnnnnnnnnnnnnnnnnnnnnnnnnnnnnnnnnnnnnnnnnnnnnnnnnnnnnnnnnnnnnnnnnnnnnnnnnnnnnnnnnnnnnnnnnnnnnnnnnnnnnnnnnnnnnnnnnnnnnnnnnnnnnnnnnnnnnnnnnnnnnnnnnnnnnnnnnnnnnnnnnnnnnnnnnnnnnnnagttcaacactgcagtgagctatgatgacaccactgcactccagcctggggacagagnnnnnnncc

SEQ ID NO: 7528 - DNA, 696 bp, Macaca Fascicularis
  misc_feature (1)...(696): n = A,T,C or G
tcagaaagtcgagcttggaggccagcctggatctgtctctcccttccccgcctgggaccattctacctgtgttctttgaccctcagagcagggacaggcaagacatctggcaagcctgcagcnnnnnnnnnnnnnnnnnnnngtgaccatgtaactcagannnnnnnnnnnnnnggagggtgggctcgtgggccatgctctgcccctgtctgctgctcccagtctcttnnnnnnnnnnnnnnnnnnnnnnnggtgnnnnnnnnnnnnnnnntcaggcccggtttgagatgggcagacccagggtggagtggggtccaggtcaggtgtggactttcctcactatcaatagagcctagaagctagatgggtgccaggtgggggtcaggttcccagaggactgagggaatcctgcacaggatgtcccagggtaggtggggagcagggttgggacccgctttgacagctggacacgtgagctcctggatgagtatggtagggtgtttgaaggattccctgccacctcccaaatccaggccagaccccctgtggcttggagagcattccaagcccccaccccacccctagaactggcattcccaagacctctgtctcccacccagccacccttggaacgtgcctcttgtcctgctggaaggacagcagtgttctcctgacctcgccctactgcatgcagtc

SEQ ID NO: 7529 - DNA, 768 bp, Macaca Fascicularis
  misc_feature (1)...(768): n = A,T,C or G
actgaggcagccagatcacctgaggtcaggagttgagaccagcctggtcaacnnnnnnnnnnnnnnnnnnnnngtagctgggtgtggtggtgcatgcctgtaatcccacctacttgggaagctgaggcaggagaatcacttaacctgggaggcggaggttgcagtgagccaaggtcatgccattgcactacagcctgggcaacaagagtgaaactccctctcaaaaaaaaaaaatgtttttcatttttttcatgttatctatccaagcactgtcccatggtcagcaagtcctattttannnnntggattttccaaaataattattgaatacagctattctatggttacttttagtgtttttgtggtatgtggtgtgggagtgtttatggaattaccagtatcttaaattttcaaaggaaccttggaagtctgtcactctaaatgaaagtctgtcactctacatgaattatgtgctcaannnnnnnnnnnnnnntttaagacacaaaacagtaatttgaagaaggaaaaatgaagagtttaaagttcaatgggttaaatttttgttcttgcaatagtaaatttagttttatatttctaaatgtgtgaagattgctttgttaaaagcaaaagtggtcgtgtgatatgctaaatgttaattactgtttttatatgtttaaatcatgccaaacaaatcatgtctgtgccatccagggtctattgttaatctttttctgagtacttggattgggataaagggcttgtactatg

SEQ ID NO: 7530 - DNA, 695 bp, Macaca Fascicularis
  misc_feature (1)...(695): n = A,T,C or G
agccatgccagcnnggtgnnnnnnnccnnnnntcacattggggtacggatggggcgaagttaggggagaaaattatggggtctttccagccacagggcagagggaggtggaggagctgggctgcttctccctgcagtattagtgtcccccagggcaggggaccttttccacattacatcactgccccatcccaccttacaccactctggcccctctgcttggtccccttnnnnnnnnnnnnnnnnnnaatcccaggggccnnnnnnnnagaggcatttcctgtccctgtctcctcctgcatctcctttatcctgcactgccacaccctattccccattctgtgatggactttgaaggccccaagcccagccaaagcactgagttcccccttaagacacctctacaccctccctacaagcaaagcacaaattttggggtccatgtagcatgnnnnnnnnnnnnnnnnnnnnnnnnnnnnngggcccagcctcatcatacccaccgagcagctgccagcctgggctgagcgtgggcatgaggcaggggtcagcacttgggcctagggatgtgaggttttctgtgcaccaagtttgtgggaagnnnnnnnnnnnnnnnnnnnccacagacacagtcagctggcaaaagggaggtctaccccagcagagagatgaggacatttggcttctccttcatgc

SEQ ID NO: 7531 - DNA, 306 bp, Macaca Fascicularis
  misc_feature (1)...(306): n = A,T,C or G
tgactcggggctgtcccagagtctactgcgcgtgcggctgggagataagcaatgcacacaggaaaaagctaacactgggcagctgacgtgtgtggaatgaaaggagcagcagtgccctgtgagagctcagaggagagaggtcacctccagcccaggtacctggacacatggatcccactggccattcatgtgcagtcaaggaaacagaaatatctaacagtgatttcactgaactgagtcaacaagtttggccagaccataagattcacacagganaggaaggaacaagaaggaaggagggtggcc

SEQ ID NO: 7532 - DNA, 763 bp, Macaca Fascicularis
  misc_feature (1)...(763): n = A,T,C or G
caccacctgnntgcgcttcccgggccagctcaatgacctncgnnagctggctgtgaacatggtcccattcccccgcctgcacttcttcatgcccggctttgccccgctgaccagccggggcagccagcagtaccgggccnnnnnnnnnnnnnngctcacccagcagatgtttgatgccaagaacatgatggctgcttgtgacccccgccatggccgctacctgacggttgctgccgtgttcaggggccgcatgtccatgaaggaggtggacgagcaaatgcttaatgtccaaannnnnnnnnnnnnnnnnnnnnnnnnntggatccccaacaatgtgaaaacagctgtctgtgacatcccgccccgggggctaannnnnnnnnnnnnnnnnnnnnnnnnnnnnnnnnncatccaggagctgttcaagcgcatctccgagcagttcacggccatgttccggcgcaaggccttcctgcactggtacacgggcgagggcatggacgagatggagttcaccgaggctgagagcaacatgaacgacctggtgtctgagtaccagcagtaccaggacgccacggccgaggaggagggcgagttcgaggaggaggctgaggaggaggtggcctagagccttcagtcaccggggaaagcagagaggcagtgcgaactctttattccctcccagcctgtcctgtggcctgtcccgctgtgtgtgcacttctgttttccctgtcctcatcccatgctgtacagacaccaccat

SEQ ID NO: 7533 - DNA, 739 bp, Macaca Fascicularis
  misc_feature (1)...(739): n = A,T,C or G
tccattgcactccttacggagccagctgagccctcannncntccctgttctggcctgtcacnnnnnnnnnnnatgtnnnnnnnnnnnnnnnnnnnnnnnnnnnnnnnnnnnnnnnaagatttggaaatggataggaaagaagtcttnnnnnnnnnnnnnnnnnntcaggagcactttacccacaagaagggggaagggtagattataaaatgcctaaagaggtggaaagagatccaggttactaacccaggactgtaaggtgtctcggaacctcctaggtatccccattattagagannnnnnnnnnnnnnnnnnnnnnnnnnnnnnnnnnnnncagagaaccaggcccaggcaccaggaaaaagaaatagggactgtgaagcnnnnnnnnnnnnnnnnnnnnnnnnnnnnnnnnnnnntttaagtgaagaaagtggagttgtgagtgatnnnnnnnnnnnnnnnnnacaaaattccttacaaaaggggtggtgctcagcaccccaaaatcnnnnnnnnnnnnnnnnnnnnnnggnnnnnnnnnnnnnnnnnnnnnnnnnnnnnnnnnnnnnnnnnnnnnnnnnnnnnnnnnnnnnnnnnnnnnnnnnnnnnnnnnnnnnnnnnnnnnnnnnnnnnggagggctaggccgggcgcggtggctcaagccnnnnnnnnnnnnnnnnnnnnnnnnnnnnnnnnntggatcacgaggtcagnnnnnnnnnnnnnnnnnngcta

SEQ ID NO: 7534 - DNA, 687 bp, Macaca Fascicularis
  misc_feature (1)...(687): n = A,T,C or G
ccgccatgcacannntgnnnnnnngggccaataccagccggcgcggcntnnnncttttcatggacgacgcggacgccttcctttcgaagccagccactgaggagataaacgagnnnnnnnnagccacccagaacgccttcctaaaccacatgaaggatcgcagcaacaaattcatgatggtcctgaccagccgccaccccgagcagttacactgggacatccacgaccacatcgatgtgatggttcacttcgacctgcccaggctggaggaaaaggagcgcctggtgagaatgtatcttgacaagtatgttcttatcccggcnnnnnnnnnnnnnnnnnnnnnnnnnnnnnnnnnnnttgactatgggaggaagtnnnnnnnnnnnnnnnnnnnnnnnnnnnacatgtcgggccgggagatcgcacagctggttnnnnnnnnnnnnnnnnnnnngtatgcctccgacgatggagtcctcaccgaggccatgttggatgcccgtgttgaagactttgtccagcagcaccagcagacaaatgcgctggctgaagagggaggggcctggnnnnnnnnnnnnnnncccctaatcctgagtccacagtgagaccacaactcacggagcctggccgtggacccctcccacccctgcctttccggccctgcacatttaggaaatgctcccccta

SEQ ID NO: 7535 - DNA, 749 bp, Macaca Fascicularis
  misc_feature (1)...(749): n = A,T,C or G
cagacataggacagagtgnnnctnnnnnnnnnnnnnnnnnnnnnnnnnnnnnnnnnnnnnnnnnnnnnnnnnnnnnnnnnnnnnnnnnnnnnnnnnnnnnnnnnnnnnnntacctgataaccagagcaaggaaagaaagtgctagaaggtgggnnnnnnnnnnnnnnnngctgagatccaggaagtctggagtcgagcaagagattcttgatnnnnnnnnnnnnnnnnnnnnntgttgctggnnnnnnnnnnnnnnnnnnnnnnnnnnnnnnnnaaggacacaaagatacannnnnnnnnnnnnnncctttcccccccccgatgttgctaaactctttgttctgctttctaatctgcacgtaccagaggtttcgtaagttctgtaagtacatgtttttctttctgaggccaggtcacaaggaatgtttaagtaagnnnnnnnnnnnnnnnggtgtgtttaagcaagatnnnnnnnnnnnnnnnnnnnnnnnnnncgcaatataattaactgcctttgtgtaaaactnnnnnnnnnnnnnnngggttgtannnnnnnnnnnnnnnnnnnnnnnnnnnnnnnnnnnnnnnnnnnnnnnnnnnnnnnnnnnnnnnnnnnnnnnnnnnnnnnnnnnnnnnnnnnnnnnnnnnnnnnnnnnnnnnnnnnnnnnaacattgttcggagctcagtgggggagctctcctgcccgtctcgtttcacgagcaagtgagagctccaggttcgaacctgt

SEQ ID NO: 7536 - DNA, 200 bp, Macaca Fascicularis
ccagaccaggaatttggatttggcgtcggcccagtttggttcccctaaactccctctatcccaacctggctccctcccacccaaccaactttccccccaacccggaaacagacaagcaacccaaactgaaccctttcaaaagccaaaaaatgggagccaatttcacatggactttggaaaatattttttttcattggcat

SEQ ID NO: 7537 - DNA, 742 bp, Macaca Fascicularis
  misc_feature (1)...(742): n = A,T,C or G
agctataagagagnnncataggggccctgtttcctgggcatgtgccccnnctgccagccaacccccacgtgcccaagtcactggtgcaataactttactgccttcgtcagagcagagaaattgggaattgtgttaggtgggtgtaggcagctctgctgagccaagcagacacgggtgccccctcctctgggaggaggggagtgctcccaggcctcgggtccagacagagaccgccaaagcctgactgccaacagaaaccctctcctagtgaggggcaggtgggggcaccccaggtccccacacccacagggaggcttcacacaccgcctagtgccggggatgccaggaggcaggcccctctgctgcggcccaggtggtgagggtgcccaggcctctgctgctgccaccnnnnnnnnnnnnnnnnnnnnnnnnaggccaggaggagcccctgtcccacttggtgctgctgctcttctgacccctgctgtgaggaatgggattcttggtcgaaaaaaattggttttccttttttgtataaatgaaaagaatccaggagaagctgccaccctcccctccaagcgtgatgcgctaccttgctttggcgtcttgtcgccctttccgcctttggtccagggacagcccagcagatcctcctggttctgacctggggnnnnnnnnnnnnnnnccttttacttgtattaaaaaaaaatgatgggttgaaaatgtattgaggaaaaaaaat

SEQ ID NO: 7538 - DNA, 259 bp, Macaca Fascicularis
  misc_feature (1)...(259): n = A,T,C or G
tattacccttgccttcccccccattattattttgttaggggaatttttggtagtcacaatttcattttcctgatcccatatcaccattgtgcggacggcccttaatnnnnnnnnnnnnnnnnnnnnnnnnnnnnnnnnnnnnnnnnnnnnnnnnnnnnnnnnnnnnnnnnnnnnnnnnnnnnnnnnnnnnnnnnnnnnnnnnnnnnnnnnnnnnnnnnnnnnnnnnnnnnnnnnnnnnnnnnnnnnnnnnnnnnnnnnn

SEQ ID NO: 7539 - DNA, 1043 bp, Macaca Fascicularis
atatatgccataattgcagaatatggctcaaggctttataaatatcaggccagacttcgtatgcctaaagagcaactggaacttttaaagaaggaaagccagactctggaaaacaattttcataaaattctacttttgattgaacaaatagatgtcctgaaggcattgcttagagatatgaaggatggtacggacaataatcacagctggaacacccatggagaccctgtggaggacccagaccacacggaggtcctggatgaggaaatgtcaaacttggtcaattatgtacttaaaaagttgagagaagaccaagtccagatggctgattatgctctgaagtcggccggagcctccatcattgaagctgggacctcagaaagttacaaaaataataaagcaaaattgtactggcatgggataagtttcctaaatcatgaaatgcctccagatattattcttcagccggatgtctaccctggaaattgctgggcttttccaggttcccagggtcataccctaatcaagcttgctacaaagatcatacctactgctgttaccatggagcacatctcagagaaggtgtctccctcaggaaacatctccagtgcacccaaggaattttctgtctatggcatcacaaaaaaatgtgaaggagaagaaattttcctaggtcagtttatatataacaaaacaggaaccaccgttcaaacatttgaactccagcatgctgtttctgaatatttattatgtgtgaaacttaacatctttagcaactggggacacccgaagtatacttgtttatatcgattcagggtccacggcacaccaggcaagcacatctagaagagttggtgcagaaggtcatgccacatgtccagaatattcaagaacatttattctcttagatgttactgcacacataggaattgagaattaggagtgggaagaaaacctcaaagtggttcatacttgcctataaaaagtaaacaaattttactaataaaaaatatggaagtaaattaaaaaaaaaaaaaaaaaaa

SEQ ID NO: 7540 - DNA, 767 bp, Macaca Fascicularis
  misc_feature (1)...(767): n = A,T,C or G
gcaggattagtatnctgttacagcccctttagtttttagactcttcaattaaagggccaatgnnnnnnnnnnnnnnncctttttttgttcttctttatgtataatatgtagttaatgtggcagtgcatgaaannnnnnnnnnnnnnnnntaggataaaagatgccaagagtctacaaaaataaccatgtagtaannnnnnnnnnnnnnnaaaggttttattgttagccaccttcacatgtattttctctttttttcttttttttctttttcttttttnnnnnnnnnnnnnnnnnnnnnnnnnnnnnnnnnnnnnnnnnnnnnnnnnnnnnnnnnnnnnnnnnnnnnnnnnnnnnnnnnnnnnnnnnnnnnnnnnnnnnnnnnnnnnnnnnnnnnnnnnnnnnnnnnnnnnnnnnnnnnnnnnnnnnnnnnnnnnnnnnnnnnnnnnnnnnnnnnnnnnnnnnnnnnnnnnnnnnnnnnnnnnnnnnnnnnnnnnnnnnnnnnnnnnnnnnnnnnnnnnnnnnnnnnnnnnnnnnnnnnnnnnnnnnnnnnnnnntgcgtggccttctcatgtgttttctgattaaggctcttgacttccttcatccatacaggttgttatgccaataagatggtattgtgcggggctatgtggggagatggggtgggggctcttggactaatataaaactttgtcaaatgtagttctttgaatggggcttgaaacannngcattttcttgctctcacaaggatagtgggcaccacga

SEQ ID NO: 7541 - DNA, 392 bp, Macaca Fascicularis
gtgcttcttataattaatggcatcttagagttgatgaaatatggaatattacctgttgtgctgatcttgggcaaactacaatatctctgggtaaaaatgtccccatctgaaaaaccagggacaacgttcctcccacggccagccactatggggctaaaatgagaccacatctgtcaagggttttgccctcacctccttccctgctggacggcatccttggtgggcagaggtgggcttcgggtagaccaagccgtgctgagctaggaccaggagtgctagtgccactgtttgtctgcggagagggaggcctcagtgctgagggccaagcaaatatttgtggttatggactaactcgaactccaggctgtcatggcggcaggacggcgaacttg

SEQ ID NO: 7542 - DNA, 730 bp, Macaca Fascicularis
  misc_feature (1)...(730): n = A,T,C or G
ggcagatgtggccnnnnngaaccgccgcattcagctgttgaggaggagctggaccgggcccaggagcgcctggctacagccctgcagaagctggaggaggccgagaaggcggctgatgagagcgagagaggaatgaaggtcattgaaaaccgggccatgaaggacgaggagaagatggagctgcaggagatgcagctgaaggaggccnnnnnnnnnnnnnnnnnnncagaccgcaaatacgaagaggtggccaggaagctggtgatcctggaaggagagctggagcgctcggaggagagagctgaggtggctgagagccgagccagacagctggaggaggaacttcgaaccatggaccaggccctcaagtccctgatggcctcagaggaggagtaaatgtggggacctagaggaggagctgaaaattgttaccaacaacttgaaatccctggaggcccaggcggacaagtattccaccaaagaagataaatatgaagaggagatcaaactgttggaggagaagctgaaggaggctgagacccgagcagagtttgctgagaggtctgtggcaaagttggagaaaaccattgatgacctagaagagaccttggccagtgccaaggaggagaacgtcgannnnnnnnnnnnnnnnnnnnnnnnnctgctggaactcaacaacctgtgagggcccgccccacccacagccaggctgtggctgtgccccaaccca

SEQ ID NO: 7543 - DNA, 711 bp, Macaca Fascicularis
  misc_feature (1)...(711): n = A,T,C or G
tcatgagaaggagccnnnnnnnnnnnnnnnnnnngtcatgagagggagccnnnnnnnnnnnnnnnnnnnnnnnnnnnnnggagccnnnnnnnnnnnnnnnnnnnnnnnnnnnnnggagcccggggttctgtgttcctgtgttacaggaaggagcccggggttctgtgttcctgtgttacaggaaggagcccggggttctggatgcctcgggaacagaatatggaccttaaacaccaggctgagagcctggcctggcacgcagcctgcccccgcctgcccttgctgtccaccacgggctcnnnnnnnnnnnnnnnnnnnnnnnnnnnnnnnnnnnnnnnnnnnntcatcctgcatccagagaacaggcagcatatcgagccgttaccctgattcactcggttcccttgaagccaagcctcagttaaccatgaccacagctacagccaaccactgttgttgctgcccgcttttgctcaagaatgatatcttgacaggcacagtggctcatgcctgtagtcccaacactttgggaggccaaggcaggaggatcgtttgagcccaagagttcaagaccagcccgggcaacatagagacctctacaaaaataaaaatttgcaaggtgtggtggcatgcacctgtagtcccaactgctagggaggctgaggtgggcagattccttgagctcagtagttggagaccagcctgggcaac

SEQ ID NO: 7544 - DNA, 686 bp, Macaca Fascicularis
  misc_feature (1)...(686): n = A,T,C or G
tctcctgnnnnnnnnnnnnnnnnnnnnnnnnnnnnnnnnnnnnnnnnnnnnnnnnnnnnnnnnnnnnnnnnnnnnnnnnnnnnnnnnnnnnnnnnnnnnnnnnnnnnnnnnnnnnnnnnnnnnnnnnnnnnnnnnnnnnnnnnnnnngatcctgagaacttcannnnnnnnnnnnnnnnnnnnnnnnnnnnnnnnnnnnnnnnnnnnnnnnnnnnnnnnnnnnnnnnnnnnnnnnnnnnnnnnnnnnnnnnnnnnnnnnnnnnnnnnnnnnnnnnnnnnnnnnnnnnnnnnnaagctcactttcttgctgtccaatttctaccaaaggttcctttgttagaaattggacannnnnnnnnnnnnnnnnnnnnnnnnnnnnnnnnnnnnnnnnnnnnnnnnnnnnnnnnnnnnnnnnnnnnnnnnnnnnnnnnnnnnnnnnnnnnnnnnnnnnnnngatcctgagaacttcannnnnnnnnnnnnnnnnnnnnnnnnnnnnnnnnnnnnnnnnnnnnnnnnnnnnnnnnnnnnnnnnnnnnnnnnnnnnnnnnnnnnnnnnnnnnnnnnnnnnnnnnnnnnnnnnnnnnnnnnnnnnnnnnaagctcactttcttgctgtccaatttctaccaaaggttcctttgttcccaaagtccaactactgaactgggggatattatgaagggc

SEQ ID NO: 7545 - DNA, 752 bp, Macaca Fascicularis
  misc_feature (1)...(752): n = A,T,C or G
gctggagtgcagtgatatgattttggctcactgcaacctccacgtcctgggttcaagtgattcttctgcctcagcctcctgagaaactgnnnnnnnnnnnnnnnnnnnnnnnnnnnnnnnnnnnnnnnnnnnnnnnnnnnnnnnnnnnnnnnaccatgttggtcaggctggtctcaaactcctgacctcgtgttctgcccacctcggcctcccagagtactgggattacaggtgtgagccactgtacctggcagctattttgttttctactctgatttctgaaatggtgaaacaatcctattaatcatatattttttaatttcatcagagctctgttacagatatgacacaatgaagaagctgcataaaagtactgaaacctaaggtatctgtagtatataggatgtaccctggcttaccatataaaagtcattagatagtaaatagcactaagtctaaaagcaaggagataagatttcatgttggatactgtttcaacaagaactgtatttggaatattaaaggaaatccttatgttagtaagtttaaaaaaccaaacatcatatacaaaataaaattttagtatgataaaacctaggttttcttattttttaaaaggacatcaaactctataattgctcaagagcaaagtttagtgttttggtgagctgtatttcatcttacttgtagcaattatatttggtgacatggattgcattttccannntgctcnnnnnggacatatctaatca

SEQ ID NO: 7546 - DNA, 726 bp, Macaca Fascicularis
  misc_feature (1)...(726): n = A,T,C or G
tgaagctggaaaccgtcnnnnncagcaaactgacacaggaacagaaaaccaaacaccacatgttctcactcataagtgggagttgaaaaacgagaacacatggacacagggaggggaacatcgcacacccaggcctgtcgggttggggggcaaggagagagcattaggacaaataccaaatgcatgcagggcttaaaacctagacgatgggttgatgggtgcagcaagccaccatagtacatgtatacctatgtaagaaacctgcacgttctgcacacgtatcccagaacttagaaaaaaaacagttaagtgctcaataaatgttactgtcatctatttcttcattcttcaaccaatacctactgcgtgcctatttggatacttggcttagtacctgggtgatgaaataatctacaacaaacccccatgacacgagtttataacaaatctgcacatgtacccccgaactgaaaagttaaaaaaacagaatccacacaagtctaagctacttcccttgaggaaaagactccagctgagatgagatctgaaggaagagtagaggttgcagggctaaagaagaatgtcccagatgagagcggcatgtgaaaggccttgtggtgggaggagcctggtagctctgagaaactccacaaaggcacggtggtggctggaatgctcagagatgtgggggcacatggaaaaccttgttaaagtggttaaaatgat

SEQ ID NO: 7547 - DNA, 687 bp, Macaca Fascicularis
  misc_feature (1)...(687): n = A,T,C or G
gtgtgccnannngctgcaagccngtctgctgtgtgcccnnnngctctaaggattnnnnnnnnnnnnnnnnnnnnnnnnnnnnnnnnnnnnnnnnnngcacctcctccccatgccnnnnnnnnnnnnnnnnncctnnnnnnnnnnagtccgtctgctgtctgcctgtgtgctcnnnnnnnnnnnnnnnnnnnnnnnnnnnnnnnnnnnnnnnnnnnnnnnnnnnnnnnnnnnnnnnnnnnnnnnnnncctcctccgtgtccctcatctgccgccccgtgtgcaggtccgcctgctgcgtgcccgtctcctcctgctgtgcgcccgcctcctcctgccagcctagctgctgccgcccagcctcctgcgtgtccctcctctgccgccctgtgtgctcccgcccggccnnnnnnnnnnnnnnnnnnnnnnnnnnnnnnnnnnnnnnnnnnngctcagtcctcactcatctactgactgtcnnnnnnnnnnnnnnnnnnnnnnnnnnnncaggagcccctggagtcctcannnnnnnnnnnnnnnnnnnntagccacnnnnnnnnnnnnnnnnnnnnnnnnnnnnnnnnnnnnacttccctcctccctctctgggaagagacaacccacaaatccctcagcaggtggactgtggccttctggaacccccttctccaaatgtgctgcttgcac

SEQ ID NO: 7548 - DNA, 445 bp, Macaca Fascicularis
  misc_feature (1)...(445): n = A,T,C or G
cgaagtgggagcggccaaaatgaagtttaatccctttgtgacttccgaccgaagcnnnnnnnnnnnnnnnnnnnnnnnnnnnnnnnnnnacattcgcaggaagattatgtcttcccctctttnnnnnnnnnnnnnnnnnnnnnnnnnnnnnnnnnnnnnnnnnnnnnnnnnnnnnnatgaagttcaggttgtacgnnnnnnnnnnnnnnnnnnnnaaattggcaaagtagtccaggtttacaggaagaagtatgttatctacnnnnnnnnnnnnnnnngggaaaaggctaatggcacannnnnnnnnnnnnnnnnnnnnnnnnnnnnnnnnnnnnnnnnnaggctaaaactggacaaagaccgcaaaaagatccttgaacggaannnnnnnnnnnnccaagtaggaaaggaaaagggcaaatacaaggaagaaacaattgagaag

SEQ ID NO: 7549 - DNA, 733 bp, Macaca Fascicularis
  misc_feature (1)...(733): n = A,T,C or G
aagacactannngagaatgggtcatttataaacaagaggtttaattgactcacagttccacatggctagggagacctcaggaaacttacaataatggtggaaggcaaaggagaagcaagcaccttctttacaaggtgacaggagagagtgagcacaggggaaaccaccatatttaaaccatcagatctcgtgagatctccttcactatcatgagaacagcatgcagggggaaaatgccccatgatccagtcacctcccaccagatccctccctcaacacagaggattacaattcgagatgagatttgggtggggatacagagccaaaccatgtcggggggattgcctgtaagtgaaccgggtggatgtgctaagagacctgcaccatccctggaatttgcagagggcccacctgtacattgttgtgggaccaagggtagtatgtgttgtggtgtttgcttccttaagctggtagctccttgaagaggggattataactttaatgtttcttactactctatcaattttggaaatggtgatttactttatggaatggccaaacaaggttctgttccccaagccttccctaccttcaacctctttctctacctttctcttttctctcagtagcaaaaaagcaaaacccaacaacaaactatataaatgactttgtaacttcccangagatgatttttgtatgcaaagtaatgttctacactctggaaaaaatagaa

SEQ ID NO: 7550 - DNA, 774 bp, Macaca Fascicularis
  misc_feature (1)...(774): n = A,T,C or G
aatggaaagcacgttagtggagggacgtaggacacgtgtggaccgccaggccctctcannnnnnnnnntggnnnngctgggtgctgctgttagatgtgcagtgcatttcactnnnnagaacccatcgtataaaattcaaggctaagagtnnnnaannnngnnntcagcttcctcaggattnncttcagttgcaagtacctttccactgaaaatgtgagcatgcccgcctggctaggcatctttaagagtgtcgccaggcccgtgccagctgaggcctcagactagccaggcgagagccgtctgaccggttggttggcggtggttctggctgagcacgagggagccggggtggtgtccctgagcctcaagctgctccctgttcactgtcttgaatcagactcagaaatggcttcttcacagccctgcctacaagtttttctctggggccctctttcaaggatgtccacggtaccttcctccggaaacttgaggaagtcttttgtcttccagctgctcagggttctccggtccaagaccctgctttaaaaagagtctgtggagtgctcagactccagcgctccattcttcaaggaggttgacttgcctctcgggccccataggtaccaagagactgtttacctcccagaatgtttgggcttgaagttacattaaagtgaagttatttgaaagaaagaaaacctcatcatttctaaggatgacttaattactgtgccttttcctttctttttacacatccttctgtcccttagggta

SEQ ID NO: 7551 - DNA, 763 bp, Macaca Fascicularis
cccagcagaacccaccaagtgcctgtgggcagcctcctgtgcctcacccagggcctggcccgagtggtcccaacaacctggtctcatgcccgctccccatccctgcttcccaaaaattgcactgtgtgcagtttgcaacaaagaatcccgctggcatcctgtccttaggaaccctttctcattccccaagcctggtcagctgcctgcataggcagaggtgcccccagcccaggttagcaacgctcatcattttgccaattaccagtagacactagtggaaccatctaactggaacttcctctctccttccacacttgttgctttacactagacacatgcaaatgtatgttttaaacacaccaaaacagattatgccaaatgagtagcctgtccaaggctggagggcaggaggagggcctgggtttgggttccttcctcccggcctttgtacggtgccttgggcccctcagccccagcgccagggcctcccagctgaggccacaggacaagcacttatttatgatgtactaaaagaagccacagtatgtggcaactgcaaaaggatcaggaatttagggtgtgatctcagacacgtgtcctgggtgctgaggggaaaggaagcgggcacagtgattgtagacaatgagggggtttctcttgatgtaatgaaatgcaattttatggtttggtgcaaaaactcctattttccagtaaattaactttatttctaaagcatattttgatttaccatcaagagcaataa

SEQ ID NO: 7552 - DNA, 514 bp, Macaca Fascicularis
  misc_feature (1)...(514): n = A,T,C or G
atttcccccgcggacgcttgacccggctgcagcaccggccctccgagtgagaagagccccctgaaggctccgcagagcgatctatcccgcgctcttgtccgtgcccagagagtgggttccacttggcagggatgatttgaaactgctaccagcaattcattcacctgacacccgacaccagcagtccagcccaccggaggcgagacagtcttgctttgccannnnnnnnnnnnnnnnnnnnnnnnnnnnnnnnnnnnnnnnnnnnnnnnnnnnnnnnnnnnnnnnnnnnnnnnnnnnnnnnnnnnnnnnnnnnnnnnnnnnnnnnnatgtgacactatgccctgctaattttttttatcttgtatgttgtatatattatatacatattacatataattatgtattatattataaattataattataaattgaatgtatattatatatttatgttgtatatattatatatatgcaaccatatatacgtatacaaccactttatatagttggggga

SEQ ID NO: 7553 - DNA, 686 bp, Macaca Fascicularis
  misc_feature (1)...(686): n = A,T,C or G
gnnnnnnnnnnnnnnnnnnnnnnnnnnnnnnnnnnnnnnnnnnnnnnnnnnnnnnnnnnnnnnnnnnnnnnnnnnnnnnnnnnnnnnnnnnnnnnnnnccagtccagctggcaggagggaaagacctggaaggccatccgtgtggatttagtcatgtgcccctacgagcgtcgtgccttcgccctgttgggatggactggctcacggcagtttgagagagacctccggcgctatgccacacatnnnnnnnnnnnnnnnnnnnnnnnnnnnnnnnnatatgacaagaccaagaggatattcctcaaagcagaaagtgaagaagaaatttttgcgcatctgggattggattatattgaaccatgggaaagaaatgcctagnnnnnnnnnnnnnnncttttttcccttttgttttcaagttaaataaattatgcttcatattagtaaaagatgccataggaaagttcagggttatttannnnnnnnnnnnnnnnagatcgctactagaaatatatagctttggaaacatgggaaggcgccactggtaatgggtaaggttctaataggccatgtttatgactgttgcgtagaattcataatgcatttttcaagagaaacgatgttgtcattggtggctgnnnnnnnnnnnnnnnnnnnnnnnnnnnttgttcacagtgtagctgaaatac

SEQ ID NO: 7554 - DNA, 1999 bp, Macaca Fascicularis
acaaacttgctggaaatggatgagaaaccttctgctctgctggagtttatcttgagtgtgccttaaaattccatttcatggagagctgtgcttggttgaattttgattgattactcaattaactgatttattggtagagtgattaagagagaagactttggaatcagaccaacctggttttgaattcaagctcaggaacttactaggtaaggaggagaaaagaaagaaggaaaaattggaaagataaatggggtcttccagtgaaggctcaattttcctacataattaagagtttgaagtttgggcaatgtcaagaaccacatctgtactgaaatcaattatctgtgtttgaaacacaagaaataagaagaccattttgagaagaacagagagtagccttaagaaaatccctgtcgcatgcactctgggatttggactcaaatcctaattatacagtctataatgatgactggaataggaaattcggacagcacaagtggtcgcttcttaggcttcctgccagattttgaaaaccactataacaagtcgtttctgccaagaaccactcgggtgcccagctgccgtccattctccacacttatcccacctgatggaatgctgttgagaaaaacatcactgcaatgcgtgataaaccaacatgggtcccagacccaataagagtgaaaccatccccctatttaaatgaaattatggctgatgagaaagacaaattaatttctctgcccccaatattacacaaaactttggatgctgccattgttacaattttattttccccaggagctcagagtcccaccttcattctttttgtttaatgcctaagcttgcctctccgcctgtggaagactagaatgagcagaggccgtgtcttcaatgatctgtaaatctagcaagaaacaagataataaatatactgtgttttctaaccaaatctgtgaatgattagattgattggttaatgattacatggattaacacatcatttctattttctctctcctcccttacttcttgttttaatgataccttccaagttttatttctccaagcctcaccccttacataatacaagaggacaacaatttgcaaaataaatttctattggccctaactgctaaatactgaaatagatttcaagtaatacgagtgtttttgaaaccacctaaatctggaagccaccctgcaaggaacaagggttgcaaagtgaacaagtcagacatgtaaaaataaagatgacaaaatggaaggcaattaatgcctgtaatggaggtggggaagaggggaatgacaagttaataagaaatttatttataaatactttctgccataaaatatccatgcttattttagaaaatacataaaatatttaagaattaaacatcttttaaaaaatcacatgaactcatcaccctgcaacaaaacacagatgagtgcacacacttaaacacacagtaattttcaattagcgtataaagttaatatcctgctaagtacaagatactatatcatgagcattttgtctcaccaatattctatgaaaacataattgtaattattacagagtattctggaaagtgaatatacagcaattcatccagtcatttccctattaacatatattttgtgattccaatttatcactgccacacagtatcttcttaaataacctcgtttataagttttgttttaatgtttttattattttctatttaatataatgttaatacaatcttacataatataatgttataatgttaggattttactacataaggtgtatacattattttaatgctctttccactggatgcccaaagccctcagtaagtttagtgaataacggtacaatgcccaaatatgtaaaagtttttctcttccttaatttttagcattttgcactgtattttattttgaataaattaaagaactcatttaaagtgaaaaaaaaaaaaaaaaaaaaaaaaaaaaaaaggccaca

SEQ ID NO: 7555 - DNA, 651 bp, Macaca Fascicularis
ggaggcagaggttgcagtgaggcaagatcgtgccattgcactctagcctgggcaacaagagcgaaactccatctcaaaagaaaaagaaaaaaaagcggtgggtaaagggccgtgagagcccaaatcactaggttgttcaccttttcatctgaagatgctttcctctgactatgtgctattgggttttatttccagaaaatatagttctccttttttctgcatgaaggatacatcatggtgccacatgctttaagcattttaaacaagagataagaggaaaatgcaaccaccacatctgacttgcccaacgtagacttttctctattagatggaagtacacaacctaatatgatatattattttgtagtatctcagactttgtaaataaataccattatttttatatggaaattttatagaagagctatttctgtatacgtaattattcctggattttctgaaatcgcttctggtagataacagacaagtcctaagcagtgttccactaagggtggttccaggcctgcctgccgtggagttgactgggggagttttacagttttgtgatcctaggatgtgtcccacacgctcagtcagaagcactggaggtggggcctgggaagctgtatttgtaatgaactcatgatgttt

SEQ ID NO: 7556 - DNA, 1827 bp, Macaca Fascicularis
gagaccaacgcacaacaaaggcgcacgccggccagagcgcgaccagtaccgaaataccgagcgccagcccaccctccagtgcctcctcgcataaaagtttccctaaaatatttcagacatttaggaaagacatgtccgaaatgagtatagatagaaatattcatcataatttgtctccaggaattccaatatcagtacaaacagaagaaagctggctccaagatttgttgggtaaagtgcaatcaaggaagaaaacagcctctaaagtgaagaaagctgaacctcaatgtctggcatctaagttaagagaaaaatgggtaattaatccagaagagccaaaactaaatattttgtatgagctggagtttaaggaagacttcataacactattcgagccttctctaagaacgttacccagcattggaccaccaaccattctggcatacaaagaagagagctccaatttagacattaacttcaaggatgaagaggaggagacatcacccaaatgtgaattttgtggaagcgatctaagagcatttttttctaatgtggatgtttgctctgaatcaaaggggcatgcctcctgctgtattgctttccaaaatttgattgattatatctatgaggaacaaataaaaatcaaatcccctaaagcggaattaattgctattgaccctcatgcagcccattacagtgaggtcgacagactcaaggcaaaagaaaaagccctgcaaaggaaacaggagcaacgaatggccagacattttgcaataatatcaagggaacagactcatttctctgaagatgattcaaagcgcttaaaaacaatttcttatcaactttctgtggatattccagaaaaacagacaattgatgacattgtatttgattttcaactgagaaacagtaacatgtccatcatttgttgtgattctcggatagcatgtggaaaggttgtcaggaatgagctcttggagaagcattacaaacatgggagcaagtttctaacttcatttccagatgggacaacacaaatattctatccatctggaaacctagccatcattcgagtgcccaacaaggtaaatggtttcacttgtatagtccaagaagatatgcccactaaccctgctatcctggcagtgctggattcctctggcagaagttcctgctatcatcccaatggaaatgtctgggtatacatcaatatattgggaggtcaatattcagatcaagccggcaacagaataagggcttggaattggtcaaattccatcacttcctcaccctttgcttcatttaaacctgtctttctggctttgaaccgttatattggagtccgcatcttagaacaagacaagatttctataacttttctagcaatgggtcaacaggcaagaatcagtgttggaaccaaagtgaagctaccaaaccctgaggagattccagtcctccgatatgtgagtggagatgaccttcttctgctggccagtttaataaagatccgtcgcctgtttcataaacttgaaggatgtgtgaattttccctcaagccaagtttgggaaaaattaaagcaaccttcctacctttcttcacttactctaaaactaattgccctctgtcgcagttctggtataaagcaagatacaatgaagacaataagaaatataataaatgaagaaatttaaaaaaaaaaaaaaaaaaaaaaaaaaaaaaaaaaaaaaaaaaaaaaaaaaaaaaaaaaaaaaaaaaaaaaaaaaaaaaaaaaaaaaaaaaaaaaaaaaaaaaaaaaaaaaaaaaaaaaaaaaaaaaaaaaaaaaaaaa

SEQ ID NO: 7557 - DNA, 775 bp, Macaca Fascicularis
  misc_feature (1)...(775): n = A,T,C or G
cgaagnnnnnnnnnnnnnnnnnnnnnnntggatnnccaggaccggatnnngccccccatgaggtggcannnnnttatgaaggagctggggaaggaagagggcgagatcttggcatcctgtgagctgatcctccagactgagatcctggcctggggccttcggaacatgaagaaggcaagctccccccagctcctggtggaattcggggaagagtccctgaggacagaacccatcagagactttcagaccaaccccaacttccccgagtccgagtctgtcctagtcctcatagtgctcatgcccacggaggaggcctacgcannnnnnnnnnnnnnnnnggtgnnnnnnnnnnnnnnnnnnnnnnaacagaccgtgacgggccaggccaacatcgacttcctccagccctacttctgtgacccctgggctcagnnnnnnnnnnnnnnnnnnnttccaagacttcctaggctacctctccagaaagttnnnnnnnnnnnnnnnnnacagaggatgagtatgagcacgaggtggactggtggagcaagctgttctgggccacagatgagcacaagtccctgaagtacaagtacaaagactaccacaccctcaaggtgtacgactgtgagctggaggccgtgccagccttccagggcctgcagnnnnnnnnnnnnnnnntcaagctctaccaggagcagcccaagctggacagccccgtggtaggggagttcaagnnnnnnnnnnnnnccagcttagctgcccccgtctccttgtgccc

SEQ ID NO: 7558 - DNA, 747 bp, Macaca Fascicularis
  misc_feature (1)...(747): n = A,T,C or G
cgttgacactcatcacggttgtaggctgtcatgaatgtgtacgtgcnnnnnnnnnnnnnnnnnnnttgcttgtgtgaggccttnnnnnnnnnnnnccagtgtgcttaagaacccgcctgatggggagtgttggctgnnnnnnnnncagaaagagctgacattccagctgccgtgatcatgaatttgggggtgtactcccctgcctgtgcatcttctnnnnnnnnnnntttgaggcggttgcagcccccagttggtctcccagtggagatatcagttgtgcctccctgcttcccaccatagctgcctgaaaacatgacgttctcacacttgtccnnnnnnnnnnnnnnnnnnnnctcacgtccacccatgagggggcttgctgtatgccctggccattgggcatatttatgtagagttcctttttcctaagacgtgagtttctcatgggggatgtacgagtaaaagggttaacttctgttcttatcgtggcgctgtgtttactttccagagtctctgttcgtttgtttggatggtggtctcggggtacggcagcgtgtgtgcatacgtgtgtgtgtgtgtgtgtgtgtgtgagaaatcgtgcaaatctacatgtcccagcccattctctgtttgaacagatcacagcaatgacaannnnnnnnnnnnnnnnttcgcttcacctgcttcagatagatcattgttagatatttcacatttttgtatggtggaaataaaaatgaaaaatgt

SEQ ID NO: 7559 - DNA, 723 bp, Macaca Fascicularis
  misc_feature (1)...(723): n = A,T,C or G
agtgccctgtgtcgtctcnggctcaccagcaaatcctcgggggaaagcagggctggagggtgaggacgcccagaagagttcctggctccgaatccctctctgaggctcccgatacagatgcccaggccccacacccagagactctgagtatttttgtttatcgtatgtaaaagactagtgtatttttgtttaagtctcacaggtaaacaagttctctcatactttgtcaagggaaatgtaatctgtgcaatttggcagtaactatcagaattttaaaagcgtatgccctttgacctagtcatttcacttctaagaatttcccctgcagaggtatgtatatcttgtatgaaatgaagaggctatgaaaacagccaacgccacagtgtttataatagcaaagaccggacacaacccacatgtctaaaggttctgatgtttaaaactgtagtatatctgtacaatgagcactccacatcctttaagaatgaggaagggctgtgtgaactgaaatggaactatctctaagatgtattaagttaaaaaaatccaagagtagcacaaaggagggtatgccctcctttgtatgataaaaggtcgtatatctgcccatctcaaatgaggaacagtggttgcctctgggaagggaactggatggctaggaatgcgataggaaagaggtttgcttttcagaacattttatagcatttaagtttgtcacaaggg

SEQ ID NO: 7560 - DNA, 715 bp, Macaca Fascicularis
  misc_feature (1)...(715): n = A,T,C or G
cagccagcccagagaggggctcntacagtgccatagcaggctgaagggctcctcaagagccaccagagtggacgccaaggccaaggaggcaccgagagcgagggctgctagcacattgtcacctctcaatcccatgaaggtgctctggaacacaaatggccacacagagtcagtacctttgagaagagggggatggcctttttttcctttcctgtgagtcagtcatcagaccaggggcagatggatgagaatgtggcagagcctcctgggcagggcaggtccaaggcagctcctatgtggctgagggcagttctccagcaacagggcagctgtggagtccatcagcccagagtcacagcagctgggaggcaagggtgacgggagcacctgatggcaaaggggatctgggcctgcaggtacctcatacctccaccacagagaagttgttatattgttcagtgcttctcctgcctgggggtcacatgaatggaagaatcagagccagaagtcctttcttcttgcagtgtccttcttgcaccctctatcgacaaaacctaacaaagtgcttgctgttaaggagaactgcttatagggtccagcaggttaacacagagcaaatagcagagtcgcttttaagctgagcagtaatacactgataagtggcacactcattaagatcgcatttatgaaacccatctaattgtcccatagaact

SEQ ID NO: 7561 - DNA, 765 bp, Macaca Fascicularis
  misc_feature (1)...(765): n = A,T,C or G
gaatgtcaagcannnantnnnanccnanttatgatgaaaatgaagaagaaaataggccnnncatgagacccatgtcggaaatggctctcctatattgatgaagctactatnnnnnnnnnnnnnnnnnnnnnnnnnnnnnnnnnnnnnnnnnnnnnnnaaaaatactgcgcaaaagacattcagctcaaannnnnnnnnnnnnnnnntcaggttaatggacacaccaagaaaccacagcacatacttcttttctttcatttaataaggcttttaattatggtacgctgtcttttaaaaatcatgtatctaatgtgtcagatattgtgcttgaaagattctcatctcagaatactnnnnnnnnnnnnnnttatttcttctctactttgtaaccaaatgcaattggtgtgccttggattatttagtttattaatgaattaagttaaaattacggctgcaaaattggtaaggtcaagtaaagcacaacattatgatttaatatgcttnnnnnnnnnnnnnnnnnnnnnnnnncattattttaacctgtgtaaaacaatacaaagcccagaaattctttttggggcatgagtaaattttgnnnnnnnnnnnnnnnnntatgtgcccagataaaattttcatgagagtagtttacaaaagccctatttaaaaattattattttcacacttgtttttttctgaatttctgcttataattaatgtaacttaaattagttgtgctctgctattttnnnntatatttcatgttgt

SEQ ID NO: 7562 - DNA, 714 bp, Macaca Fascicularis
  misc_feature (1)...(714): n = A,T,C or G
ctgcacagcacagtcccagacccaggcagnnnnaggctgtactcaaggctcactgccccttatggggcagactggccaagaactggcgcatgggctttcagacagaaggattttgtatacagtgttctaccaggtcccctgtccctaggcccatcccctgctgtctctattagcatgcctaagcgtgaggctgccatcttgtcacttcctactccagttagcacatcccccgcaattatttttgttttccaaaggttnnnnnnnnnnnnnnnnttagctgtccctctccctagaaagagctactttcatgaaacaaagtcttgcctgaatattctgggtggctaagaattgacccagatccctccccccatacgtcctgtggactccttttattacttccctgcctttcctagaccagctttccttagtgaccagtgtagacttggctttagaatgcctgtacccgtaagagtctaacagtagccaaagttgggccccaaagnnnnnnnnnnnnnnnnnnnnnnntctcatacttctaatggggtggtccattgggaaggacacgggtcaggtgcagctccagggagcctcatagcatctgtatcagtgtgaacaaacaaaaggagtccagggcttggggaaccacacggcttcttagagaaaggaagcccaatggaaatgaagattaatggagnnatacannncactgaaaga

SEQ ID NO: 7563 - DNA, 983 bp, Macaca Fascicularis
  misc_feature (1)...(983): n = A,T,C or G
cgtgtcatttttgcctttgaggtgtttttctttctacctcgannnnnnnnnnnnnnnnnnnnnnnnnnnnnnnnnnnnnnnnnnnnnnnnnnnnnnnnnnnnnnnnngctcaggtgcaacatggggcagccaggnnnnnnnnnnnnnnnnnnncccgcactcaggaggcaccgnnnnnnnnnnnnnncgggcggcaggctgcagcaacgtccacgcctccacttccagacacagcccctccatctcacaggacagagacacggccggctcagcggnnnnnnnnnnnnnnnnnnnttgttctttttattattattattatttttaagttcacctgcagctgcagtacacacacaccactttatttggctagctgctgttcagaagacacttcctgaattcaggaaaaattnnnnnnnnnnnnnnnnnnnnnnnnnnnnnnnntcttagctttgaagtgcatttactttgacattgatgtagcttgtaactacttttggaatttttttcctgtaacacgttgatctcattaggggtatcatgcgttttccaccaaaaaatgcagaggtattatctttttcttggaaaccaattgaaagcgtcccattttaacaaaatcacataaaattataaacatttacatgattaaattcaaagccttatccatctggtggtaagaaataaaatgttaacttattttaaaagatgtatttgatataaagacttccatctttatatcaaaagaatcggttgggcttgcacgagcaatggctcccatctctgcagagggtttgagccatgcccttgcggggccgctccaagctccgacttcaaaacttggagtttcccannnnnnnncagctggtcaaaggcactctcaaaagttcaaggaaatgcccgtttgnnaatggccgcagcacgcctgtgggtctggagacagcgccaaggagctggcgtagattcctgagatgctcctgctctgccgt

SEQ ID NO: 7564 - DNA, 3926 bp, Macaca Fascicularis
agcacccgcctgcggtctgaggcacctgctgaaccatgtcggagatcctgtgccagtggctcaacaaggagttgaaggtgtcccggacagtgagtcccaagtcatttgcaaaggcattttccagtggctttctacttggagaagttctatacaagtttgaacttcaggatgatttttcagaatttttggacagcagggtttcaagtgccaaacttaataatttttctcgcctggagccaacacttcaccttctgggtgtgcagtttgatcagaatgtggcccatggcatcatcacagaaaagcctggggtggcaacaaagctgttatatcaattgtacactgctcttcagaaaaagaagaaaagtggactgactggagtggagatgcaaaccatgcaacctctgacaaatttaagacttcaacacatgaaaagtgaaacttttcgagagagacttagacacatgatcccacgtcaaactgatttcaatctgatgcggattacatacaggtttcaagaaaaatataaacacgtgaaagaagatcttgcccatttgcattttgagaaacttgaaagatttcaaaaactcaaggaagagcaaagatgttttgatttaaaaaagcaatacttaaacagaagacgacaaaatgaaataatggccaaaatccaagcagctattatacagattcctaaacctgcatcaaatcgtactttgaaagcactcgaggcccaaaaaaatgatgaaaaagaaaaaagaggcagaggatgtagctaatgaaattaagaagttcgaagcattaataaagaaggatctccaagcaaaagaaagtgcatccaagacttctttagatacagcgggccagacaaccaccgatttgttaaatacttactcggatgatgagtacattaaaaaaatccagaagcgcctcgaagaagatgcttttgcacgagagcaaagggagaaaagacggcggaaattgttaatggaccagttaatagcccacgaagcacaagaggaggcttatcgggaggaacagctgattaaccggctgatgcggcagtcccagcaggagcgcaggattgccgtgcagctcatgcatgttcggcatgaaaaggaagttttatggcaaaacagaattttcagagaaaaacaacatgaggaaagacgacttaaagatttccaggatgctcttgatcgagaagcggctttggcaaaacaagccaagattgattttgaagaacagttccttaaagaaaagagatttcatgatcagattgctgtggaaagagctcaagctcgttataaaaagcattattcaatatgtgcagaaattttggaccaaatagttgatttgtccactaaagtggcagactatcgaacgttgacaaataacctgattccatataagttgatgcatgattggaaggaactattttttaatgcaaaacccatatatgaacaagcctctgttaagacactacctgctaacccctcaagacaacaacttatagaactggagaaaagggacttgctagataccaatgattatgaagaatataagaacatggttggagagtgggccttaccagaagaaatggttgacaatttaccaccctccaacaattgcatactgggccatattcttcataggctagttgaaaaatctcttcctcctcgagcagaatcaacaacacctgaattaccttcatttgctgttaaaggatgcttactggggaaaacattaagtggaaaaactaccattttaaggtctctacaaaaagactttcctatgcggatactttctattgacactcttgtccaagaagctatccaagcatttcatgacaatgaaaaagtcagtgaggtcctaccaattcagaaaaaagatgaagaaaatgctctaccagttctgcaggaggagattaaagaaagccaggatccacaaaatgtattttcagctggtccagtttcaaatgaagtattaccagaaacagaaggtgctaatgctgataaaacaccaaaagctgaagaaatcaaatccagtgatagtttcttaaaactcactacgcgtgctcaacttggtgcaaaatcagaacagttgctgaagaaaggaaagagcattcctgatgtgctgcttgttgacatcatggtaaatgctattaacgagatacctgtgaatcagcactggatcctagatggttttccaatgactttaaaccaagcacagcttctggaagaagctcttacaggctacaatagaaacctcacagaactggagagaaaaaaagcacaaaaatccacattggctattgatcctgcgacttccaaagaagtacctcttccctctcctgcatttgattttgtcatattattagacgtttcagatacttcctcaatgagtcgcatgaaggatataatagctgaagaattgtcctacaaaactgctcacgaagacatcagtcaacgtgtagctgctgaaaatcaagataagggtggagaccaaaatttaagagaccagatacaacatagaattataggcttcttggacaactggcctttattgaagcaatggttttcagagccagaaaatattttgataaaaatcaatgctgaaatagataaggaatctttatgcgaaaaactaaaagaaattcttacgactgaaatagtaaaaaaaaagaataaagttgagaagaaattagaagaaaaggaagctgagaaaaaagcagcagcttccctggctgagcttccacttcctacacctccttccgctcctcctcctgaaccagaaaaagagaaggaaattcatcttcatcatgtgccttcaaaaactcctactgcaaaaggaaaacctcaattagaagccccgcatggtaagcaagaatctcttcaggaaggaaaagggaagaaaggtgaaaccgcactcaaaagaaaaggttctcctaaaggaaaatcatcaggaggaaaagtaccagtaaagaaatcacctgctgactctacagacacatcacctgttgcaatagtgccgcagccacctaagccaggatcagaagaatgggtctatgtgaatgaaccagttcctgaggaaatgccttcgtttttagtaccttactgggaactaatagaaaattcctatataaacaccatcaaaacagtactcaggcatctgagggaagaccagcatactgtgcttgcttacttatatgagattagaacaagtttccaggagtttctaaagcgtccagatcacaagcaagattttgtagctcaatggcaggctgatttcaactcccttcctgatgacctgtgggatgatgaggaaacaaaggctgaactacaccaacgagtgaatgatctgcgagaccgcctgtgggacatttgtgacgcacggaaggaagaggcagggcaggagcggcttgacatcattaatgagaactggttacaggactctcttggaatgacaatgaaccatttcttttccctgatgcaggcagaactgaaccgtttccaagatacgaagagactccttcaagattattaccggggaatggaaagtaaaatcccaatagaggacaataagagatttactcgaatccctttggtccagctggataataaagacaattccgaaagccaacttggaattcctctatttcctcgaatatccatttctctggaaacagttacgcccaaaccaaaaacaaaatcaatactgaagggcaagatggataactccctagaaaacgttgagtccaactttgaggctgatgaaaagttggtcatggacacctggcaacaggcttctttagcagtatctcacatggtggctgctgaaattcatcagaggctcatggaagaagaaaaagaaaaccagccagcagaccccaaagaaaaatctcctcagataggtgcaaaaaaaaaaaaaaa

SEQ ID NO: 7565 - DNA, 667 bp, Macaca Fascicularis
  misc_feature (1)...(667): n = A,T,C or G
caggctgcgtgtcaggtagaaagtgggagagagcatcctcatgtctcaggtgattctacccaagctggtgaagcaaaacctttcccgaggatgcctctgtcctcccccaccccatgacacctcgtcctttctgcggcaatcctgaatccattcatgacgtccctgctgctctttaaggagcaggaccctgtctaacataaattctgtacacaaaacaagaagtccatcacaggcagggaacctcccactggtgacaagaaagaattcaatcactgcctgggctgtgtggttctgggccttcctgtagagctgagctgcctggattatcatgactctgaacttggaaggatcattaagtgactgtagcctactctccatgcttccttcatattggaagaaaagtttctgttaaagagtcagccgggtgcagtacctcatgcctgtaatcccaacactttgggaggctgtggcaggtgaatcacctgacgtcaggggttcannnnnnnnnnnnnnnnnnnnnnnnnnnnnnnnnnnnnnnnnnnnnnnnnnnnnnnnnnnnnnnnnnnnnnnnnnnnnnnnnnnnnnnnnnnnnnattctctgatgagaatcgctgcaacctgcgaggcggagatttcagttagctgagaccacgccactgcactccag

SEQ ID NO: 7566 - DNA, 754 bp, Macaca Fascicularis
  misc_feature (1)...(754): n = A,T,C or G
tcattgctatacnnngctgtttgtcattaaaacatctctannncannncttgcaaaataatatttatattttaatggataggaaaatgatttgcaattagatgtttccactcttgaaagaaaaaagctgcaaataacattttcaataatataaaaagtgagtaaacagagggaaggttgtgtggtgatttatagacaattaagcacagactgtagatgtccttccaattcttgggaggctaaattgagtctaccatttcttacatttcttttacctcttttttgggaattgccagttgtacagtgtttagcatgtggaatgtaccaaatatatctatgttgtgacttaagatattctaaatgtggataacttctgacctaggaaacataaagtttgcagtgaagtaagtgaaaagaatgttcaagaaattttttttcgccatctcttcagttggcatttattgagagttttatttgaatgcttattaaaagtatatgatttatagtatttagaaaatagaagaaaaaagaaaagtgtagatgttttatcttgttttaatactgtatgtttagtacatatacatttatgttgtagtgtatcataatttttcattttcattaaagtgaatcaaaatttccctattctaggtccattttaaaccatgaaaacttttatcacatattttgtaaagggctaaaagtatgatttaaactacagaaagacataatattttaattctaacatgaaagataat

SEQ ID NO: 7567 - DNA, 2441 bp, Macaca Fascicularis
  misc_feature (1)...(2441): n = A,T,C or G
attgcaaaatgggcgtgagtcgctcggcttccacagtcatagcctatgcaatgaaggaattcggctggcctctggaaaaagcgtataactacgtgaagcagaagcgcagcatcacgcgtcccaacgcaggctttatgaggcagctgtctgagtatgaaggcatcttggacgcaaggtaggtgcctgcctggagagaagggttggcaggcggagctggagcggccgtgtggccaagccagccgggcctctgtcggcagcagagcgtgctcccattcggcccggcagccgcttccgcagccaaaatcctgcctctcagggggagccagtttgagaaaaacaactattgtttgggctttgatgagtggtttccaggagggatctgttttgattttcttggcacacacataaagctggttttgctgccggagggaacggtgcctaggttctaagccaaggcctggcctcatgtgtgtggcataggcacgtgcgcatcccgcttcctgggcatctgctttgtgccaagccctgtgcaccggctttgctgcaggaaaagccaaggacttggagaggcacagcgaccaggttccaccactgatgagcagggcaagtcagggcaagttcatcagtcttcccgagcctcagttccctcttctgagttaagaattaatgcccaccttagccgggcctggtgacaggcacttgcagtccgagctgccaggaaactgagatgggaggattgtttgagcccaagagtttgaggctgcagtgaaccgtgatcgtgctactgcactccagcctgcatgacagagcgagaccccatctcttaaacaaaaatgcttcttaaaacactgagtcaggggtgnnnnnnnnnnnnnnnnnnnnnnnnnnnnnnnnnnnnnnnnnnnnnnnnnnnnnnnnnnnnnnnnnnnnnnnnnnnagccttgctgatgcagtatatattcttgacccctttgtgggacttcttacaggggtgcctcatttactcagcccaccccactcaacccctcatgggagggaccgtacaagcgaactagtgcaagaactggagtgagtgagtgagtggaggaactggcctctttggcactggcaagagtgaactctgtgcaggccccacagcagcgtccggatgcgggtgcctgtgaccccaaggtctcagagtgtggtataatatcctttcgctctgccgtccgcagatagcagtgtgttaccagctcagtgggccctttgcttcatcgtgtgaggcagctgccttctgccagcaagggcaaagggccagtgtgacagcatttttgggtactcacacctggtgtgtcctgaattcttgtctggtgcccaagaggaatgaggtcacatgggcgaattgaagaatggtgaatgtggagaattgtattgagtgatgaaagcagccctcagcagagaggggagccggaaaagggatgggaagggaaggttgctctcccctgaggtcaagccacctctctgcctcatccagcctccatcttctgaaatcaagctgcctctctccgacgtccaggcacttcttcctgatgtccagctgctgcttctctctgccagttgagtctgtggtctttataggcacaggataggggcagagtgggctataggtagttttggaaaaggcaacattcaattggtaaaaagacattattcagaaggagccagtcgggaaagagcagtcacaccgggatgagtgttcttactctgggacacaggtttcaggcttttcggcttgaaggtggggttttgccagggacccgcccctgtctgcctagaatttctctgcctcctattgctgtcattggcaacatgctgagtccctgtctctaccaaaagtacaaaaagaaannnnnnnnnnnnnnnnnnnnnnnnnnnnnnnnnnnnnnnnnnnnnnnnnnnnnnnnnnnnnnnnnnnnnnnnnnnnnnnnnnnnnnnnnnnnnnnnnnnnnnnnnnnnnnnnnnnnnnnnnnnnnnnnnnnnnnnnnnnnnnnnnnnnaaaaagaaaataaaacaaaacaaaaaacaatgaatgctcaccttaatgtgggtgttaatggtacaggtgctgtggaaaacagtatggttgttcttcagaaaattaggggccaggcacgnnnnnnnnnnnnnnnnnnnnnnnnnnnnnnnnnnnnnnnnnnnnnnnnnnnnnnnnnnnnnnnnnnnnnnnnnnnnnnnnnnnnnnnnnnnnnnnnnnnnnnnnnnnnnnnnnnnnnnnnnnnnnnnnnnnnnnnnnnnnnnnnnnnnnnnnnnnnnnnnnnnnnnnnnnnnnnnnnnnnnnnnnnnnnnnnnnnnnnnnnnnnnnnnnnnnnnnnnnnnnnnnnnnnnnnnnnnnnnnnnnnnnnnnnnnnnnnnnnnnnnnnnnnnncaaaaaaaaaaaaaaaaag

SEQ ID NO: 7568 - DNA, 620 bp, Macaca Fascicularis
  misc_feature (1)...(620): n = A,T,C or G
tccccagtcnnngagccagccgagaggaaggaggccagcgatgcgactggggcggttcctttctcctgcaccccaaatgtgagggatgcaccctaaattttgctcttttcaaaataggggaccaggatctcaggggagagtagctgaggccttgctcggagtcccaggagatccacaggtccagcgtgaacagtgagaggtcagaggtggaaggctcagcaggagaggagaggaggatcagcagaggtcatgagaaggccagaatccagggtcaggctgtctggaacaggaagtaaaatgggccgagatggagcgagcccccagtgtgcttccgaggccactcccagctccctgaaacaccctgctacgtactgacccaatgccctgcgctgtgtatgagagcaccttctcttccgaaacccctgtacgagggaggggcccctgcggagaccgtgccctgccatccagttctcaagggcattctaaaaaactagtgacaaagtagggaagcagctgagctggaaaggagttctgaggacgatggaaccttgggtaaggaggaagaaggctgcccacccgcccttttctggcagccaccctccctcacactgtccgttcct

SEQ ID NO: 7569 - DNA, 756 bp, Macaca Fascicularis
  misc_feature (1)...(756): n = A,T,C or G
caagctgatggttgccctggcaaagggtagaagagcagaggatggctctgtcattgactatgaactgattgaccaagnnnnnnnnnnnnnnnatgacgctggagtgaagaggaaaggaactgatgttcccaagtggatcagcatcatgactgagcggagcgtgccccacctccagaaagtatnnnnnnnnnnnnnnnnnnnnnnnnnnnnnnacannnnnnnnnnnnnnnnnnnnnnnnnnnnnnnnnnnnnnnnnnnnnnnnnnnnnnnnnnnnnnnnnnnnnnncagaacaaacccnnnnnnnnnnnnatgaagggcaagggnnnnnnnnnnnnnnnnnnnntcagaatcatggtctcccgcagtgaagtggacatgttgaaaattaggtctgaattcaagagaaagtacggcaagtccctgtactattacatccagcaagacactaagggcgactaccagaaagcgctgctgtacctgtgtggtggagacgactgaagcccgacacagcctgagcgtnnnnnnnnnnnnnnnnccatgcttccagctaacaggtctagaaaaccnnnnnnnnnnnnnnnnnnnnnnnnnnnnnnnnnnnnnnnnnnnncccaacctcattttagttgcctaagcattgcctggccttcctgtctagtctctcctgtaagccaaagaaatgaacattccaaggagctggaagtgaagtccatgatgtgaaacactctgcctcctgtgtactgtgtcataaacag

SEQ ID NO: 7570 - DNA, 147 bp, Macaca Fascicularis
ggtacgttatgcattgggctgctgtgtatttcttactatgtttcacaggggaaactgctgtcctctctgcagtacaatataaatcaacaatggccctaaaaaaaaaaaaaaaaaaaaaaaaaaaaaaaaaaaaaaaaaaaaaaaaaa

SEQ ID NO: 7571 - DNA, 744 bp, Macaca Fascicularis
  misc_feature (1)...(744): n = A,T,C or G
ggttactttactatactgtgtatggtgtatagccacagaaagtcagnctgataaattttcaatgtgtaagtgtgatgcattcaacccagattattgtagacttattatatttcctctgatgtgtaaaatgacaaactcttcttttgtttttaatctttgtctttaatccatgaattaggtgcattatctcctgttgattcttttatatctgcactcattttatgagttctgacaaatgttttctaggtgttgctattgtatgagtcataattggtataattttaaagaaaaattgtaatattggtttttggcgaaatatattagtagtagtatattttccaaaatgattttattgtagtatgaactgctaagtgagtcccgtgtccaggagagtgtatttattactcttaaacatgcaattccannnnnnnnnnnnnnnnnnaacaaagaatattaccggtctccgcaatcagtgatctttataaaagtacttttaaaaaatgatgaattgtcggccaggcgcgggnnnnnnnnnnnnnnnnnnnnnnnnnnnnnnnnnnnnnnnggggcggatcacgaggtcaggagatggnnnnnnnnnnnnnnnnnnnnnnnnnnnnnnnnnnnnnnnnnnnnnnnnnnnnnnnnnnnnnnnnnnnnnnnnnnnnnnnnnnnnnnnnnnnnnnnnnnnnnnnnnnnnnnnnnnnnnnnnnnnnnnnnnnnnnnnnnnnnnnnnnnggcagt

SEQ ID NO: 7572 - DNA, 731 bp, Macaca Fascicularis
  misc_feature (1)...(731): n = A,T,C or G
agagnnnnnnnnncaggaagtgccttacaatgtacagcagaagacggcagtatgggaggaaggaccgggtggnnnnnnnnnnnnnnnnnagaagcttctggtgcccaaagaatcttatatgaaactgctgattggtccgaagggccatgtgatctcccagatagcacaggaggcaggccgcgacctcatgaacatcttcctcnnnnnnnnnnnnnnncacctgtctgtgaagctcctcaagtgaccaccctctactgatcctcccaggacattccagctcannnnnnnnnnnnnnnnnnaccagatctgtcnnnnnnnnnnnnnnnnnnnnnnnnnnnnnnnnnnnnnnnnnnnnnnnnnnnnnnnnnnnnnnnnnnnnnnnnnnnnnnnnnnnnnnnnnnnnnnnnnnnnnnnnnnngttggaagnnnnnnnnnnnnnnnnnnnnnnnnnnnnntggttcctctgccnnnnnnnnnnnnnnnnnnnnnnnnnnnnnnnnnnnnnnnnnnnnnnnnnnnnnnnnnnnnnnnnnctccagctagctatgggcccagagtttctcccnnnnnnnnnnnnnctggtagggagattttctcttcccgccctcacttccttcaccttgaacttggatannnnnnnnnnnnnnnnnnnnnnnnnnnnnnnnnnnnnctgctccccaattcttgatctctcccaccccatccctctccccagtcttggatactaataa

SEQ ID NO: 7573 - DNA, 696 bp, Macaca Fascicularis
  misc_feature (1)...(696): n = A,T,C or G
aagttctatatgnnnnnnnnnnnnnnnnnnnnnnnnnnnnnnnnnntttaggaaataaatcctctccatgacaaaaatgaacatgaacggagtggcattttgttnnnnnnnnnnnnnnnacacnnnnnnnnnnnnnnnnnnnnnnnnnnnnnnnnnctaatgtttaattgtaacatagatacaacagggtggccttgttttatataannnnnnnnnnnnnnnnnnnnnnnnnnnnnnnnnnnnnnnnnnnnnnnnnnnnnnnnnctggcttgagtttgtatcaaaatagtccttcaacttcgcactgtgccttaagtaattcctaacaaaaggtactaggnnnnnnnnnnnnnnnnnnnnnnnnnnnnnnnnnnnnnnnnnnnnnnnnnnnnnnnnnnnnnnnnnnnnnnnnnnnnaagggccataactatataattaccactgctggaatctggtacaaaatacgttttgtctactgaaaacatacacagtaaagggtgttaggtaggttctgtccagttcttagggatttttttcacattataatatttttaccctaaatatgatgttaagattattatatactgtattttcttctaaattaaccctaatgtttaaaaactcactttccccctttaattgaaggcattgttttgttatatgcagtaatgatgtttaccagagattatnnnnnnt

SEQ ID NO: 7574 - DNA, 775 bp, Macaca Fascicularis
  misc_feature (1)...(775): n = A,T,C or G
ctttctcacnnaagtgttgccttttttctttccaaaatctgctttgatacttaggacctctctggactaatttctcnnnnnnnnnnnnnnnnnnnnnnnnntgataagttagaggcagtatccttaatattcattctaaacgagttaacgacttaacttgaaattgggcccaaggagtgagagctacaaaaatagaaannnnnnnnnnnnnnnnnnnnnnnnnnnnnnnnnnnnnnnnnnggcaggaggcacggaaggagctgtgctccgttctcctcactatnnnnnnnnnnnnnnnnnnnnnnnnnnnnnnnnnnnnnacccagactgcaggcaggaactgacttacacagtctctggcatttagtcatccgtgattgttttatcattctggactgtgcagcgccacctgccaccgagatctgcattccgactgcctgtgagcgggtgtgggggccaggggctggcctgctgaagtcttcaaactcgcactcggagctcctttgatacctcagggctggccgtgaggtggcagctcacacnnnnnnnnnnnnnnncacacctcagcagcagggagtccactgtcagcctctttctgttaaggcttttttttttcctttggcctgggaatttttcccantttttatgaagagttttaaactgtttcattttgtacgctgtgcttcaaagccttaactgtcatatcttgcattatgttgtttgtacataaatatactggcctagcagaggcaaaacaaagtgaattttattttac

SEQ ID NO: 7575 - DNA, 2115 bp, Macaca Fascicularis
ttttagtaaagggtagagaaattgaatattcttaaataaacacatttcaaatgtagtttgtatacttttcatacgtccattgagttactagtatatcaaaatactggagtatgtaaattcctaaaattgtcatccataactcttcaaattccattcatatcactaccctttcttctgtcatcactaaaaagtgccaaccagaatcttaaagggttctatttagtgcctagataagatctaggttaactagatccaaaacaatagaaactgtcagtaaatgcaagtttatttcagtatacacctgtatagcagtatattccttttgaaagatacaagttaatcacaagacaacaagtttagtacctggggatttgttttattcattctcgcttttcatttttgctttttaaatagtacagtttatctttgattttagtatattttcatgacatcatatgaattttttctcttactttgtacttaggctccacctcagtagtttgacaaaggtagaatgagttcattttgagtcaaaaccataaaagttactttgtatagacattggttagaatctgtgacatttaacctttcttctggtaaggtttcaggaagtctggtgcatttttatcagaagaattatttgtttgacttaagtagcaattatttatttatataaaattcatatgtagaaagttgtcaatttttacctgaagtcacagtaaatatttgacttaatacctaaaaagcaattaatagaattttcaaaataattatttctagtttggaagcagtcctatatatatccaatgtatagtaaaggaaaaaactttataaaggagttgaatttttaatgtttttcctgttattttaagttgcatgtattttaaagctctgtgtattctttccataatcaaagttgttagcaaatgacagatgaagactatttaagtaaaaaaaaaaaagattctctacaaactgatactccggaaaatgttacatcttctaaatcatacagctgatattacccttatctttgttgtcccctctcctactggacgtagtttccggtgctaatatgaccctcaagtaggctgttgagaagcattctctcactttcagttgcagcactagtgaatggaatgcttcccccttccctcctttacagtcctgttcttatggttagaatttctcctactacacaaacacttcccagtgctctttgcttgtcccttaaaagtgggtctttctcaaagttcggattttagagtcctttttgcagcctttctgacaaggaatatctgttcactaacaagcaacctatctctccaatccagtaattccatttcctgcaaaaccgcattgtaagtgcctttccccagccccccatgttcttaataacctggaaattttaactcatttctttaccctccaaattgtaaaatctctggttcactaattgggtcaaagacagtctttttagaactttttttctccctgaagtagtgtagtactgaggcattaaaacaggagtaactggaagatcagctatttcccaagcagctttcatagctaagagcagtctgcaagtatatgtactagttacaaaatgaaagttataatctatctgatttaaaatctaaattcctattctgaattaaatgatttagtacaggttgttttctgtattgttttagtaaccctccctcattgtagaatttgtaatcaacctttgtcataaatacacatgccaaactattagaaaataatttgccagatgaatggatagggtaatgtattaagagtgagacagcagttctgagcccctggctggagtctagtagaggaagtgccagaagatcaagattaacataaactttcagatgtaattaaaacatatcatctaagtcagtattcaaatttgtcatgctgaatctctttgaagacaagaactgctcttctggttactcccaaaatacctgtacacattctagatctgactgttacataattataaattggtatttgctaggtagataaaagacattctgaaacatttctatttgtacttttccaataaacttgactatcaagatgggaaaaaaaaaaaaaaaaaaa

SEQ ID NO: 7576 - DNA, 763 bp, Macaca Fascicularis
  misc_feature (1)...(763): n = A,T,C or G
tacaccgtattgaagcagtttggggggctcccggaattctacaacattcctcagggatacacagtggagaagcgagagggctannnacttcggccagaacttattgaaagtgcaatgtacctctaccgtgccacgggggatcccacccttctagaactcggaagagatgctgtggaatccattgaaaaaatcagcaaggnnnnnnnnnnnnnnnnnnnnnnnnnnnnnnnnnnnnnnnnnnnnnnnnnnnnnnnnnnnnnnnnnnnnnnnnnnnnnnnnnntgtgaaatacctctacctcctgtttgacccaaccaacttcatccacaataatggctccacctttgacacagtgatcaccccctatggggagtgcatcctgggggctgggggatacatcttcaacacagaagctcaccccatcgaccctgccgccctgcactgctgccagaggctgaaggaagagcagtgggaggtggaggacttgatgagggaattctactctctcaaacgcaacaggtcgaaatttcagaaaaagactatgagttcggggccgtgggaacccccaacaaggccaggaacactcctctcacctgaaaaccatgaccaggcaagggagaggaagcctgccaaacagaaggtcccacttctcagctgccccagtcagcccttcacctccaagttggcattactgggacaggttttccttgactcctcataaccactggataatttttttatttttatttttttgagactaaact

SEQ ID NO: 7577 - DNA, 105 bp, Macaca Fascicularis
gaggaggagccccctgtgtatattgtgtgacaccgctttctgtgttaaagaggttataacacagagagaaaatatgtgatgcacatttaaaaagtgagagagaca

SEQ ID NO: 7578 - DNA, 2294 bp, Macaca Fascicularis
gtataagatacctgggagaggtagcataaggattatcattgctaatacttaggacaatgaaataattctctttattgagactacttgacaaataactttatgctaaaacttttgtcacctaagtgtttaggaggctttttcttattaaaggttgggattggtcctgtcatgtggttttagagatactaacagagggctagcgaaagcatcttctgtagaggaaccacttatgggaacagtctgtgagattggtgtcctgagaagaccaagatatcatgaatgaggaataggggcctgaggagagaggggaagggtacagagaaaccatctacattccatggaatgtttttaataagtaggcaagaaaaatgccactaatcaaagcattaagtgtgtccagtaatgaagaacatcatgtaaaacctttccctaaatccaagccagtggccatttttgtgggatcttactaatcatgtgtccttacagaatcattccaggaaccaggccattgctacagctagagtggagaaaaacagagtgactcaaaagccatgggtaccatgataatcagttttgttggttgtatttgtcaatttgttttttcattagtgttgaagtgctttgcaaaggcttcaggaaacagagttgtgaggagaaagaagaaaatggctgctcatgtcagtacccttttgaaaggtgtctctggctagaaacattcttcagaaaagcaactttctctatttagaaggtgacctcctgacagcattcactctcagtgtgcgggaaaagaccacaacaacagtcctttctcaattacatgaatgctgttaacgtgatcaaaccatggcatcactttgctgaaatgtttctgcacagtcctgcctcttaggttatagtcagccagaaaaaaacataaatcatcccttttctgatttctatagtttggcaattgagagagcaatatagagggtggcagattataaggagtcccacaatagaatacccaacaaagtggccaccaggccttctcagacagccatttgctttgggttttacttccagacgtttcgtatttttgctccaaatgtttcatggcttataccctaattgatttattttatatccatggacctttctccgctttcttgacttaaagtttacagcagtacatctcatcacctaggaatagattatcaggccttgccaactagtatgcagggacggcactgaaaatggatgtgcatcttctttcacattaactacttacctataagaagttgctctgagcccattctctttagttcaccaccagatggatctttctctcacaagctagcttattccaaattatttgtcttatcaatcagccagaaaatggtcatatcaaatgttctttgttctaaaggttgcattttcagttatagggaaaaaatgttttctctaagatagaagaagttatttcagtattagctataggtgctacctacctcgtggggacatggccctgtttgtgctaaccgttacaatgatctttaagaactctgcatccaaagagctacttcatgacactggccatctcagtcacacatgtgaagtcgatttcactttataactaaccagtcccacatattaagactcctaagtggccatatgcatcttttttggtataatatataaagtcagcagggactcccctttcccttagggcatactactgtcagaactgcaagatgtgaatgcagctcttatggcttggagtgtctttctggaagaaattgcctttttctttttcatattagcaggtaaaaaaaatcattcacccagtttgaagcatcgaagaaaatagttgctgaggttttttaataaccattcctactatctgtgttcccttagatactcctgtaattcttaatgtgaatagtttgttaatattactgtaaagtattatattgtatgatttgaagacagactatatgtcattttattatactccatcaatctataatatattagactgatgctttatctaaaatgctttgagtttgtataatatatcttgacaaattttactaccatatgttatgtaataaatgtgtatttttgtacttgcagaaactgctgctaacttttaaagttgtttggttttcaaggcactgataatggatatgtatgaagtccatgctgtctgttaaataaaatgccattctgcagaagaaaaaaaaaaaaaaaaaaaaaaaaaaaaaaaaaaaaaaaaaaaaaaaaaaaaaaaaaaaaaaaaaaaaaaaaaaaaaaaa

SEQ ID NO: 7579 - DNA, 200 bp, Macaca Fascicularis
  misc_feature (1)...(200): n = A,T,C or G
agaaaaggggggagcaganggggagccaccctattcatccccatatttccccctctcataacttctctccatcccaggaggagttctcaggcctggggtggggccccgggtgggtgcgggggcgattcaacctgtgtgctgcgaaggacgagacttcctctggaacagtgtgcagttgaaacatattgaaaactatacca

SEQ ID NO: 7580 - DNA, 729 bp, Macaca Fascicularis
  misc_feature (1)...(729): n = A,T,C or G
tgacagggatnnnnnnnnnnnnnnnnnnnnnnnnnnnnnnctggacggatggacaggccagaaaggaagtaaggacagaaccacgnnnnnnnnnnnnnnnaaagctaaggnnnnnnnnnnnnnnnnnnnnnnnnnnnnnnnnnnnnnnnnnctccctctggcctccaaaacccctgtgatgaagcctcccaaccccagcacctctgaatgtagccgaatttgaggattcggcttttaaaggggtgattaagttaaaatgaggcctttcgggggtggagggcccccatgcaanntgatttgtccttctaacgaggaaatccgggcccacagagacaccagcgannnnnnnnnnnnnnnaagagtatgtgaggccactgcgagaaggtggacatctgcaagccgaggagagatctcaggagaaacccaccgtgctgacaccttgatcttggactttcagcctccaggactgtgggaaaatnnnnnnnnnnngtttaagccccnnnnnnnnnnnnnnnnnnnnnnnnnnnnnnnnnnnnnnnnnnnnnnnnnnnnnnnnnnnnnnnnnnnnnnnnnnnnnnnnnnnnnnnnnnnnnnnnnnnnnnnnnnnnnnnnnnnnnnnnnnnnnnnnnnnnnnnnnnnnnnnnnnnnnnnnnnnnnntaaaaggtatctctttgtggtcttgactgccattcactaatcattaatgaacatttttatatggtttatgt

SEQ ID NO: 7581 - DNA, 711 bp, Macaca Fascicularis
ctatccggggcagacagtgctgtgcctttcttaacttcaggatgttccaaggatgctgctggattgcgtgtgtgtgtgcctgaccctgatttctgcaacctccagatttctttcttgacccttcaaagtggaacagtccagtgacaaaaattttagagtttgagaaggtcacagaaatcctccagttggtgcctccacagtcttcattttacagaggaactcaggcctaatggagttaatgcaactagatcagggttttggttctgtgttgtttctaccatcagcacctgtgtgctcagttcggacacttttcccagagaagtcttggagtagagaatcctactcaaatgtcactgtatattttaagtgttcctctcttttccctttgcctcccccattgccttttcttcccctgatttctcctctggtcatctcctctcccttcggcgtgtaagccatgggaaggcgatcgaggggaggacagcttctggttaaacacaggtccctcttccacatcaaatgaacattggcttcctgggacagaaggccttcaaaggagggattgcaaagcaaggcaaagagttctgtcttcattttccccaccaccatgagataggactgacggagagggtggtggggcaacactgcttaatggatgcattttcacatcatttcaagttttagccctcatgactgtattttctaatcaga

SEQ ID NO: 7582 - DNA, 732 bp, Macaca Fascicularis
  misc_feature (1)...(732): n = A,T,C or G
cagcagtccctccacctccataaggacacactggacagaactccgcagctnnnnagnnnnnnnnnnnnnctacctgttggggttcagttgcccgtagtttgaggccttctctcctccctnnnnnnnnnnnnnnntcatgttagcagttccgtcttttgtgtggccttgggccagcttccctgacaccttgaagatggacttcttgtgagtccccagggagaaagggacaagagctaagatttttgcatcagcccttctggcagaaggtgcggtnnnnnnnnnnnnnnnnttagtggacttgggatttgtggtgtaatcatatcattaatgatccagggtgtgggaaaaatggaggtccttgaagtgnnnnnnnnnnnttgtatttaagacactgtcagttgccagatgcagggttatttttggagacgtctagagaggaaaaataaagctgccaatcatactgttgatatctgtctggctgtgtgaggcacccctacctcatgggggtgtcgtgggattgatgaactgnnnnnnnnnnnnnnnnnnctccccaaagcttattaaccccttaactgtattggggcggggtgtgtgtgtgcatggaagatgcctgggctgtctttgctatatgtaaatagagccactggatctttatttttgattaatttgttctgattttttggtttgttttttaaggaactgtaatgaacaaatgtcaggatatccnnnnnc

SEQ ID NO: 7583 - DNA, 758 bp, Macaca Fascicularis
  misc_feature (1)...(758): n = A,T,C or G
gccaggcacccggctcacagtgctagaggacctgaaaaaagtgttcccacccaaggtcgctgtatttgagccatcagaagcagagatctcccacacccaaaaggccacgctggtgtgcctggccacaggcttctaccccgaccacgtggagctgagctggtgggtgaacgggaaagaggtgcacagtggggtcagcacggacccacagcccctcaaggagcagcccgccctcgaggactccnnnnnnnnnnnnagcagccgcctgagggtctcggccaccttttggcacaacccccgcaaccacttccgctgccaagtccagttttatgggctctcggaggnnnnnnnnnnnnncgnnnnnnnnnnnnnnnnnnnnnnnnnnnnnnnnnnnnnnnaggcctggggtagagcagactgtggcttcacctctgagtcttaccagcaaggggtcctgtctgccaccatcctctatgagatcttgctagggaaggccaccttgtatgccgtgctggtcagtgccctcgtgctgatggccatggtcaagagaaaggattcctgaggctagctccaaaaccatcccgggtcattcttcatcctcacccaggattctcctgtacctgctcccaatctgtgttcctaaaagtgattctctctctgcttctcatctccttatgtgaatacttccctctttttctatttccctgaagattgagctcccgaccccccaagttgaaaaagactaaaccnnnaaaaaaaaa

SEQ ID NO: 7584 - DNA, 682 bp, Macaca Fascicularis
  misc_feature (1)...(682): n = A,T,C or G
gtggtggtgtttaacatgcttctctacccttgaatttcctgtcaattgcagttaagacaaggggactgcaagcttcacaggtgtgcaatctcatggggcccagcatttagaagggctctgtgctgggcttaatgctcggtcaggtctgccttgtatcttgataactttacctttgaacttgtgttttggaaggactgcacagcaggggcaggagcacaggagatttgcacgatatnnnnnnnnnnnnnnnnnnnnnnnnnnnnnnnnnnnnnnnnnnnnnnnnnnnnnnnnnnnnnnnnnnnnnnnnnnncaggatgcacgggagaccagcaagactcgaggccaggaacaggtcattgtgtgtgtctgccactgagtctgtgggaaagccacgctttccacgtgaggtccacttcaaacacagaaagaaggcagtggccttgtgaataacaccaacaaccaaggaccccattgtactttttcttactcattctactttcctgtattagccaagcacttacagtgaaaacaatgcatggacggaaagggggaagacaggaaaagccacagttacttctttcagttcttccatattcaccagtaagctgaaggcagtgtgaagaaggcagtagcacggccagtatcaagaagtgaaatcaaaatccttgatttagttttgcac

SEQ ID NO: 7585 - DNA, 540 bp, Macaca Fascicularis
  misc_feature (1)...(540): n = A,T,C or G
agagaggctcaacnnnngacannnnctngtcaccctgccaaccnnncagcatgtggcctcaccactgagaccacagnnnnncagccacaacnnnacactgctcactctgtacctgtnnnnnnnnnnnnnnnnnnnnnnnnnncaagtaccctagtggtctccggtagtgcctagcacagggctggtgagagctagtgaatatatgccctctcctgctggagctggaccccctcacccacaggcaatcatttgtttgatgcagaagaggcttggaacagggaggtttgcacctgctggccaagttctgcctggcttggacttgccatcctcagggtgggtgaacattgttgctggggttgggggcctggaagggtgagatactttttggaacccagcactggggaacttatgtggaaaatgggtgtgagtgaggctgatggcattggggtgttggggagacctggcagtgtgagacgcagagggtggtgccacnnnnnnnnnnnnnnnnncttagaaagtagccaagagggtcgggcgcca

SEQ ID NO: 7586 - DNA, 761 bp, Macaca Fascicularis
  misc_feature (1)...(761): n = A,T,C or G
aagcacaatgnnnnnnggttacctcatnnnnnactgcatgcagaaaagaagactgaagaatgcaactatacctagatgaacnnncccacaagataaagctggcctcttgatctcattcagattccaaagagaatcatttacaagttaatttctttctccttggtgcattccttctccctaataatcatttactgttcctcaaaaaattgtctacattacccatctcctcttttgcctctgagaaagggtatataagcttctgtaccccactgaggcgttgaggtagttattctgtggtccccagccctgtaccttaataaatttgtatgccttttctcttattaatattctcttatcagttgattttcagtaaactttcagagggcaaaagggaggttttctcttggcccctacaccagtagcagtttctgatatgcctacaaccttaactaatgctgggtagaaccattttaaataatctaactgtactaataaggatttgatttcttgtttatagaaataacttttcaaaaagttaatcagctggttagtcagtacaatacatgacctatttcccccactgatttgaggaacttatcatatactgaatatatgagccactgcacccggcctatttggtgattttcttgctactctttatttcaatgagttccttacagcaatgcttgaagtattttcaaagtactccacttaaatgtcataaagtaaatgaagataaacttttcattaaaatactttaa

SEQ ID NO: 7587 - DNA, 595 bp, Macaca Fascicularis
caaaaagagaaatttatgcgaaagctggttttggatgatcataattaagaactgtcaaagttaaaggcagaaaaacttcctggtcactcactgctcatctatttaaagttacctggattatccatattagtctctgaaaatgatttaacaaaggacccccagcaggtgatggcagttagtaattttaaaatatgacacaagttaaactgtttataaaaaaatccctcaaccaaataaaatacaattaaagataaacggttgccggacaatcatttctccagcttccaacaacaggtaaattaaggtgtatgtgtttccacacacacaccacagatccccctttttgaataccattttaagacaagatgaaacctagaaggttgattacagcttaatttttattattgagatggaggagtaaacttattgtgttttgagctttgttagtgcaaataacaatctggtggtcacttactaaattgattacagcatccagaaaaaataaatatttccaattatgggaaagaccggttattttaattctgacattcttagggatttaaatcagaatggacctggagtttccaggagaaaa

SEQ ID NO: 7588 - DNA, 1027 bp, Macaca Fascicularis
  misc_feature (1)...(1027): n = A,T,C or G
acattctgtacatgtgctannnnnnnnnnnnnnngcnnnngcatgatatgttctccctccttttatgagtcactccacttttgtgattacacagatagnnnnnnnnnnnnnnnnnnnnnnnnnnnnnnnnnnnnnnnnnnnnnnnnaaaattttaaaaagaaaagaaacaaaaggttatttaataatgnnnnnnnnnnnnnnnnnnnnnnncttgtatgttgcatgtacttgtacagtttgcttgttaattactataccgaaataaccaagaaatctaagccatccatttttgttatagacatnnnnnnnnnnnnngccnnnnnnnnnnnntgggtctgtggtgaanntgtctatagatggacntnttttttaccctnnnnnnnnnnnnnnntnnnnnnnnnnnnnnnnnnnntaataaatattttggtgtagattcctactgtggggctgtaacacatgtagacactgtgtacacattaggttttaattcatagacannnnnnnnnnnnnnngtgaattatttattattatttacacatgccagaattatctgcccatcattccacaggnnnnnnnnnnnnnnnnnnnnnnnnnnnnnnnnnnnnnnnnnnnnnnnnnnnnnnnnnttctactagattccgttctgtcttnnnnnnnnnnnnnnnnnnnnnnataattgggtagtatctttctattttgaccacttgtcttaacactcccctgtgcttttaaatgaaattccaactcatgtatgtaannnnnnnnnaataaaatttacttttcatgtcagtcagtagccatctgtgttctatgnnnnnnnnnnnnnnnnnnnnnnnnnnnnnnnnnnnnnnnnnnnnnnnnnnnnnnnnnnnnggaggctggggtttgttgtctgctgcgggcatttgacttgnnnnnnnnnnnnnnnntattatgtcttaatcaatggcccaaagggtactttgcatcacatacaagttttcactttgtcnnnnnnnnnnnnnnnnnnnnnnnnnnnnnnnnnga

SEQ ID NO: 7589 - DNA, 733 bp, Macaca Fascicularis
  misc_feature (1)...(733): n = A,T,C or G
gcacctcattttaccctctactatccagtcagcatttatattttcgtagttgtctttctcctcttccccggtttgtccaaatcagtatccaaacaaactacacacgttccatttggttgatgtctgttagatctctcttaatcttttcccctctgtgtctattttgttccccgtattttacttgaagaacaagtcatttgtacggttcacgttttctacatccaggattttgctttttccatctcctttaataagcagatatttagacctgcagccttgttcaggtcaggttctattttttggcaagcgagcttaatgggggattactgtgtttttcacattgtatcacgccaggagctagggagcannnnnnnnnnnnnnnnnnnnnnnnnnnnnntagggtaacagttgaccagggaatgccagcaaatacatacaaaagaaatgagacactatcaccttttggcaacctctaatgaaataatggattctggcaatgatcactagtggctgttaacatcagaaagagagacagctagacaatgcgtgctccctaatggggtgcttccatcagacagcacaggtttgtcttatcaagtattcttggagtaatggggttggtgtgtatagatgaaacatgattgcctatgagttaacaataacaattgttgaagttcgatgatgggtgtgtggcattnnnnnnnnnnnnnttctacttctatatgtgtctgaa

SEQ ID NO: 7590 - DNA, 683 bp, Macaca Fascicularis
  misc_feature (1)...(683): n = A,T,C or G
gctnnnnnnnnnnnntccagcatccacacaagtanctgctccactacctggtttccctcnnnnnnnnnnnnnnnnnnnncagctggcagcggacccctgttgccgtcactgcctgggccctgctgcgggacagctaccacggggggctgnnnnnnnnnnnnnnnnnnnnnnnnnnnnnnnnnnnnnnnnnnnnnnnggccctgcaggtctacggagttgaagtgcccgccgaagtcgaggctgagaannnnnnnnnnnnnntttataccatggacacagagatcccctaaggccctggcccaggcctgcccaaagagaagcccaggatggttggctgcctggggacattgccaccacgtcgccatgacggctggtccccagaggaccggctgggaggacnnnnnnnnnnnnnnnnnnnnnnnnnnnnnnnnnnnnnnnnnnnnnnnctttgacagtccnnnnnnnnnnnnnnnnnnnnnnnnntgggagccgcacctccagtgggcaggccgggannnnnnnnnnnnnnnnnnnccaaggcagccacatctgcttttgtcctttgagaggactctgactacaacagaggcgtgacatcaatgaaaggaaaaccatgaaatcgatgagactgaatccctagggattttttaaagcnnngattcatggcgagaatgaatgtgcaa

SEQ ID NO: 7591 - DNA, 3444 bp, Macaca Fascicularis
acccacatccgggagaggcgaggagagcggaagtggcgttggtctggccggagcccttgggtgaaattgttaggcgtggagagggagtgatgtcttccagactcggtgctgtacccgccacttcgggacccacaacctttaagcagcagaggagcacgaggatcgtgggagctaagaacaggacccagtgctccataaaggataatagtttccagtacactatccctcatgatgactctttaagtggttcatcgtctgcctcttcgtgtgaaccagtgagtgattttccagcatctttccgaaaatctacctactggatgaagatgagaaggatcaagccagctgctacttctcatgtcgaagggtcaggtggagtatcagccaagggaaaaaggaaacccaggcaggaagaagatgaagactatcgagaatttcctcagaagaagcataagctttatgggaggaagcaacggcctaaaactcagcccaatcctaaatcccaggcccgtcgtattcggaaggaaccaccagtttatgcagcaggcagtttggaggagcaatggtacttagaaatcgttgataaaggcagtgtctcctgccctacctgccaggcagtggggaggaagaccatagagggtttaaagaaacacatggaaaactgcaagcaggaaatgtttacttgtcatcattgtgggaaacaacttcgttcactggcagggatgaagtatcacgtcatggcaaatcataatagtctgcccattttgaaagccggagatgaaatagatgagccaactgagagggaaaggcttcgaacagttctaaagagactgggaaagctcaggtgcatgcgtgagagttgctccagtagcttcaccagcatcatgggatatctctaccatgttagaaaatgtggcaaaggggctgcagagctggaaaagatgaccctgaaatgtcaccactgtggaaaaccatataggtcgaaggctggacttgcgtatcacctgaggtcagagcatgggcctatatccttctttccagagtcaggacagccagagtgcttaaaggagatgaacctagagtcaaagagtgggggccgagttcagagacgttctgccaagatagctgtataccacctgcaggagctggcctctgctgaactggccaaggaatggcccaagaggaaagtgcttcaggacctggtacctgatgatcgaaagttaaaatatactcgcccagggctgcctaccttcagccaggaagtactacataaatggaagacagatatcaagaaatatcatcgtattcagtgtcctaaccagggctgtgaggctgtctacagtagtgtatctggccttaaagctcacctgggctcttgtacattgggaaactttgtggctggaaaatacaaatgtcttctatgtcagaaagaatttgtgtcagagagtggtgtcaagtatcacatcaactctgtccatgctgaggactggttcgttgtaaacccaacaacaaccaaaagctttgaaaagctgatgaagataaagcagcggcagcaagaagaagaaaagcggaggcagcagcacaggagcagaaggtctctaagaaggcggcagcagcctggcattgagcttcctgagacagagctgagtcttagagtagggaaggatcagaggagaaatgaggaactggtagtgtcagcctcctgtaaggaaccagagcaggagccagtgccagcacagttccagaaagtaaagcccccaaagactaatcataaacgaggaaggaaataggcagtcagtgtaaaaacgctcctaggaaagcagatgtgatgctgttgtcacggggacctgtgctgggaggactgagtgaagattctttcagctgtttgtataaggctgtgactttctcagctccttcctcctgtgtaaatttcactgtcttcccttcttacactttgattcccccctccccttttagtaggttttcctgctattcctcctcaagtcctcttgtttttttcttatcttcccaaagagctccctctcaaggccaactataggctcctcttgccctgtacaaaactaagaaacctctttggttgtcctttccttcctggggtatagaatgttcttggaagctccattgatttagtagctgctccatcatctagcttgtgaaaccattccagattaattttttaaaaccataactgatttgtcattttgtatttgtgatataacaagtctagaagctagaactgttgtcattcatataataagcttactctgtctccttgggaaacaaactttatggaggctgtttgtcctctcaatatggttttaagactgaaagtaagaaaatgcatttaggatgaaaaatctagaactaccctatgctgtttatactgggaaatgctttgtaccaagtagcagtgactagacccacagacatgaaaagcagccttaggagtaacgtgacccaaacattaaaatgacaggaaagagaaagtagaagcagcaataaatattgccccaactttcctggagcctgaggcctcatccatagctatgatcacttgccttctgaagcttatttttgctgctttggttttaagaattgagaaatatcacattgcccctgatattttgacagtctcctagtgctcctggtagtgccactgagggaaaaccaaggtgcgcattccttctccccggactttacctcacttgttagtttacaccccactgttttcacccatccccttagccaacctctgtctttttgaattttctgagaatattgtcctgtcctcttttatatatggagttctatcctctttgtatcctgagactttgacaccagatgtagatatttatctggagctggaaagaaaaattctttttctgtacctcatgcctacctggtaatgtttaatgggttatttctctttgagggtgactttgtctggaacattggttagagcagctttgttgtcgtgtttctggattctcttccccgttttgcgtaaatattggtcttatatattcttgcctattttgtggcatatgccacataaaaaatgaaccctgatacagacaagtactaccttttcaaattctgaaaggctattaccactttaactctctgtgctcctccaaatagctttaaaatgtgggcttttgtgaagaccactttcaaacaagggagcaccgaaacctgaattggttactgccagaataggtagttttgaaacaagttaaggacatggtatgcgcactctgcattttcatgggcagtgtgcatttaaagccctttcagtagatgagagttgtcagggaggagaaatgaagaagctatgttaatttctggtgagtaagacctggggaatgtttggcaatgacaaaagaaataaatgactctcagaaaaaaaaaaaaaaaaaaaaaaaa

SEQ ID NO: 7592 - DNA, 722 bp, Macaca Fascicularis
  misc_feature (1)...(722): n = A,T,C or G
tatacttaacnnngnttcnnnnnnnnnnnnnnnnnnnnnnnnnnngctgngtcttaaagagctttccctagccactgacagcccggtggaggtcattgtcagggccccaggctggttccagggtcaggcagcctgtagagcatgagcatctctctatctgtggctacccttgttgggtgggctcttagactgatggggtaggatatgaagtgaaagccttcaaatgcaagtaaggtagcttgggctccttaattccaaacgtcccatgagtatatcaagatgaataaggaccaagggacctctgtgactcannnnnnnnnnnnnnnnntccggaagtagnnnnnnnnnnnnnnnnnnnnnnnnnnnnnnnnnnnnnnnnnnnnnnnnnnnnnnnnnnnnnnnnnnnnnnnnnnnnnnnnnnnnnnnnnnnnnnnnnnnnnnnnnnnnnnnnnnnnnnnnnnnnnnnnnnntaatgggccctttatctttggtgtcccctaggagtgtcccgttgttttattgctttattcnnnnnnnnnnnnnnnnnnnnnaaattgttgatagggcccaaaaccctacagaaattctatgtctgtaaaaaccaacaaaggcattggacttgtgtgaatgtgaagggtttttttagtagtaattttaaatttaaatgtcttaagtgatcatcagtgttctttttacttataaagttggattcttttttagaa

SEQ ID NO: 7593 - DNA, 1877 bp, Macaca Fascicularis
gtatttatcactcattaaacttgactcagtgaggactctttatttctctttccccctctccaactttttaacaatcactaatttaacactttgtgaagtaagtactcaagtacaaagtgatctctttcatgaactttgcatagctgttgaaaggattggtgtcaggctctctcaaccctgggagttaccaaaatttagcaattattagttgtgataagcttaaatgccacattgctaagtaaaattgttaccaggaattcatcaaggaggaggagatagacctgctcacacccttagacccaaataggtgctgctggttcatgctttctccacaaatcggcagttaggtacttccccactatagtcacagttgagcccattttaacatatattcaaagaagctttttagtttctactcctgaattgtagtgttccagttatttgccttcctgggtaagaaaattttaatccaagtctgggattctctggcacctgtcttttccagtccttcaatgagttggcaagattagggtaggtcaaatttcaatgctcaatttgattttttgaattttaaatagcactttatttcatgctgaccaccaacttaatttatacattttaaaataaaattatcctagaagttttgtaaatacgggaaaattttaattagtattggaggtcattagattggacgcaagtttaaatataatgatctcttcatagcttatttgatgtttaagaggcaacttgcgtgatcttagctttgcaagttttctgtaatttatgtagcacaataaaggatacccagttgagtgtgttactggactctgagttctcagctagtttcatctaagcttggtttattatcatttctgctttggatttttttgtgcatcacatgaatacttggaaatccatttgttttcagtgtagtacctagggtgaagcagatgctgcacaagtaagtttaagggaataaaagtcccgacacttatatacatgttgaggggcacgatttaagagactgaaacagtttacattaaactgtttttattttctgccagtagactctatctgctttaaaaaataaaaattgttcaacccagtgttctccagcatcaggacattacagtggtaatctatgttgtaatcttttcaaataagaaaagctactccttattctctacagtgtaggcttaattttagaaccaataatttgctatatctgcattattgatatttttaagtagtagttttaaaaattatttctatgtggagggtgttttaatctgggattttttttcttgtaacaggtgctatttgtaaatatgaagggggaaagtcacttagttaaaagtctagcttatgtcataattaaaatacaattatacatgtcatgtttgattctattaaactagtgacaaaacaactggtcccttagtttcttagattacctttccccccatttcacaaaaatatctctttccgtatgatctcataattgaggcaaagaagctaagggtttatttaaaatgtgtataagcttgaattcggtcaacactgcataatttgaaatcactctgcatttgtcactgcagcttactgtatgcttgaaaggccttgtgtatttgtcttaattttagtgaaaaaatttctgccattcatgtacaaaaaaattacaaatacagcaaacaaaaatgctggtttgcattaatactgttttagtcttaagagcaatttatattatgtgaaatgctgttacacatattttgttggccatatttcattttgagaaacagttgttcaggtacaaacatgaaaaaaaaaactagctatgactcaatgttcaattgcaaaataaagatgtgctttagtat

SEQ ID NO: 7594 - DNA, 769 bp, Macaca Fascicularis
  misc_feature (1)...(769): n = A,T,C or G
tgacaaacgtgtnnnnnnncnnggatattgggccatgtannnngaggagcgcaaggtgagttgcaggttcttgccccgaannnnnnnnnnnnntttgagattagcaactaatagtgtgagcccactaacaggatgtgaaagttgtcaaaatcaagttgtagtcattgtgttaaaaatcctaacaaatagagctggggaaggccatgaaaggaggattttcatgcacagnnnnnnnnnnnnnnnnnnnnnnnnnnnnnnnnnnacaaaaccacaccttgcacaaaggccatcacaacctgacatacaaaaaatacttctatgaggacatttgcccagcaactgcctgtccaatgtccaaaaggcaacatccttgttattgatccttgtagccaaggataattctctcaaaacaatcatttttgctttaaaaaccattgtcttcctttacctccctgaatatgcacatagtttactgtggcacttgtattctcattgcaatgccattcctgaataaacattttctttcagagagtctgcctctctgttatttaggctgacaaggatatgccaagaagtagcttggatacagcagttaactctgcctttagagtatgtgtgtatggggatataagttaactaaaagctgacctttgagctggtccttgaataaaagaaatagattccaaaaataagaggaataaataatgatcctaagctaggagagtacattttgtagacctttggtttccatattaagaaatttagattt

SEQ ID NO: 7595 - DNA, 761 bp, Macaca Fascicularis
  misc_feature (1)...(761): n = A,T,C or G
atgtgcacttcttagaatattttatattaaaatcatttccaattttaaaagagtaatctgagcaatncttttttaatacaaaggtgacattacttgtaaactttcccaataattattattatttcaagaatatgtgagctaacatggcttcaacatgaatctagaacaactctagtttcccagtgtaatctcacatgtattaaataaagctgaccatcaaagacatacaacatttcaatttgacacaataatggtatgcctcaaaagacaaggacaacacttcagccgaaagaggagttttcattgatcttataaggtccaccattgaagattcactagatttttgttaaataagaatggtaattccattaaaaagtgggcaaaggacatggacaggcacttttcagaggaagacaacatgcagtcaataagcatatgaaaacatgctcaacattactaatcataagacaaatgcaaatcaaaaccacaatgagataccatctcacagcggtcagaatggctattgttatgttaaaaagtcaaaaaatagtagatgctgacaaggttgcagagaaaagggaatgcttatacactgctggtgggaatgtaaattattttagccattgtggaaagcagtttggaggtttcttaagtaacttanaacagaactatcattcaacccagcaatgccattattgggtatgtgcccaaaggatatcattattctgtcataagacacatgcatgcatatgttcattgtc

SEQ ID NO: 7596 - DNA, 775 bp, Macaca Fascicularis
  misc_feature (1)...(775): n = A,T,C or G
aannnnnnnnnnnnnnnnnnnnnnnnnntgagatcnnnannnnnnnntcacagaagagttgtgcgcggaggtttcctgttttttaagccggtgccccgtagcagtccggtggagtacgagttcttctggggtccccgagcacacgtggaatcgagcaaaatgaaagtcttgcattttgtggcaagggtttttaaccgatgctctaaagactggccttgtaattttgagtgggattctgaggatgaggcagaggttgaggctatcctcaattcaggtgctaggggttattccgccccctaagtagatctgaggcagacccttggggggtggaaaagaaagtcacaggtaccccaaggagtagatggccagggtcttaagttgaaaatgatgtggattgggggcgggggacactgtatttgatatttgtgatcannnnnnnnngtttaannnnnnnnnnnnnnntttgcttttgataatggaaaattgtattcgttttaaaattctgtttgttgagaataacaatatgtttaaaaatataattgaacagatttttttttctttgtttcctgtcattgacatttagtataacagttttgctaccgttctaaaatgannnnnnnnnnnnnnnnnctataatcttgtacagcacttataggaatgagctgttcttttgaagttgaaatacccagtaaaaggttgaagaaggatggaggatttcttcatatatgacgtttcngaaaccgctttgtgttgctgttggnnnagattgacattt

SEQ ID NO: 7597 - DNA, 757 bp, Macaca Fascicularis
  misc_feature (1)...(757): n = A,T,C or G
ttacccaaaaataatcatgaaaaaaattgatggtatttattatatagagagaaaatgtgagttattacctaaaaatattctcccatagatatgaaaaatcaattacaagtaactttgctaaagaaactactacacggaatcatttttggatcatgaaaaatgtatttgtatctttttttaaatgaaaaagccattgaacnnnnnnnnnnnnnnnnnnnaactatacttggtaaaataaaatcaagctgtgaacnnnnnnnnnctgcatattctgttagataagggacattagaaacatatttgatttttccatgagtcctgcacacaagtacacacacagcccctcattacagcattatatattcaaaagagtatgcaattgaaaacaatgtgttttttttttcttgttattccttagtagaatatcagagagcctaaactatgaacattggtgttactgtcctgatttctaccacggtctnnnnnnnnnnnnnnnnnnnnnnnnnnnnnnnnnnnnnnnnnnnnnnnnnnnnnnnnnnctagcgaatacttgcctttcggggagcttggataaccctgtgggaaaatcggaaagccagcgagacaagaggaagaagagaagtcacagnnnnnnnnnacgtttgtgttctgttctgtccaaagttctttacatcagtaaatgaaaaacaaatggtgcatagggcatgccctgcagcgaaagatgcaaggacttgttcatattggtatgaatcgctca

SEQ ID NO: 7598 - DNA, 669 bp, Macaca Fascicularis
tgaaacaccagcttcatccaccctccccactggaactgggcaagcctgttggaagtgccctttcctggaaggtgtttttatcaggaagatagaatccaagtatttataactcattgtcagccaaatgctatcatgaacataggaaacttgattttcttgctttgatcgtggcctcgcacctgtacttttcctgagtggtctcttctcaggccctttttagtccctttccaaagctgcccccaccaccctgctcctctggcctcagtgcacagtggcccccagcctcagccaggcctgctctgctcagcgcctaccgcacgccacccctcctgcttccccgagcctgaccctgttctgcccactggcactcagggctgcgcgcttccccatccacagtccccaggccttctcgtctggtcccttttgatcattaactcagggtttcagctccaacctcactgagctggtgcagctccaggtcattcctggggtgggaattggatcatccctgactcagcttttaccttaattttatttgcagaggattttttctcaaaatactctgtggcatttggacacacatcccatgtcgatgtttgcataggagtcattttcagtggaataacacttttaatgtgtagttttacggttcaaggaactacataatga

SEQ ID NO: 7599 - DNA, 604 bp, Macaca Fascicularis
  misc_feature (1)...(604): n = A,T,C or G
gatataatttggatannnnnnncctccaaatcttatgtagaaatttgatctcccatgttggaggtggagctgggtgggaggtgtttagataatgggttggatccctcatgaatggccatgacgacaccatgcttcttgtacagcctgcataaccataagacaaatcaatttattttctttaaaaattacccagcctcaggtattccgttatagcaacacaatggggctaagacaccatcctctatcattctccctagtttctcaaagattcccacctgatttgcagtcacgtcattaagttgtgtcagattcctgaaatgtaatttatttaggccagaatacttgagctcatataaaaggaaccgtttaggtgtctccttccttgtcttgaacttcattttcctgttaactttttgtctattagttttcaagttcaagacctttcttcttgatacaaaagagcaaagcaaaattaagagttgagcatatttggccaggagcaggggctcacccctttaatcccagccctttgggaggatgaggcagacacatccagaggtcaggagatcagggcccaggtgaaacatcttcttttctaaaaata

SEQ ID NO: 7600 - DNA, 415 bp, Macaca Fascicularis
  misc_feature (1)...(415): n = A,T,C or G
tccagcctagatgacagcgcaagactgtgtttattaaaaattaattaattaattaggacnnnnnnnnnnnnnnnnnnnnnnnattggtttgggtnnctgaggctcctggagatgagaataggatattcaagttaactgcctctaggtnnntagaaccattgatatgtgcaggcacagaattgcagtcatctccatccatgaggatgaatttatcacagaggggattcaccaaaaattgattcattgtggtagcaccacatgtgtacacatgtgtgtgccacataatgacatttcagtcaatggtggactacatatttgatagtggtcctgtaagattataatggagctggaannnttctgtcgcctagtgatgtcatnnnnnnagtgatgacatatgtagtgcaatacatcactc

SEQ ID NO: 7601 - DNA, 563 bp, Macaca Fascicularis
  misc_feature (1)...(563): n = A,T,C or G
tggtcgtggagnnnnnnnnnnnnnnnnnnnnnnnnnnggtcnnnnnnnnnnnntcagtggtcgtggtggctttggtggcagccgtggtggtggtggatatggtggcagtggggatggctataatggatttggtaatgatggaagcaattttggaggtggtggaagctacaatgattttggcaattacaacaatcagtcttcaaattttggacccatgaagggaggaaattttggaggcagaagctctggcccctatggcggtggaggccaatacttttgcaaaaccacgaaaccaaggtggctatggcggttccagcagcagcnnnnnnnnnnnnnnnnnnnnnnnnnnnnnnnnattggaaacaaagcttagcaggagaggagatccagagaatttatcagggaagctatcaggttatcaacagatttgttaattcagccaagcacagtggtggcagggcctagttgctacaaagaagacatgttttagacaaatactcatgtgtatgggcaaaaaacttcgaggactgtatttgtgactantttgttatanncagnnntat

SEQ ID NO: 7602 - DNA, 2671 bp, Macaca Fascicularis
  misc_feature (1)...(2671): n = A,T,C or G
gagcatctcggaggatgcggcgcggcgagcggctgcagggacgcgcgcaaggtgaacgcgggggctgcggcgcgcaggatccagcagcctctgatgttggctcagttcccccagttgaggtggtgtactctcaggagccaggggcccagccagacttggcattagccagaagccttcctcctgctgaggagctgccggttgagacccccaagagggctggagctgaggtgtcctgggaagtcagctcctcaagtccgctgcccaagcaggttgacctccctgacgctaaggattcaccaggaccccagcccatggatccgcctgcctcagaggctcctgacgggccgttcaagccagagatagcagcaatgaatggagcagaccccatctccccccagcgggtgagaggagccgtggaggccccaggcacccccaagcccctcatccctggtccctcagaccctggcccagctgcaaaccgaacagagagccccatgggggccctacagccagatgacgccgaggagtggccggggcgcccccaaagccatcccccagcacccccagtccaggccccctcgacgtcacgccggggcctcattcgagtcaccacacagcgagccctgggccagcctccccctccggagccctcagccagctccatggcttcagccccagcctccagccccccagccaatgccactgcacccccgctacgctggggccccctgcgacgggtcctgagcttctcctgggagctgcacgtctacggggtgggggtgctctttctgctgcccgcgttgttggcgctggctgcgctggcagccgccccagcagggccccggctggcattggtggccgcggtgctggtgctcgtggcttcagggctgcgatccgcctacatgcttaccgacccttatggctcgcaggcgcggctgggcgttcgcgggggcttggtgctctacaacctgcccttccccttgctgctcacggcgctggcggccctgactctgctcggcctgggcgcggggctgccgccaccgctgcaaaacccactcctgctgggagcagtggcgttggtgcatggtgtggggttgctcgcgacagacctgctgtccacatggtctgtgctcaacctccttatgcaaggcttgtcgtgcgcctggggcgcggccgtggctctaggcacgctctgcctgtgccgtcgccgcctgctggacggcccacggggctgggatgccagcccgggccctcggctgttggccgtggcgggcgcgctggggctgctggccagcggcttgcagctggcggctgcgctctggctgtacccgggcccaggtcgcgtgggccgcttctcgtgggcctggtggggtgtccacttctggctgcgcctcctggagctgacatgggcgctcgccctggcgctggccgcggtggctgccgcgagacccaggccgcccacggagcacgcttgctgggctaagctgatgcggctggcttgcccggcgccgtcgggcaagagcgaggtgccggagcgacccaataactgctatgcgcggcccagcagcgttggtgcaggcagcttggacatcagcaagagcctcatccgcaacccggcggagaatgggcagctggccacgcccagttcaggcgcctggggctcggctgcgtcgctgggtcgcggaccccagggtggcccaggactgtcccgcaacggtgtgggaccggcgccatcgctgagcgagctggatctgcggccgccatcgcccatcaacctgagccgtagcatcgacgccgcgctcttccgcgagcacctggtgcgagacagtgtgttcaagcgctgcggcctccgcggcgtggcctccccgccgcctggaggcgctgtgcgggcgcgtcggggcagccatcccaaagccgagctcgacgacgctggctcctcgctcctccgcggccgctgcaggtcgctcagcgacgtgcgcgtgcgcgggccggtcccacaacacgtagtggaagagcccgacggggcagccgcggtggcttctggcagctccctggacagcttctccaggggctcactcaagatcagttggaacccctggcgccacgggctgtcatcagtggacagtctgcccctagatgagttgcccagcacagtacagctactgcctgccccgaccccagcccctgactctaccgctgctcggccggggaacggccagggagaggtccagccgcgcggcaagcctggggaatcccgcagcgcctccagtgataccatcgagctttgaggagcggtcctgacgcagggctaggaccctggccgatgcccacatggcatggccgactgggacagttgagcctttaaaaaatgggtatcctggccnnnnnnnnnnnnnnnnnnnnnnnnnnnnnnnnnnnnnnnnnnnnnnnnnnnnnnnnnnnnnnnnnnnnnnnnnnnnnnnnnnnnnnnnnnnnnnnnnnnnnnnnnnnnnnnnnnnnnnnnnnnnnnnnnnnnnngcannnnnnnnnnnnnnnnnnnnnnnnnnnnnnnnnnnnnnnnnnnnnnnnnnnnnnnnnnnnnnnnnnnnnnnnnnnnnnnnnnnnnnnnnnnnnnnnnnnnnnnnnnnnnnnnnnnnnnnnnnnnnncaaaaaaaaaaaaaaaaaggccaca

SEQ ID NO: 7603 - DNA, 120 bp, Macaca Fascicularis
tgcataggttgtctaaggttaatctctctggcctccagagtctgcgtccagatgcctccttgttcagtgcctctaccctctgaagggcggggcttcctctccacagctggagaaagaggt

SEQ ID NO: 7604 - DNA, 742 bp, Macaca Fascicularis
  misc_feature (1)...(742): n = A,T,C or G
ggtcatacattttcctnnnnnnnnnnnnnnnnnnnnnnnnnnnncaggcgnnnnnnnnnnnnnnnnnnnnnnntttatattnnnagtagagacggggtttcaccatcttggccaggctggtcttgaactcctgacctcatgatccacccgctttggcctcctgaagtgctgtgattacgggtgtgacctactgtgcccagctgccctatgtttttttctgagaatatagtgtcccttgccccctgataccagccttacccagtgttacataatttattgtaattgtttattaatgatacattcttcctctagaagaaaacgtgtccttttgggctcagtagagtatgtgtttcttaaataagagggatcatattaaaccagctccttaatgtgaagcagatagccagtgttctccatgtacaatcttaaggagagtaatttttattttggctctgtaattacggtttgaggcagcccattaatcgcatacttcagctgtcaaatagaaatttggcccagaaaggaatacactttggctttacaaaactgcttattttcaaatttttaaatggggacaaaaacgaatatgctatattatatacttttatttacataattttttttctcagcaactttttctctttcgaaaatgcaagagcctgaaaaacattgtgaatatacttgtaacattgcaaagctgtttcnnnnagagtaaagccgtttcggttgttcatatacaagt

SEQ ID NO: 7605 - DNA, 687 bp, Macaca Fascicularis
  misc_feature (1)...(687): n = A,T,C or G
tcaggttggacggcaggcctgggccaccgggtactccaggacnnnnnnnnnnnncaggcccagcaggaccaaagggcgagaggggcagcaaaggagaccctgggatgannnnnnnnnnnnnnnnnnnnnnnnnnnnnnnnnnnnntggaccacccggggacaagggaaaccggggccaccgaggttttaaaggagagaaaggggagccggggttaccagggctggacggactggatgccccatgcccattgggcgaagatggcttgccagtccaaggctgctggaacaagtgatgcctctaaccttggattggcctgtgtgtgtgtttgtacatagaatatttatttttatacagttttcactttttgaaaatgccagaaggatgatgcatcttacagattattaaaaaagaaaaacctgcatattttgtacagaaaatatcaacctcttcccttttcccttttgtttacaagatgttttgtataaacctgtgtctctaatacactttttgtttgagagtatggtcataatgtctgcatgatatttgtgcacacttattaagtattgaagcttaataaattattgtgtcctggtgccaaagggggccagccagaactgaggtgctggctagctcatgtgtgaattcacataaatgtagaggtccatgatatttgcttagctaggtgt

SEQ ID NO: 7606 - DNA, 1782 bp, Macaca Fascicularis
  misc_feature (1)...(1782): n = A,T,C or G
agtatggaatgtatgtttggccctgtgctgtggtcctggcccagtacctttggtttcacagaagatnnctgccaggcaaggccatcnnnnnnnnnnnnnnnnnnnnnnnnnnnnnnnnnnnnntggctgccaaatgtggtgcagaagtaatactgtcagacagcnnnnnnnnnnctcactgtctggnnnnnnnnnnnnnnnnnnnnnnnnnnnnnnnnnnnnnnnnnnnnnnnnnnnnnnnnnnnnnnnnnnnnnnnnnnnnnnnnnnnnnnnnnnnnnnnnnnnnacaagatannnnnnnnnnnnnnnnnnnnnnnnnnnnnnnnnnnnnnnttgaagacattttaactacaatatattttttgatgcacaagaaccccaagnnnnnnnnnnnnnctacttattttttttttagtgctgactggtcacttgaagctttactctacaaatgggatatgaaatgtgtccatattcctctggannnnnnnnnnnnnnnnnnnnaagatatagcagaatctgcccttccaggaannnnnnnnnnnnnnnnnnnnnnnnnnnnnnnnncannnnnnnnnnnnnnaattacacctacaaccnnnnnnnnnnnnnnnnnnnnnnnnnnnnnnnncctggcacacaaactatgagcagaccacttcagcttgagaatgcagtgggtctgaagatggtcaagtctgtttgcatcagattttgatgtcacctagacaacactttaactcatatgaaacaaaaattaaaatacatattacaagtacttggattgttcctttgtcattaaataggatataaattaggttgagaaggaggtatcacaacctcaagaaaagtgccacattaaagcattgcttttaggtgttcaactggcatttccactttaacttaggaaatgataggcactaaacagtccacttnnnnnnnnnnnnnnnnnnnnnnnnnncaaaattgcatagttccttcaaataaatgggggaagaaaagaccaggacatattctgagaaaagctaacaccaagaaaatgttttaattaaactacagaaacaatggttataatacagaatattcatcagcaaaaagatacaccatgttataagtacttacaaagttacaaccatttgcttccttaacattttccatgttaagttcatacatgtagatatgatcagatttaccatttttaggggtaagagggaaaaaaggtgtatttatcatcagctagatgtgctcactgtatgctccgttatttatatgcaaggcccgggtgactggaagtgcagttgtcaggcattttaataaactggacagccatttgtttctgcacgacaaggcatctttacacaggagcaatcgggagaaaacaggaaacagccaagcactctgcactgcaacacgccaccttaacagctaaccagcattactcaactgctacacaactgcgcctagtgcacaaaaatacataagagaagagattagaattgtgtttgataaacaatcctttcaaaaaatcaagtcttttcacctgaaaagtctttatacaaatttgggttcagattaccatttagatctgaaggtaaataacatatacaaatttacaccaacttttgtaggtttttaattttaaggaatgannncaatgctgagtcaatctctcgacagctttnggctgtgtgtaatggctgcacacgttttccttaaaagtcaggaggccacaaattaggttaccaatctgtttaatttaaacaaaaaaagtcagcactatgtaac

SEQ ID NO: 7607 - DNA, 536 bp, Macaca Fascicularis
ggagagaaaggaggttccataggcagttcttaccaagaagatgtcgattccattctccaacacccactaccgaattccacaaggatttgggaatcttcttgaagggctgacacgcgagattctgagagagcaaccggacaatataccagcttttgcagcagcctattttgagagccttctagagaaaagagagaaaaccaactttgatccagcagaatgggggagtaaggtagaagaccgcttctataacaatcatgcattcgaggagcaagaaccacctgagaaaagtgaccctaaacaagaagaatctcagatacctgggaaggaggaagaggcatcagtcaccatcttagactcttctgaggaagataaggaaaaagaagaggttgctgctgtcaaaatccaagctgccttccggggacacgtagccagagaggaggtaaagaaaatgaaaacagatagtcttcaaaatgaggaaaaagaggaaaacaagtgaggacactggttttacctccaggacacatgaaaaataatcc

SEQ ID NO: 7608 - DNA, 778 bp, Macaca Fascicularis
  misc_feature (1)...(778): n = A,T,C or G
gcaatgcttgataatcattggccacactgaaatttccaaagggagctcttgccggtgcttaaaaccaaaacacctggacacttagaaaattccatgaatctagcacaaaatacccnnnnnnnnnnaagtgtatcccctttctctccagcttaatcttttttttaaagcccaggccaaggnnnnnnnnnnnnnnnaaccaggggaggagggaagaacactagcagggagctaagaggcaggttgctgggtaagccatcatgctcctacctggtgcctgtatctgaattgctgagtgccgtgcgccagtgcctttccttcacctgcagatggagcccatctctttccacctgggtgaggagaccctctgctactccaggggtaaactttaaagaaggtgtcttgaagagcccaaaggacactcacatgctaaggtgtccgttttatgcatctttaaaatattttatttaagaaaaaaaatagccctgccctgtcttagtgccactaatggcnnnnnnnnnnnnnnnnnnnnnnnnnnnnnnnnnnnnnnnnnnnctttccttggtcttccctttgtctcccatgatgtgttgtcccctcatccctcccatccatttcactgtgtgtggatggatagcagagggtaccacgcagtccttgaggcagtcctgtgtgattccatgatcagttgtttttgtattctaactatccttccaaaccagcagatgtttggaaattagggaaaaaattaaattctcatcaatggtggctgttatagtaa

SEQ ID NO: 7609 - DNA, 3192 bp, Macaca Fascicularis
  misc_feature (1)...(3192): n = A,T,C or G
ataaaatcatggacataaatactttgagaaaagcaagagagacacatgacacaaaatgaaagtttccatgctagagatggacatgaatatatagaagacatgtgacatccacaagtcagaatggaaaagaaagcaagacatagaatttataagaataaaactcacatagagataagagaaatgagctttcatggtatctgatgtagacttttaggaagttgccaccaaatatttttaaaattaggacacattttcccaaccataagcataaatgagttagccttgatatttgcctcatgaattgggtaaaattaagctgagggccagatgttttccatctgtgttttagattatgctaaacataaaatgattagaaagcacccatatatgactggtttaactatatgaaaaaatcagatgacatgaagacactgccttagactttagaaaattttagtgtattttgatgtcagaattttgacaagtaatgaaaatattagatgaatagttttactgttaaacaaacttccatttcaaaataggcataatgaatcttcatactgccaaaacaactttttaaaaagggaaagctgcagattttcccggtggtatcaaactgagagctgggtttatttaccctgaattaaattttggtattaggtagacaaccaaaatatattagttaatgtgggttattatgtgttgtgcagatactactatagttcatatgcatgggttgatttatgaattaagtctcaaatatccagtggaggattatactttagataattgctgaagacacggaaagaaaagtgcatgaggtctagaaagggaagtcatcaaaatgtcagcatgaaactatatcaatcttcatgtacaaatcttcaattggtaataagttgtaatagcaaaacaactgagaaactatcagtccatagctgtttgattacatctttgttgaacaaataccacttattcattatagtcaggaacattaaattattctacaatgtccataaattaatctgaaacactgctgtctctggcaacatatcagattctttaaaaataatcaaggaaggagcaacggacatcaagatctttatacaaaaatgtgttgagtctgaacaacatcagagaaaaatttactgtctatattaaataaatcacatgccacactaatcaggttaccattatagtggtccaataatgaaacatgttcttttgttgtattaatctaaacatatatctcattaccaacatacatcttatctattttccttattttttcctactctattgaactatgttggtgcataacatttcaaaactgccctgggtctcttacccttttaaagttctctctatcatgcaaaccagaagaaggtcatgatatttaacagaaaattaatatcacttgttttgagtggccctcaatttgggacattagcaaactataattgcacttaccataacacaaagcttaaggtttgaatctgattctataacacaggctatttcccagtgagaatggtcaacttaccttgacttgtcattatttaatgtgatgagctaatgcaagtcaagtggcttgcaattttagagtcccaaacaacttactagatgtttacatgaatttgaagtcatagctacagctataaaaacattctgtgatcccagcactttgggaggccaaggtgggcagatcataaggtcaggagatcgagaccatcctggccaacatggtgaaaccccgtctctactaaacatgcaaagattagccgggtgtggtggcacgcacctgtggtcccaagtggctgggattataggcatgtaccactgtgcccagctaaaataagatttattcagactttttggcttacagatgttagatctgaggcatttcagctttggaacagaccataaggataattcaagtccaaaggtccttaaagtccaccacatctcctctacagcctactcatactcacctttagttaaaaaaaacaaaaaacacaaaacacaaaattccaaaaacctggagtgagggaggcaccttccttcctggggtccattctctgaaaaaaaaaatcatagaatcatagaggtattttcatttatgttacaggcttccctggtactggtaattcccagcagctttctataatcccaaaggtcagaaataaactgccaaaaaaattttactaaatcatgttctggtctgggatacagccctgaaatgcactttgagcaagaaagactttgtagaggagaaaaaaggtggaccaatgaggaatgggtagaaccagaggaaagtgaacattcttggtttaaatgtccacaatgttctaagtttttcatgtgtactacagagaagctccaggcttctacacttccctgtgggtagtttcaaaaagctattgtagcaaaacagaggctggtggtgactatgcttatcttttagaagagccatcattgcatttctgcagcacagaatagatatgtgatttttactcttagtggtggagtttatatatgactcatgatgtttggttattaatcatctaatgacactaaatattgcttagttagctgagtattccctttaggaaaccagatattgctaaagtcactgttcgacttaatggggaaagttccactaacatataaaatgtatgatttataattcaaaatgtaaatcctctattggtattacatactataaaaaggacaattgtctacataattacataacatgcatgtaaggatcaatatttaattaagaccattactgtattctcattgagagttagagcccaatattctcaattgggtgagaatttcagccaaatggtctatccattttcttttttttctttttggnnnnnnnnnnnnnnnnnnnnnnnnnnnnnnnnnnnnnnnnnnnnnnnnnnnnnnnnnnnnnnnnnnnnnnnnnnnnnnnnnnnnnnnnnnnnnnnnnnnnnnnnnnnnnnnnnnnattataggcatgtaccactgtgcccagctaaaataagatttattcagactttttggcttacagatgttagatctgaggcatttcagctttggaacagaccataaggataattcaagtccaaaggtccttaaagtccaccacatctcctctacagcctactcatactcacctttagttaaaaaaaaaaaaaaaaa

SEQ ID NO: 7610 - DNA, 367 bp, Macaca Fascicularis
  misc_feature (1)...(367): n = A,T,C or G
cnnnnnnnnnnnnnnnnncgatgggacaacagacttgctcagcccatcctgctcggttctccccagnnnnnnnnnnnnnnnnnnnnnnnnnnnnnnnnnnnnnnnnnnnnnnnnnnnnnnnnnnnnnnnnnnngcgccctgtcctctgaaggtcccnnnnnnnnntgtctattctgcggcctgttacccctcggagactccgtaaccaaactcctcagtctgtgagcccnnnnnnnnnnnnnnnnnnnnnnnnnnnnnnnnnnnnnnnnnnnnnnnnnnnnnnnnnnnnnnnnnnnnnnnnnnnnnnggtggcnnnnnnnnnnnnnnnnnnnnnnnnactttttttttcgantttaagtactacaag

SEQ ID NO: 7611 - DNA, 720 bp, Macaca Fascicularis
catcaatgtttatttaaatccatgcattcaaagttagctgcctttttgaaataaacaaacaaaaaatactactgtatgtttgaaaatgtgaatagtatttttatagcttgttaaagacatggctagttgcatttgtaaataagtataatgttgatttgattttcttttgtggacatctttatttggaacataattgtctttagggttgatttgtatataagtaattggcttgtgattgtttcttttttggttggaagttatcattttgacattacttgtgattctgtgttcagcactattgtgatgtgttcaacctctgcactcgcttacacaataggatatgccaattgtgtgtggtgtaatgttattttgatttttttctatgttattgatgaaggagtatgcacctaacacatactaacttttttaatgttaggtatatttttagtatactttctcttattctttcttctcctccaaccttttacccatcctccttcctttccctcattcctgttgttatttgagaatgagggagaaacagtattttaaatttatgtaattaggcttttcagttagttctcaaggatcctcttttggctcttgggaaagaattgtacctgtacaaggcaattatagaatgcgaactgctttgcctcattccatactgatcatcccagctgaacaatttgaaaactgttctgcctttttgttacatga

SEQ ID NO: 7612 - DNA, 102 bp, Macaca Fascicularis
  misc_feature (1)...(102): n = A,T,C or G
cacgtagaattaatacaatgaagtaaacctaatcctcacaaaatatttatttcatagtctcttctagacttttgacaaannnnnnncaggatcactgggagg

SEQ ID NO: 7613 - DNA, 322 bp, Macaca Fascicularis
tactgtacaaagtgaatgttatagccacaacattctcttgaaaagaacactgtcaagaagtgggaaattgctgtcaggcatttcgttgttgtttttaaacttcttaaaaaagaaatactggtttcgcaagatagagatcatgaggtaaagacttttaataagctcttataataaaaagccttaaatcgatatactcagattcaaaacataccattataatcaattatatcccatacaggtaggcaaactcatttaaaaaataaaattaattttgctaaaagtacatagggtttgtttttgaaatacataattccaaaataaa

SEQ ID NO: 7614 - DNA, 480 bp, Macaca Fascicularis
  misc_feature (1)...(480): n = A,T,C or G
ccacctcccacccacnnnnnnnnnnnnnnnnngtggggagggagaccgacagggtttcaaggggnnnnnnnnnnnnnnnnnnnnnnnnnnnctctgccaaggccatcccagcccctctgctgccaccccccagggctccccatcacccgagaggagaggacgccccaactaacccggctggccctcgggcctcccgannnnnnnnnnnnnnnnnnnnnncctctccagggtaggccagcttgaggaatcttatttattttatttannnnnnnnnnnnnnnnctagtctgttgggttgaggggttgagnnnnnnnnnnnnnnnnnnnnnnnnnnccttcccannnnnnnnnnnnnnnnnnnnnnnnnnnnnnnnnnnnnnnnnnnnnnnnnnnnnnnnnncgcgccctcgggccctgccatnnnnnnnnnnnnnnnnacctctcaaggcttcctccaatctggggtcgggggaccctggga

SEQ ID NO: 7615 - DNA, 530 bp, Macaca Fascicularis
taaaacattccatggtgaacaaattctgtcggctgcattatagccatgagtaaacagacagcattggatggtccaagctctgttactgaatatacaaggaactgatttttcattatgttcgcactaagggcaaaaaccagtatttataacgtaagcactagccaagtaaaacattggcccaagatttggtaaagagtcaggtttcagtgcaatgtagtaactacaatttttttactaattggaacagcttgggtgtgttgtaatcaaggtttttgcttgttggttctaaataagccactagattgtggtgaccggggcccacgtccgagacaattcctggcatattctgtcaccctcctgtggggggaatcactgtgcggggaccccattccccagttaaagggtgtctttgtaccttacaacagcgattcggacccgagtgtgaacaacggtcagccctccctctggagcgtgtgctgtattagggctctccccaaagtcactgtaacacagttaagtgtgtcattaac

SEQ ID NO: 7616 - DNA, 759 bp, Macaca Fascicularis
  misc_feature (1)...(759): n = A,T,C or G
aagaggggatccggagagtcaacatgaatgctgcagcccggccctaccacatccagaagtgggccattctcgagagagacttctccatttccggtggagaattgggtcccacgatgaaactgaaacggctcacagttttggagaagtacaaagatatcattgactccttttaccgagagcaaaaaatgtagtcagggcnnnnnnnnnnnnnnnnnnnnnnnnngagagcaggcgttccnnnnnnnnnnnnnnnccccaggtcnnnnnnnnnnnnnnnnnnnnnnnnnnnnnnnnnnnnnnnnnnctccaggtcagggcacagcactggctccacatttaccaggtcttannnnnnnnnnnnnnnacaattccgacaagcttcacgtgtgggtagttttaattcagtttaagtattgctttttgnnnnnnnnnnnnnnnnnnnnnnnnnnccttccagaacgannnnnnnnnnnnnnnnnnnnnnnnnnnnnnnnnagattaaaaagctgctagctcacatacaggacagccagcagcaggctgtggagggggtgggagggagatnnnnnnnnnnnnnnnngtgcgctgcaggaaaagaatcagttacaacttacctagcgacctgacttactctggaatcgnnnnnnnnnnnnnnnnnnnnnnnnnnnnnnnnnnnnnnctcctctgccacacacatgccaactnnnnnnnnnnnnnnnnnnnnnnnnnnnnnnnnnnnnattctatttaatgtataat

SEQ ID NO: 7617 - DNA, 1873 bp, Macaca Fascicularis
agaagagctttttactaatttatttgtcagtgttccctatttgttacttaaccatgatcctccagattttttggagtattcttttctaaccttaaccctgccaaaccttgatccattttgacatttgttatgcactatttttatatctctgtgagagatttttccaacagtcagctattttatggcacacttttttttgactgatgacatctcctttgctatacctcaatttttggaatttagagaagaaatcagtagttttgcaatgttaattatttagatatttaatttcgcagatttttaaactttattttcataatttctgcttaatgtttaaaattgaagagccttttcatgtattaaataatgaacacaaattatataattaaaataattggagatgttgaaaatcattttcccttcttaaacagaaataaatatttggaatgaaggggaatgtactagaacaccctttttgccatgggtaaaaataacagaaatgtatggtttgttttaccttcatttctgtataagtaaagcttattagtctgttttattcctttcccacttcacccctacctcttttttgttttattttgtttttgccttttatgtactacattcttattttctaactgttaaacactgtattggagtttttttttttttttaatttacagatcatatttattttactatttttgtagaaaattaattttgattgtatttttgtattttaaaagcttcttcacttgtgttccctaaatattcatattgctgcccaaaagtatgactgtggaggaaaaaaaatactttaaaaatccacactttttgttaagaaggaaacatttagcatttatatatttgtgtatggaaaacacttgatattttatccctgttgcatctggctgcacagagcctctcctcaaagatgctacaaaacttgaatataacacattttggaaggctgactaacctcgattctgtgttgtgatgtgcaatactgtttctaatgtttgtataaaaaaaaaaacagtgtaaacctttttaatgcaaatttatttttttcattgcatattttgcagattttatccacagtgtcattttttactgtcagaaaagataccccttttgtcattgcaactattttttaaatccagaaatctttgtactgatgtaaatgattgtagttattttggatagtgttttgctaacaaaaggagagacttttttcatgcatatttctattttgtttttttgggttttattttattttaatagtagtaaaatacttggaataatttttcatattcttgtcattaatattattttgtatttttatgtggaaatatataattttatgacactaattgctaaagtttattttatgttgaattatttttggagctgaaatctttgtaatattaaagcaactagtttctaattcccagtttctgtatagaatcgcacaagtggtttatggagtgtttggattgtaattataaatggttctttgatatgcaaattaatattttcagttgatttcattttatattcctaatggggtgttaaagccgttttttatttttttctaaataaaaagagaacccatgcttttatggacactaggtaaacgccttcagcttaaatttttcgttaaatattttagtttattttattgttatcttccaggtgtctaaatctccagtctgtctgttgtactggtaatttaactctgtaatggaatagcttgctgccaactatttatattaagtaatttttaaatatttgtaatattgttgactgactaataaactattaagttattggcaaaaaaaaaaaaaaaaaaaaaaaaaaaaaaaaaaaaaaaaaa

SEQ ID NO: 7618 - DNA, 696 bp, Macaca Fascicularis
  misc_feature (1)...(696): n = A,T,C or G
tcatttcctttgattnnnnnaaattgtactatgcagagctnnnnnnnnnnnnnnnnnnnnnnnnnnnnnnnnnnnnnnnnnnggtctgtggccacatcttggggacacactggattgttccnnnnnnnnnnnnnnnnnnnnnnnnnnnnnnnnnnnnnggttaggcttttgannnnnnnnnnnnntgtgtgaacagatgaaaaatnnntcagtacccaccccctccacccccaaagnnnnnnnnnnnnnnnnnnnngaacccagctggccgttcgctgcaccctgccagagaggggagccttgaccgcgcccggtgaaaggagtgaactagctggaccaccgcctnnnnnnnnnnnnnnnnnnnnnnnnnnnnnnnnnnnnnnnnnnnnnnntatcttctccgtggactccataccgctcttctatggcccccactttcagtgtgtttctggtgtgagcctatgtgcttggacagttccctgggaagggggccatggagccaggactccctccaaataggaatggaaaggaccttgcagatacttttatcctagttgtgaaaacaaggtgcctccgattctctttnnnnnnnnnnnnnnnnnnnnnnnnnnnnnnnnnnnnnnnnnnnnnnnnnnnnnnnnnnnnnnnnnnnaagccccagcaatacagaactcaacaagcaggtgagaagagaag

SEQ ID NO: 7619 - DNA, 847 bp, Macaca Fascicularis
  misc_feature (1)...(847): n = A,T,C or G
agcagagcagatagatgggcggcnnnnnagtggagacgcagcngaggnnnnnnatggngtcaggtgccaacaggctgcaggaggaggnnnnnnnnnnggagtggttcaccctggtcaacaagaagaacgctcttatccggaggcaggacnnnnnnnnnnnnnnnatcgaggagcaggacttggagcgaaggtttgagctgctgagccgagagctgcgggccatgctggccatcgaagactggaaagaaaacgtccgcacagcagcaccgagagcagctcctgctggaggagatggtgtagctggtgaaccagcgtgacgagctggtccgggacctggaccacaaggagcggatcgccctggaggaggacgagcgtctggaacgcggcctggaacagcggcgccgcaagctgagccggcagttgagccggcgggaacgctgcgtgctgagctgaggccaccggcctgggtggtccataatttctcgcgaccccggcgtccgccgctgccctgggcctgcgctgcggaggacccggccgtcccggataccgcgcgcgtgtccgctaggggccgccggcgcgcttcccgggacggggcagggcggatcctcgaccccacgggcggggcggccaccgtatttatttgtcaccgagtgtgtgtgtgcgctcgcggcggtgcggggtcctccccgacggcacggccgggccggcagcctcggggagagggatgcctgggtactgccgcccctcgccggcttgccctcctgttctccagagcaataaagttggacgcggctaccccagcgccggccttttctccgctccacctgggctctcaataggcggagga

SEQ ID NO: 7620 - DNA, 675 bp, Macaca Fascicularis
ttggcagctcacgttccgcgggaggacgttcacctgcttcgcggtctcgtggaggtccaccgcggcggagaatcctaaacctcacctgtgacgcggcaggatgagcggccaacactcgcgacgaaggcgctcttggggaaaggaggcgcttggcctcgagacccaggaaagggggctgttctgggagttagttcgcgcagttacagcgaatgcgccatgggcctcaaagccgcagcccggaggtcgctggcttgctctgtgccagacacggttctatagaggcagtggggaggcatgtgaaagcagacacggttcctgttctcaagaagcccacagtctagaggagacaactcacttgggaaaaaaccagggagaatttggggtggtggggaagtgctatgctatgaatacagtggagtactgggaaaggcagggaactcaagacaagggctgtcttaggaggcggtgtttgaacctagcctgttaggatgtgagaggggcattccagttggagggaaataggacccgaggatgcaataagcttagggtatttaaggatcggctagagggcagatgtggccagaacatcgtaagtgagggtggcaaatgagctgggaccaactagatcactaggccatagtaaagaatttgtgttctaagaaccatgagaaccta

SEQ ID NO: 7621 - DNA, 696 bp, Macaca Fascicularis
  misc_feature (1)...(696): n = A,T,C or G
ctttacctaatgagggccannnnnnnnnnnnnnnnntcattgccatgtttcagaaaagttgccatatttcacccagaaggggctcgttttcctcttactcttactttaaccatgtgcctggaggagccgttctgggctcttgcacttgcccaacctttctttgccaggggcagagaagggaaagggggtagattgagtgtgccaagggccgtgcaagggcaggcttgctttccacccatctgctgagggaaccctcgcctcttgctccttgcctctgttcacgcctgttgtcttggaaaaggatgnnnnnnnnnnnnnnnnnntnnnnnnnnnnnnnnnntccagttaggatcggcacctgtttccttcatcatagtgcctggcagcctttctgaagttacaggtggttgggagccctctcacgtgcagaacatttggtagattgacctgccaggctgggtggttctactgctttctcaatttctaagaacctttttttttttttcccttaaagagttctgcagaattatttgacaatatttgtaagtaccatgtttccttgtggtgtnnnnnnnnnnnnnnnnnnnnnnnnnnnnnnnnnnnnnngtttgggaggagatgaacgtatttagtctattagatttgcgctgactggatttttttttttttaaaagtgtaaccttgactagctgtctt

SEQ ID NO: 7622 - DNA, 780 bp, Macaca Fascicularis
  misc_feature (1)...(780): n = A,T,C or G
gagcacagcagatgagagtgaggatgacatnncnnnnnnggnctccaagagcaaagccactgaggatggtgaagaagacgaagtaagtgctggagaaaaggagcaagacagtgatgagagttatgatgactctgattagaccccagacagattgttgcccgcttctgtgtctctgccagccactgatcattttgtgttaagagtttgaaatccgctgtttacctttcttactggaaggatcctttttttgttcctctatttttttttttttcctannnnnnnnnnnnnnnnnnnnnnnnnnnnnnnnnnnnnnnnnnnnnnnnnnnnnnnnnnnnnnnnnnnnnnnnnnnnnnnnnnnnnnnnnnnnnnnnnnnnnnnnnnnnnnnnnnnnnnnnnnnnnnnnnnnnnnnnnnnnnnnnnnnnnnnnnnnnnnnnnnnnnnnnnnnnnnnnnnnnnnnnnnnnnnnnnnnnnnnnnnnnnnnnnnnnnnnnnnnnnnnnnnnnnnnnnnnnnnnnnnnnnnnnnnnnnnnnnnnnnnnnnnnnnnnnnnggccatcttttgttcttaaagtgggggctttattaacttgtggacatcatggattatctaacatcatcacagtccctggctcaggattctaatgtagcattatttattggtttggataaacctagctgtgctacactgcagagtaaaatctctgagtcatgattctggactttgggagctagttttgaaactgatttattctagaacttaggcttgtacaatttacaaata

SEQ ID NO: 7623 - DNA, 540 bp, Macaca Fascicularis
  misc_feature (1)...(540): n = A,T,C or G
ctcttccccctnnnnnnnnnnnnnnnnnnnnnnnnnnnnnnncttttgtaacttactacttcatcttctagaaaacaacnnnnnnnnnnncttattgttgcccacttcttgttttcccattttaaaaactcagattttaaannnnnnnnccaaaggtttcacccgtaaaatgcttcttttttaaaatgtatcaacatatttttatttaaggggaattaacaattgccaggggaannnnnnnnnnnnnnnnnattatatcattaaccttataaattcaaaccgannnnnnnnnnnnnnnnnnnnnnnnnnnnnntctgccaaagttttgcctatcctaagagctggatttttctactgctctttgtcttgcannttacctaatttaggagttttgagaatgtattggatatgctccagtacatacggagttgccgcatattatatcaaactgctttgagnaatctcgtccctaatctattgcagttgtttctattaacttactgattaactcagtcctgacacaccttttgnnnnntgctg

SEQ ID NO: 7624 - DNA, 758 bp, Macaca Fascicularis
  misc_feature (1)...(758): n = A,T,C or G
gccgccgcanngcccgggacggagccagaggggccgggcctcccaaagagcgcacgtgcccncgcccgtcgtgaattcagtgaatacagaggcaggacgagatcagtggagtcgggagctgctgcctcgggaggcgaggctccccaggtctaacaggacacattttgtcagtgttcgaccagaaaaggtttggaaggaggcgctgtctgtgctcacggacagaggcggccggcgcccgaggcattccatcctttctgtagggaaaggagcctttatttactattttgtatttatatatgatgaataagtatataaacagaaacgtgtacacagactccgatcacctaccaaaccaaacacgagggccgccctccccggttctgggggcccctcaaggccacgttcaaccctcaagtgctctcacactcgggacctgtttcaagtcaaaactctttctccttcctggggcctcggctcctggagggctggagggtctcgtctgaggatgggaggaggctctcgctggacgtctggcctgtgcgctggtggacggatgcccacgtgattttggaggacctgatgaccaggcgtcctgcgagtccgcccgctggcccactgtgcccatctgggacttgactgcagatgattggtgcaagcgtgtcctgcagggctggctgtgcgcagctgtgggttgacctttgcagagttttgtggaatcgtttgcaatgtgataaaagtgcaataaaggtacagcagat

SEQ ID NO: 7625 - DNA, 1926 bp, Macaca Fascicularis
  misc_feature (1)...(1926): n = A,T,C or G
gttaagatgctggaaaggaagagaactcagttctttgaggacatttaataaaggaacctacatgagcagggaggcattggggtcagggaagtgttcctaaaaggaacgatgcttaaattgcgatctgaaagaacaggaatttgctaagcaaagagagtaagggagaagagatggattagacagcattccagagacagtgaggattctgtgatgggcacacagacagcatgtttgaataacaaacagctcctatggctgaaacagtcagagtggagtgggaaggagggagctgagtggagagagaaccaaggctgggtggtcttcacaggccacagcaaggagcctttccagcagggcatggcttgatgggttcctaggcagagtggatggcctagtgtggatcctttaagataaggatcagacaagagggaggtcagcctttgcctgggctcccacaatggaagcttgtttgtatcccttacacaggcctttgtgtgctccaaaatggatgtttttatcagtcacaatgatctcagcttcaatgccaaacaaacaccttccacaaaaggtgttgcagagtgtgtagccacctcatcatgaaaacagccacatagctcaaatcctgggaccttccaggcaaatgcttttccatctcttaagaaatcacatccttctgtttctcaccttcattgataaatgacattacgaagcacacacagaagtttgccagcaggaagcacccccaaagaacctctggtcctgcagtttcagtttgcattgaggtggcaggggcgttgaagggggtaagtggaacactgtctccccaaaagaaatctgaagaagctcattatgtaaaatgaacaaaacagcagcattactcttgcagagaaccagagctctcttccccttcctctatcccctaaggcggctgcccacaccactttacacatgttaacaaaacagaaagttgatagttcacgcaatggccagcttccagtaacaagacatttctaggaacaactgaaatgtttggaaaagtgaaagatgagaaaacttggcagtggggctatgtataccagtcctctggaacaacttcaatagctccttggtacacttaaaattcacacttagccccatgcctacgaggccccacctgatctggtctctccctacctttaggacctcctgccgtatgtactgtgagtctcttcaacactacaccctaactcgttccctgccccacggcctttgtactggaccacccttacctcatatttacatggctagatcccttgcttcattccattctctaatcagatgtcaccaactcattccattctctattcaaatgtcaccaactcaaacatctctcaaaaaaaaaaaaaggttttgtttttgtttttgagagannnnnnnnnnnnnnnnnnnnnnnnnnnnnnnnnnnnnnnnnnnnnnnnnnnnnnnnnnnnnnnnnnnnnnnnnnnnnnnnnnnnnnnnnnnnnnnnnnnnnnnnnnnnnnnnnnnnnnnnnnnnnnnnnnnnnnnnnnnnnnnnnnnnnnnnnnnnnnnnnnnnnnnnnnnnnnnnncggccccagggtggtctccaactcctgagcttaggcattcatcccaccannnnnnnnnnnnnnnnnnnnnnnnnnnnnnnnnnnnnnnnnnnnnnnnnnnnnnnnnnnnnnnnnnnnnnnnnnnnnnnnnnnnnnnnnnnnnnnnnnnnnnnnnnnnnnnnnnnnnnnnnnnnnnnnnnnnnnnnnnnnnnnnnnnnnnncagctacttgggagactgaggtagaaggatcaactgagtcctgggaggctgaggttgcagtgagtcatgttcatgccactgcacttcagcctgggcaacagaatgagaccttgtctcaaaagcaaaaaaaaaaaaaaaaa

SEQ ID NO: 7626 - DNA, 1807 bp, Macaca Fascicularis
  misc_feature (1)...(1807): n = A,T,C or G
gaaattgtaattagattgctgggaagaaactcagaagtatgaggtactccaaatcccggttttttgttttgttttattttttgtttgtttgttttttaaaaagctgaccaataaagatggtatatatttaatgtgtgcaacatgatttgttacatgtgtacacaaaccaccatctagaaataacaacacactaatgtagctgctagaaaatcccaaggttgttctaatcatgagatagaaagaagcctttttccactttttataaaacatcaaatatttgctttgtgcttgtggctccatggacttcagtttatgtctgggaatattttaaataaaggcttcttgttgcactgcccttatcctccagcaaggacttgggatcaaagactgtggtccagaaaaacagattctgactcggctattgacacagaagccagaaacatgtatggaaaataaaagtatgaagactggaagatgagtttggcaatgacaggagtgcctgagctggtccgataaccaaccagaagattgtcctaggtcctgggatgaatgctgttgcctgcacctggctcccccataaactctgatggggaagagtgtgtgggcagacagcctctaggacatttgggaactgtcaccaactcacagaccctggcttacaaatgaacaatacatttttaaaagccgcttgaagaatatctctctaattctcttgttctacctagtatttccttggggaacaactcaccttttgctcctggtaacaatgggaactagtacaaaagcaattcctaggtaccagacacttttctcagtgcttttacatatattaactcactaaatcctaacaataaccttacgagctggatcctattatcatccccatttttagacgaggaaaatgagacagaaaaacgctaaagaaatctgtccaaggttacacagctaattacagtagagctggaaaagtctgactccaaagtcagtgttatcctccactccactgtaagcaaatgcagggcagaggtgaactgagaaaggtatcctccttttgtccaataccactagttccagtccttacgattatatataacatgattcttcttccacgtgacactctctgacgtctctgtagatcaacaattatttatgtttctctcaaattttctctgtggctccagtttctttagtctatcctcttatcatgtaagtggattctggcttatattagtgcctgaagatttttctttgaatgtgttcttatttctattttattattaatttaatttgtatgttgagcgagctgacagccacaactcagccaagaaatagtttttcggtaattttgagagctcaggtgcaggatcttcagatctacccctattaaatttcttctattaatatttttatggattccaaatgtcatccagcctgctttcaatcttcaactttgatatccattgcaaacatagtaaaaatggctttttttggccgggcgcggtggctcacgcctgtaatccctgcactttgggaggccgaggcgggcggatcacgaggtcagnnnnnnnnnnnnnnnnnnnnnnnnnnnnnnnnnnnnnnnnnnnnnnnnnnnnnnnnnnnnnnnnnnnnnnnnnnnnnnnnnnnnnnnnnnnnnnnnnnnnnnnnnnnnnnnnnnnnnnnnnnnnnnnnnnnnnnnnnnnnnnnnnnnnnnnnnnnnnnnnnnnnnnnnnnnnnnnnnnnnnnnnnnnnnnnnnnnnnnnnnnnnncctcaaaaaaaaaaaaaaaaaaaaaaaaaaaaaaaaaaaaa

SEQ ID NO: 7627 - DNA, 187 bp, Macaca Fascicularis
taccctcactgccccctcaccccaggcaagccccttttatctgaatgtcagaggcagcctgcctcctggttatcatgtctgatgaggtctagctcggaaaggaattccatctagggatggaatatatcccctcaagttcaaaagattcgaacacatagagctttgtttaaaataatgcgtcaaaata

SEQ ID NO: 7628 - DNA, 719 bp, Macaca Fascicularis
  misc_feature (1)...(719): n = A,T,C or G
acctcaaggccctgtcgnnnngcaactcaccgctggagttcgaccaggagaccctctactacctgaaggtgtnnnnnnnnnnnnnnnnnnnnnnnnnnnnnnnnnnnnnnaatcaatatccatgtgtgattttaagcagctcaagcatcagctcttaaaaannnnnnnnnnnnnnnnnnnnnnnnnnnnnnnnnnnnnnnnnnnnnnnnnnnncccaacaacccagcacaggcagagtctccatcattctcctgcccccaccggagcagcacacttctgtatgaccgacagacccgcatcaatgcggcaccaccacccagagtccacagctcccacgagggctcggcctgctgctgctcactctgtgggtttcacagacatggaacggcatggatcccccatgaaagccccatccagagttgcttccccaccctacacatccccctatgctcctcccattcatccctcccttccccaacccctggcagcctctgaccattctactgtctccacagctttgccttttccagacnnnnnnnnnnnnnnnnnnnnnnnnnnnnnnnnnnnnnnnnnnnnnngactcacttagcaacatgcatttaagatccgtgtcttttcatggcttagtggtccagttctttttagtgctgaataatatcccagtttctgacgtaacacagtttatccgttcacttactgaagcacatcttggttgcttt

SEQ ID NO: 7629 - DNA, 179 bp, Macaca Fascicularis
aggaggccagtgtgatcttccagactcgagttagaaagaaaaagtaaatatttattgaggtcttaatgtggtctagctggatttgtgacatttcttatctttaatccttggctccacctgctgaagtagtggatattacctctattttgccagtcagtaaaccatggctcacttttctc

SEQ ID NO: 7630 - DNA, 1125 bp, Macaca Fascicularis
  misc_feature (1)...(1125): n = A,T,C or G
atnnnnnnnnnnnnnnnnnnnnnnnnnnnnnnnnnnnnnnnnnnnnnnacnnnnnnnnnnnnnnnnnnnnnnnnnnnnnnnnnnnnnnaacaaaaccagtatacaaaaaccannnnnnnnnnnnnnnagnnntcgccccagtgttctgcatggattcatcatgcccaacatggtaattcacttcagtataatatctcctttgctcttgccaaaaaatagcacacttttccacattccaatgatgtgtgagctatgcaaacaaaatccaannnnnnnnnnnnnnnnnnnnnnnnnnnnnnnnnnnnnnnnnnnnnnnnnnngatatttgcactatttccacatggaatcaatctttaacaacctctgagccttggtgtacagatcacctttcacaaaacaaaatgctatgactgtatcttgaactttgaaaatatattttcagtnnnnnnnnnnnnnnnnnnnntgctctctcttagagaaagaactatgaaatcaactgacacnnnnnnnnnnnnnnnnnnnnnnnnnnnnnnnnngcagactgttcttactgtaactacttcctgattaggaatatgaccatttgactgttcaatgattatttgtatttacagtttccagagtttgtcattataataggaacaatctttgctgtatacttttaaaaaatactgtgctatttctcttgctggaactgttgaaagaaaatatatagaatgnnnnnnnnnnnnnnnnnnnnnnnnnnnaaacatactacttattttgttgaaattgtcaaagactgtatttagatctcataatgctttgttaaatgtttacaacagtaaatagtttgaattcagtaaatattattggttgttgtattgatcaatgcatgttaccccttcatttcagactaccagtttcttttatgttaactagaatgtttttgttaaaagttatttgttcattatttgtgctaccctacccctttgattatgcagacaaacctcatcagctgcctaacttatccatctttgaacttctgactacttgttgtatctgctggacatttagttcaactgtatagttttatttacttctnnnatgtgtatttttgtgaagtattcacannaggttaagtaa

SEQ ID NO: 7631 - DNA, 432 bp, Macaca Fascicularis
  misc_feature (1)...(432): n = A,T,C or G
ctagtgatgtttccgggcagggtgaggagtaggcaaatgctttacacaaactcaaagggggcatactttttctccagnnnnnnnnnnnnnnnnnnnnnnnnnnnnnnnnnnnnnnnnnnnnnnnnnnnnnnnnnnnnggcctcgacctcccaggctcgggtgatcctccctgaggcgattcnnnnnnnnnnnnnnnnnnnnnnnnnnnnnnnnnnnnnnnnnnnnnnnnnnnnnnnnnnnnnnnnnnnnnnnnnnnnnnnnnnnnnnnnnnnnnnnnnnnnnnnnnnnnnnnnnnnnnnnnnnnnnnnnnnnnnnnnnnnnnnnnnnnnnnnnnnnnnnnnnnnnnnnnnnnnnnnnnnnnnnnnnnnnngctggaaatattttccagcaaagcaatccatccctcctctcactttaggcaggagaatctgg

SEQ ID NO: 7632 - DNA, 805 bp, Macaca Fascicularis
  misc_feature (1)...(805): n = A,T,C or G
gatgatgagagtgatgtgcaattaccagacccgattnnnnnnnnnnnnnnnnnctgagtgaaccacatnnttggtgttaccacgagtgccacagtctaaggtgctgtccattacctcaaatccgatgagtctctgtcaagcaagcagnnnnnnnnnnnnnnnnnnnnnnnnnttnnnnnnnnnnnnnnnntctacagccaagaaatctctccctaatggacaagctcctagatcttgatgacaagctacttatgaggcctgggtccagtaccatcctttcaactcgaaattggccaaatcgagctgtggagtttagtacatcatctctgtnnnnnnnnnnnnnnnnnnnnnnnnnnnnnnnnnnnnnnnnnnnnnnnnnnnnnnnnnnnnnnnnnnnnnnnnnnnnnnnnnnnnnnnnnnnacctatggaagaaatcctcagaggagcccgagtcccagtggcagccgactcgctctcctctccctcaccaatgcccctgagtcgaaataatctgctaccacctattggcacagctgaagtggaacatgtgagcactgtggggccacaaagacagacgaaaccccatggcgactctactcgagctcaaagtgcggtggtggatgaacctaactatcagcagccacaagaaaggctccttttgcccgactttttctccaggcccaacacaactcaatcatttttggtagagtgacatacttcctagaatggtcttgatagttggggaaagaaaacgtgggggaatactagtttggcagacttaagacttanctagaggctaactca

SEQ ID NO: 7633 - DNA, 983 bp, Macaca Fascicularis
  misc_feature (1)...(983): n = A,T,C or G
gttagttgtgagggatgtttctggtttcatttcaaataattaaatttctactnntactaccaagaggactggctcagtggtggcaaaatagtggtgatgctccctagagcaggaggcccgaaagtgttgaggcagccatcagcctgccaagattgtttttttaatcttcacagtgttttaaagaacatgttaaaaaaaaaaaaannnagtgctcctgctgtcaagatttctgtcatggaaaccttgtttgagaaaggtgttaataaaattctattgcaaaaatttctttttctagaaaaaataaatacaaaaaaaagaagaaattccaaagtaataaaacttttcttgagannnacaaaaaaaaagtttgcttactatttgattaaataaaatttacttacatttctttaaggtattttaattttttaatgtctctgtggagtatttgtatgataccataatgtatatttatgtagaatcaaattatataaacagtaccaatatcattatagaaaaaaataacattttaatgtatattgttctaacaatcatattgtgaatcattttgaagttcattatagcgatattgataaattgtggaattgtcttaatgtttttttattaactgatattattttaaacctaatgatcagttacattcatcagttggtgagttttgaagaataactacattttatttcaaactaacaaatgtatatggttttagttcagtgttgaagaattttaatacaatattaaattacttgaactgaacagttccttgtatatattttgcctattcactgttgatatgtatgtagcaaaatgagagttaaataacactaaaatatggtacccggaggcaattgtataggagcaaagtcaataggagcnnnnnnnnnnnnnnnnnatatgtgtaaataagcttgggcttccagttataaacttcgtaattttagtcattatttatatnnntannnaaa

SEQ ID NO: 7634 - DNA, 725 bp, Macaca Fascicularis
  misc_feature (1)...(725): n = A,T,C or G
gacgcgaagcgcggagacttgactgcaccgggccgcccngagctctcagcagcacggccgtggcgacgcagagcatcagggctgctccggccgtcggagcaccgcgcatcctctcacgtagcctgggagcggggatgcggggactctcggggacgctggagntnnaggngcgagggttggagacgcggaggaccaaggggatacccgcttggttgcagaaggcgctggaaagaatcagatcacaggggtggatctgcttagctctgtttctccccgctgcgctcgaggacgtgtttataagttgggtgcggagtgggcggaggagccttggaggcggggtgcggggagtggcgggggcagggcctgtggccgggggaggggtcctgtcctctggaggcctggtagtctgcgggctgggggatgccctgggggtgnnnnnnnnnnnnnnncccgccnnnnnnnnnnnnnnnnnnnnnnnnnnnnnnnnnnnnnnnnnnnnnggtgactcttcttttccccacggtgcccgtctctaggctgtggaattccaagccccctattccgcccctgccttgcccagtggcggagagggcgcacactgtagctgagactggaaggcagaagcaggggtagagggccgggcgcggtggctcacccctgtaaatcccaacactttgggaggccaaagtgggcggatcacctgaggtcaagacttcctagacagc

SEQ ID NO: 7635 - DNA, 544 bp, Macaca Fascicularis
acctcacccactctaaccacctccccacccagaccagggtggaagtccagatgccccaagctccagccacccacccatcacagcctcctgcttttgagtttgccctaaatgaaaatgaaaccagtcgtgttccctcttgttttctcctagctacctccctaaggtctgtcaagactctaaggcactctgggtagccactctcctgcctcagagtagaaagaaagagcagtcatgtgctcccagaaggactctaagtcaagtcgcagagctaaaaaggcatgaaggtggtaccagctcacgggtcactgggcctggctctgcataggcctctgccttccttcactgtgcaccctgggctcatgcaccaaggcggagaacaggaagaagtgaggggacaagaagaaggcagaatgtccagatggaggttaagactaaagagccaggttggtggtgtggtggtaggaaaacaaagctggaagaaatggagaaggaacaagtgagggacaatgaggcacgggctggggctgggctacccctcccaaac

SEQ ID NO: 7636 - DNA, 1581 bp, Macaca Fascicularis
aaaggggacagaaggaggtgcagttggagaggtaggcagtaggcagatcctccagggtcctgcaggccaccttgatgggttggaatttcatttacttgcaaaaggaagtcccttaatcataatcctagaggctgtacaaactgtttttcactctgtcttgatgaaaagttctaatcacaaatggtaactttgaacaagaatcactctttgggtagctggaacacgtatccctaaatggattgggaaagatgaagatttgtaatactttctgagcgtggacagcacctttcagctactcttggaatgtgtgtttagctctattgacaagctattggaaatatgtgggacagcaccagaggggcttcacagcaggactgagaaagtccctcagcttacctcctttcccatcatcagtgtctgccccatcatctgtcccaggcctgtaagtcccaaatgaattattccagtgggttaagacctcaaagatgctgaagaaattggagctaaggtaaatggtttccaaaaggtcaccaagtaatatctgcatttcatcagttgcagttaagatttttgtttctcgaaatactggttttcaaacagatcagcattacctggggagcttgtttaaaatataaatgccccaaggccagcttcaggacattctgactctgtaggtgtgtggtaagcccagggaatcgcattgttaacaggaagccggtggtttctgacacccggacaccgactgaattctaggtaacttgcctgctgtagatgagtgtgtttgtggagtcctgcgaggggcatcttggtgggacccttaggctggcaagggctttgagacaaagtaggtggaggctagaatggatacagcagtaagaaaaagactccacaggccagtcctggatgaatctgtggccctgaaaacagagaacaagaacagcctaagagcagcatgggagccattccctctccccagctctctagccgtgtccctctcatttggaaactggaccaacaatcacagggcattatttggcttcagaactctccgtgcagccctcagcctctttatgcactttggtttgtggttttgattgctggcttcatctcagaagatttgagtggtggccttgggtgctggccatttgcccatccttttccatggcatattattttcaattaggtaattcattgacatggaaacccaggaacccagaagccccagttttggagtgaaggcctgagttgtttgttttaaaaatgggcgcagttggttggccacacctgtaatcctagtgctctaggaggctgaggcgggaggattgcttgaggctaggaatttgcgacctgctgagcaaaatagtgagatctcctacaaaaataaaagtaaacaaaaattagctgagaatggtggcatacacctgtagtcctagctactcaggaggctgaggtgggaggattgcttcagcccaggaggtcgaggttacagcaagcaatgattgtgccactgagctccagcctagctaacagagcaatactctgtctcaaaatataaaaaataaaaaaaaaaaaaaaaaaaaa

SEQ ID NO: 7637 - DNA, 1048 bp, Macaca Fascicularis
  misc_feature (1)...(1048): n = A,T,C or G
gctgtgtgtagtgtganntnnncaacannnnnnnnnnnnnnnagacacancncncnannnncnnncctagnnctgctctcaggnnngccccannnnnncacaggtcccctcccctgtctgtcttctcccaacaactgcgccctagagggctccgcacggcccctgtgtctctccaccacctcctatatagcattcccagagacccagagggcccatttgtaaagatcaagcttgtgtgtggtgtcgtggtcacatctcccgcttcccctcatcctgtgtctgggcacggttcacagcaggnnnnnnnnnnnnnnnnnnnnnnnnnnnnnnnnnnnnnnnnnnnnnnnnnnnnnnnnnnnnnncggatccagcttgcagaagagccagcagggaactggaagctctgaggtcaaggccagggcagttgagaatgggnnnnnnnnnnnnnnctgacctgggcaccccnnnnnnnnnnnnnnnncacagagatgccagcaggacaccacttcaccagcccgacacacagacctctgtaaagaacggcgacgggcgggagaggcagcgtgnnnnnnnnnnnnnnnnnnnnnnnnnnnnnnnnnnnnnnnctagctgccaaacacttcaacctgtgtaactccatgtacatttgcgacagnnnnnnnnnnnnnnnnnnnnnnnnttctctgtgtgtgtgtgtgtgtgtgtcgtgaccggcctaagtagttagcataactcaagattcgctgatgtgcagtcacccatcagagaaaataaaaatggaaaccacgttcacggcattttaaaagtttttactttnnnnnnnnnnnnnnnnnnnnnnnnnnnnacatagtaaatcattttaaaagtacaaaaagtatgaagaagtttgttttttttaaaaaaaaaaaaaaacattattcctccannnnnnnnnnnnnnnnnnnnntcagcatttaaaaaaaagtcttttctgtnnnnnnnnnnnnnnnnnnnnnnnnnnnnnnnnnnnnnnnnnnnnnnngtttttgcccacttattataccccccc

SEQ ID NO: 7638 - DNA, 188 bp, Macaca Fascicularis
acttacggtctctctggccagtacacccatgaatttgatggagacgagcagttctacgtggacctggagaggaaggagactgtctggcggttgcctctgttcagcaaatttggaggttttgacccgcagggtgcactgagaaacttggctgtgggaaaacacaacttgaacatcctgattaaactctc

SEQ ID NO: 7639 - DNA, 747 bp, Macaca Fascicularis
  misc_feature (1)...(747): n = A,T,C or G
gtcaggagccagcacaggancnngtgcatgagcgagcctgacannncacgcatggccactccagagctggtccccgtccttggaaagctgtgaagtcttgcgttgagttccttctcgatattgacggctctgtgctgacattctgagctctggagtcgcactggcgcagggccgtggaggaactgaggtttggannnnnnnnnnnnnnncacatagcttggcctcgagaaggtgagaggaaggccaaggtcagggagaggacccagagaggtctggcacacaaggcccaagcaccaccgtcaacacggcccagtccatannnnnnnnnnnnnnnnnnctgaaaaatattttacagaaagatgccgcctgtagccggtgacagccgcaaccctacaggcctcagttccttgcagaggcgaggagtagagagtcagcctccctcccttccagcagcgacccagctttccccgcttccaggtggtgctgggctnnnnnnnnnnnnnnnnntgggtcctctgaaaacccacaggctctgctcggactccacccccannnnnnnnnnnnnnnnnnnnnnnnnnnnnnnnnnnnnnnnnnnnnnnnnnnnnnnnnnnnnnnnnnnnnnnnnnnnnnnnnnnnnnnnnnnnnnnnnnnntgtcactgtggctcagtcacatccctgtgtgtatactgtctgcggggcacatatgtatccgtttagagctaaaggaatcagtgtacactacagct

SEQ ID NO: 7640 - DNA, 713 bp, Macaca Fascicularis
  misc_feature (1)...(713): n = A,T,C or G
gctatggaaatgatatttgttttgcctcctttctcctactctttctcatttcctcgtcattagtgaagcatggcacaggacaaggtgttgcctgtgagtccagttataagttcagcttttagtgtttgcagcactaatatcttaaggggtcatgagcattctggggagaagtgacaactaaagtgaagactgnnnnnnnnnnnnnnnnnnnnnnnnnnnaaaaatcagaaaaatccagatgatggaaaggacacgtgccatgcactatcataataactttctaattgaacacttatattataatgtctaaatccctgatttcaaaaaaaaaaaaatgcacttcatgaaaaaaccatggcctcatttggctctgctctcgcaccctgacattggaacttggattactgtgaatattgcagctatagcaaaaagaaaaaaaaaatggcatttttattctttctgatagtctagaatttaaaaaaaataaagaaattttaatacaattggcttttggagtaaagtctaccagtattaaccaacaactatcctcatatctccataaaaaataaatgtccacaaaattgaatgtttatacttgatgcgatttaaaagtgtgtaattccagcacctaaagaattctgtaggtcatggagcttttggaaaactccaattcatcttggaaggctgtggtagatatgtacagcttagtagaa

SEQ ID NO: 7641 - DNA, 734 bp, Macaca Fascicularis
  misc_feature (1)...(734): n = A,T,C or G
gagttagaatcattngagcagcaccatcttaattaactcattaacatatttgtagccaggcatgnnnnnnnnnnnnnnnnnnnnnnnnnnnnnnnnnnnnnnnnnnnnnnnnnnnnnnnnnnnnnnnnnnnnnnnnnnnnnnnnnnnnnnnnnnnnnnnnnnnnnnnnnnnnnnnnnnnnnnnnnnnnnnnagggcctggtggcacgcgcatgtaatcccagctattcggaaggctgaggtgtgagagtcacttaaacccaggagatggaggttgcagtgagcagagattgcaccactgcactccaacctgggtgacgagtgagatgccgtctcaaaacaaaaacaacatatttgttcacttttgaaccctgtggtgtcttttaactttgttacgggcccttggttagcaaaattttgagtttaggaaatttggctatttcttgggtatattaagtacaactccaaaatcctcttgagttgtctgggaagcctaaaccttgagcagtatccaagtggagtatatatcttcaagaatacagatttttaaggtaagtagttttctgtctttgcatctcctaagaccattgttacaaccttgatattaaagaagtgaatgtaaacctccttttgaacatattttttataaagaaatattttgttaattggagtaagtagtattaattgttatgaaatcactatgtaattgttaattgtaaactgcaatgtctatttt

SEQ ID NO: 7642 - DNA, 675 bp, Macaca Fascicularis
acaagattcctttgattacctggtttctagcaagttgttaaattaatcgtattgtcagttttggtttattctgccaacacgagatacatcctataacgtgtacttgcttcgttctgttgtttggttttttcacaatcacgctgagacaagctcaggcctattcaatacaatttactgacatgacaacctagaacgaagatagctatgtggcatcacggtggaagagtgttagatttttcttaattccactaaagtgcctattgaaactcttatcatttaaagcggtgtacagtgcactctgctgtgatggtattgcaggattcagaaataaagaggacataaaacaaagacgtccttatgtcaagaagcaatagcgacactctgactctcctcattccttttgagaacaaaggaacacttcctgatctccaccgtcttctaatccaaaaggttttctttttcttttttaaactgtatgctaagacgtatgtttatcctatcctttcagaaaattgaaataaatatgaaaatatcaagttcaatatgtaagtcccgaattctggaaacgatgtttgatcttaacattagttcacattaaagctgttcattaaaatgttactttcttttcaaaacaacaatccaataaacaaaacagacaggaaaaacatattcctc

SEQ ID NO: 7643 - DNA, 916 bp, Macaca Fascicularis
aacaacccagtcggctgccggcactcacaggctcccagtactgccatctcagcaagccgaggtctcctggtcgcggcacagctcgttggtgggagccttcattttctcgatggcggcagcgatcagagtaatggtagtgctgaaggctgtccctcctcgatcagagcaaacatttgtttcctcctggtctgaggcttaagcaatggagcaacattttcttggctgtgtgaagcatgtttcagattccgcagaggtggcgccagagccccagcctccgcctattgtgagttcaaaagattgtggtccctggcctctttctatgtatccagtagcaggagagtactcattggacagctgtgatttgggactgctttccaatccttgctggcggctacccggagtctacccgcaaaacagactctttccaagagttcagggcatcttagaaccaagtacagtggagcccacgagttcagttggccctggacacagaagctataagaggcacctgtagaggaggtggacaaatcagaggaagcccacagattcacgctccagcagcttccctggtgcagtcctccccactccagggacaaatagcatgaaacccaggcctctgaaggcgggcgcctttcagggtgccgccatccacctgtcttgaagtggtggtgccaccacccgggtttctcaggctgcctggagtggattcgtcaccttggttgtgcccattctctgtacgctaggggtgctgcccagggacctttggagccaagaagcttaagatagcagcaggagccattttggattctcctccttgaaaagattctcagttacaaaatgtctttatttagaaagtaaaaatacatttagatgtgctttcagtgctcatggtcaaaaaaaaaaaaaaaaaaaaaaa

SEQ ID NO: 7644 - DNA, 2112 bp, Macaca Fascicularis
tcgcacgacttggagttactgtttatctgataccccggcacccgtacgcaagcaagcccacatctacacacattcatacacgcccttcagcaccccctcccagcaccacgatcatggacgacgactatgaagcgtaccacagtctgttcttgtcgctgctgggactctgcccatctaagacttccatcgatgaaaatgccgccgtctttgatcctgaactggtcattgcccactgcttcaagcagttcaagcagaaggacttccgcctgcctcagacccgccggcgaatcatcatggtgcctcgcaaggaagatcagacacccattaatcctgcatcccaacctcaggctcccccagagcccatccccagcttcaaagctctggaagctaaagatatccaagagcagccagaggacaggaagacctggctgagccggagggcgaagctgcggcaggagctggagtcctttggtgatgtaaagaggtggctggagaacaagcccagcatcacgccttcagaggccaaggtcttacacatgatccacgaggagcagagtgcccagacaaatgcctcccaggcaactaccaggaccaccaggaaaaaaggcccccggctctcccgccagatggtgccccagctccagctgcccaagccccctgccctgtcagtcatgtactcctacctgcatagccgcaagatcaagatcctggagatatttcacaaggtgggccagggtgagaaccagagaatcaccagggaggagttcatcacggctgtaaaggcagtcggagtccctctgaagaaccaggaggtggaggatatagtgatctacctcagctctcttgggaagcacaacaccatcaccatggacatcctggccaatacctacaagcagtggtctatggctcagcaaaggagcagcctggccactgcaaggaagcgttatatcttggttaagcacagagattccctgaagggtccgctcaagaagcaggaggtggatgcagccccacagcttcccaaagtggacctgctgacggtgcctgcagtcgacacacagatggaggcgcggcccatgaccctggaggagatggaggaagtaggcaagcggtaccgcgagcggcagcgacagcacaagctcatgatcccctccatccagtacacggagcagtgccgcctggtgcgctgtgggaatcggcactttgatgagcactgcctcccgtccaccatccacggggatatgagggagctcattgactcgacccgcaggcacaactttctcgtctacctgcaatgctggaagctctgtgagtcctatggcctcccgctgacggaggacatcctcatgaaagccttgctgtacccaggagacaagatcattttccagatggacaaagtgcgccccatccggcagccaggaggctactactctgactggaaggtcttttctccgaatctggctctgctccggtcccagggccccagcaagtctaagaggactgacaagaaaccaccaaagaaaagcaagaaaatgcactttaaggagtttgaggaatttaccaggaagctgaaggtgaggaggtccagcagtctgcagcaaacccaccccaattccttctggccgggtcaccttctggataagctgcagctctacttgcccactgtggccacagacaggagcctggcgctcttcagttgtgttcaacaccagccccatgtctacccagccacctaccaccctgaccactggtggccccttaggaacaagaactacatgacccgcgcctattatgatgccgccaaggtgtactacatcaactagagcgcgccaggtgttgccgggcccagccttcctgggccaggagccggtgcagccagcggcccagagcccagacacaagaggaatgtcaaagagtcagactaaagaaattcttgcaaagaggggtagctggggcccagttccctctagactccaagtgtccagtgtctcagagggtagatgtgtctaagaaaggacatacagtttttgactatttccctcccctgacctctgccctttttaaataaagcaggttggagtttttctcacgtcaaaaaaaaaaaaaaaaaaa

SEQ ID NO: 7645 - DNA, 748 bp, Macaca Fascicularis
  misc_feature (1)...(748): n = A,T,C or G
gggctgggcgcagtggctcacgcctgtaatgggaggctatcacttgaggtaaggagttcaagactagcccatagtgaaaccctgtctctacaaaaaaaattagccagnnnnnnnannnnnnnnnnnnnnnnnnnnnnnnnnnggctgaggtgggagaatcccttgaacccgggaggtggagggtgcaggaagccatgatcgagtcactgcactccaacctgggtgacaagagtgagactccgtcttcaaaaaaaaaaaaaaaagaactggattgtctggctcaactccgggcacggcatgcagggcccagttctgctgttctgctgtttgttctgctttcctccacatattggcatcaccctctggtgccaagatggctgctgcattccaggcatcacatccagactcagacccagagaagctgcccatccctacctgggtgagcctttgtaggaacgagaaacctcacccagcagcagaaacctcacccagcagcgtctcttctggtctcattcaccagcgctgcccgccgcttaaccaatccctggccaaannnnnnnnnnnnnnnngatggctggaccaatcgcgacctgccctctgggcctggggagaggcccggatgaaggctgcaggacaggatggaagtctagacctctgttaccagcagtgactacttctgtctgggttgttgtaacatgtttgaattgtattctcttttaagtactgactaaaagttctgcataaacct

SEQ ID NO: 7646 - DNA, 725 bp, Macaca Fascicularis
tccataaagatgctaaatactttcatcatcacataaatgtcttcataaaccaaggactattaagtgtattaaaatgaaacagtggagtttagtactccaaatgaactcttaaagaaaaaaaaactaatcttggcatcctatcactatgtgatattttgtacatcttactgtatttacaagtttatttatcaaggattatccatcttgctaatggcctattatttatttcactttttgttggtctttatatccttttattaatgtgctaaaggaacctgtatatctattttggaaatctttgaatagtctaaaatagactaaaaatggaatattttatagtttaaattacaaaccaagatggttccccctaagatacgtatcttggtttaccatgattccaaacaaaactaacttgttttaaaatatttggagtaaaattttatttgcattacaaataggatactaaaatagttgaatcaggatacagaaatctgtgttttgactagttatccctgttttatttttttagatgtgcttaattttatggtgtaactaaagattttgtttgtgtaatgcatgattaagacaataaagtattttttctagtcttccaagaaacttttctgatcagtttgcgagttttgatgagttttgtaaggtttttgttttacaaactatgaatcagcaaatttttaagattgtaccacatagcaaacatacagctg

SEQ ID NO: 7647 - DNA, 747 bp, Macaca Fascicularis
  misc_feature (1)...(747): n = A,T,C or G
tcatttgagtcagggagttgnnnnnnnnnnnnnnnnnnnnnnnnnnnnnnnnnnnnnnnnnnnnnnnnnnnnnnnnnnnnnnnnnnnnnnnnnnnnnnnnnnnnnnnnnnnnnnnnnnnnnnnnnnnnnnnnnnnnnnnnnnnnnnnnnnnnnnnnnnnnnnnnnnnnnnnnnnnnnnnnnnnnnnnnnnnnnnnnnnnnnnnnnnnnnnnnnnnnnnnnncaaataaatacattcttctgctcttctgacttagagaaatggtttgcttaaaatgctagtaacaaacatcagagtcaataggagcttggttcatgggaaggatcaatgtgatttgtggatggagatgatagtgatgaaactcctgcttcatgaagctgtttttcttttcatctcactgggcagcagatttagtgaggcagtgagatgctgcnnnnnnnnnnnnnnnnnnnnnnnnnnnnnnnnnnnnnnnnnnnnnnnnnnnnnnnnnnnnnnntgaaatatctgannnnnnnnnnnnnnnnnnnnnnnnnnggaatgggaggtgaactgattttctgaccagcttggggcaccgtttcagccactggtcacattccnnnnnnnnnnnnnnnnttcagttcggctttgagcatannnnnnnntggtggattcatgtacttcagtgtttgttttggccaaagtttatttttctaagtgcattttctaagtcaaagtggtgaaaataggtaattttagtatgcatgac

SEQ ID NO: 7648 - DNA, 713 bp, Macaca Fascicularis
tgctgtatatttacagtggggcaagtgcttttttaatctttaaaaaaacaaagatcaaactttaaacatctctgaacaacacaaactgtataaaccatacagattattcagatacaaactgtattaaatacagttttccccactccatctcctgatgcaggaccagtgaattataagtgtatcacagtttgatagcatatccatattaaaaataaaatcacagtatgattgtgtctgtaactagaaactcgaagggaccaagcagacaacggagactccagtatcagtgaagacaagagacgctgtatcaaaaagtgttgtgtaatagaaacatactgtcggctttacaaatcatgtctgggttatacattcataatgtaaatactcatcataactgggaaattgattggaacagttccacaaagttcaaaaacagaacttgtctataaaatacatcttcaaatcttgaatacaactaaaataagcaaattagtttctagtatcagacattacagaaaacagactgctctccaaagtctaggtgagagcttgtgagtttttaaataagtctttaaattaaatatacacactgtcagtttgtacttttgacaattccatggtctcccggttggtcttgcaccagatgtctaacttggaggaacattacatgaaatacaagtaatcgacctgagtctgtaattaagcagcatttg

SEQ ID NO: 7649 - DNA, 699 bp, Macaca Fascicularis
  misc_feature (1)...(699): n = A,T,C or G
gcaacagagcgagactcnntnncaaaaaaatnnnaataaataaataaattctctattttgatgtcatttannnnnnnnnnnnnnnnnnnnnnnnnnnnnnnnnnnnnnnnnnnnnnnnnnnnnnnacttgaacaatttttcattcagttctattaaatggtatctgtcttgatattcttattgtgttatnnnnnnnnnnnnnnnnnnnnnnttacaaatttaaatagtgccaatacagtagtatatttgttcatttaattagcagtattttaatgtttgttatattctccatatttagtattgaaaactctttaggaaaaattatatgaacaggtgttcaatcttggtattttaatgttaccaaaattgacaacatatatttttcctatgtatttaaaatattggttcttgcttctctgataacttagtctttgaattggcttgccttcaaagacttcattgtcatttgagtttgtgatgcttcagaaatctggtaccttgcaaagtgaatgttagtatttttagtaattactacagacacaatgttgcttactatgtgccagacacttttctacaggctatttatatatatatatatatattcattaatcttattaacatatctataatatacatttatgtttacaacttaaacagtttattacatgttcttcctttgacaagccaaaattaatatga

SEQ ID NO: 7650 - DNA, 257 bp, Macaca Fascicularis
cctcacccaaggtcacactgccaggagctcgtttttcctgtgatctgtgatagtttcttttcaacctttttcttctcctccttccttgctgcctgattgtccccggccatcccagcttggtagcttctcctgggataactgtgatgaaggaaaggaccctgcggtgatcagaagcctgactctggagcctgaccccatcctcattcctgggaacgtgactgtcagtgtcgtgggcagcaccagtgtccccctgagtt

SEQ ID NO: 7651 - DNA, 692 bp, Macaca Fascicularis
  misc_feature (1)...(692): n = A,T,C or G
accgggcttctaggnnngtgtcagtgcagtgtctatgccccaagaccgtggaggttactgaggtggactgaagacagggtctactctggctttggtggaagaagtctgtagtttagggaggaaatgagccattgggaagcacaggtgcccgtcttgagtctggattttctgaccttccttgctgaaggtagattattcattgtctgtctgtggtatctatcgcgggtacagctctgtaaatatcgctccaaaaatataacagagaactctgtctgaagtttgaaagttgatgactagtatttgtaaacgaatgaatcaactcccctatttaaagcagtcatcactctgttggagaatttttgtttctggtacaattaaactctgtgatgacaaaagcatttgatactaataaagcattcataaatgcttaataagtaccttgccaaacactttccacgctattttattttgttcttaacagtcttttgaggaaggggcagagattgagtatctcacgcaggattacagaggaatgaagactcagatctctattttgtgcccagactctgagctgctttatgaacacctcaagtaaattacttcattggagtgatttgagtaatccatctatagtgtaatattttctgtgaatcattttctgtaaccatatttcataagttaatatctaaaaa

SEQ ID NO: 7652 - DNA, 763 bp, Macaca Fascicularis
  misc_feature (1)...(763): n = A,T,C or G
gtacatagaaccctgnntgcacatagtaanntaattacaagtgtgagtagttggtaaaattatgtagttggatatactaccgnnnnnnnnnnnnnnnnnnnnnnnnnnnnnnnnnnnnnnnnnnnnnnnnnnnnnnnnnnnnnnnnnnnnnnnnnnnnntatacacatatatgtgtgtgtgtgtgtgtgtgtatatatatatatataatcccaaaacatgatttccagacaatggaattgataatttattctttctgtattgattttttcacaatgaacactgataacacttattttattttaagttccaggatacacgtttcttaaatttaagaaaaaggttaataccagcctagacagtttctcttggctcttatactatttagaattaggctcagtttctaattggacagaaaaattaaatagtattcagaatatgtttacaggcttctctatttgacagattattttgattgcaaaggtttgaatctcagaaccttcttttccctttacttaaaaaaagtggtaaaattaataaaacatggttatgagtggttaaaattcatcattttcaccattttaaagtgtataattcggtgactttagtacatttgaaatgttgtgcgactgttaccactatctagttttggaacattttcatcacccaaagaggaaaccttttaagccgtcattcccctcttcccctccctgtattattccctggcaatcactaatatcttttctgtctctatggatttgccta

SEQ ID NO: 7653 - DNA, 674 bp, Macaca Fascicularis
ttagcttgtaaagtttaaaggacctctccgtttcctatacggatttgatcagtatgaagtcataaatcaaagaaaacagaattggatttgcattcccaggcgggatggatgctgccaggagatcacattgcaaatagtgaaaacagaggcattcgatttatgcctgagtcctgtgtataggatcaatcttcctttaattctgcagtctcctcaggcaatgtgacacgggatgcagtttgcagctttagtgcctttcttcgccttttaaattgccacgaatcacagatggctatttagtggccctacaatgctgcaacacatcagcttgcattttagtcttaattatttgtttcttggataatgggcagagttttctgtatttgtgtcagctgttagtggtgaaatagggctctagttaaccttttatttatgaagtataatttagtgttcccgtggctagttgcaagcattttacagtgatcacccagtttaatcttttgtatactttttagaaatgccaagagccttactaaactgaagcagatttatgatatagtgataatttaggtagatattagtcttgaagctcttattttgtgtgcaactgattataaaaacaccttaaccaagtattattacacacatgatatctataactaggactttgataactg

SEQ ID NO: 7654 - DNA, 746 bp, Macaca Fascicularis
  misc_feature (1)...(746): n = A,T,C or G
gtttcatgcnnntttatagtacggtggagtagagaaggcggcttctgnnntttagggtatttttagaattcattcctgagtgaggggttcagacacccagtctcctcagaacaggggtgagggattgactgagctttgttgaggagcctccggttaggcttcgggcacgtctccatgttctattgtgtgtttactgagcttctcactggtagaagatgacacatctgtctcattgtcctgcgtatctgctttccagaggacactgggacattctcctggggtcactcccatgtatctgctttccagaggacactgggacattctcctggggtcactcccatgtatctgctttccagaggacactgggacattctcctggggtcactcccatgtatctgctttccagaggacactgggacattctcctggggtcactcccatgtatctgctttccagaggacactgggacattctcctggggtcactcccatgtatctgctttccagaggacactgggacattctcctggggtcactcccacacggcttcctcacacagctgttttgcaacagcctttattgccaacacccgtggaagaacatctcctgtagaagtacaagttttgcaatttggactttggaagtggttttgtgatgtctgaattttctgttagcctattgctcaagcactacagaatgtacatagtccctttggccatcctcccacccctgaatatcctaataaac

SEQ ID NO: 7655 - DNA, 768 bp, Macaca Fascicularis
  misc_feature (1)...(768): n = A,T,C or G
gnncagcatggctggggaggctttggggaacttacagtcatggtggaaggtgaagaggaggcaagacattcttcacatgacagcaggaaggagaagtgccgagagaaggcggaagagccccttataaaactatgagannnnnnnnnnnnnnnnnnnnnnnngtgaaaacannnnnnnnnnnnnnnnnnnnataatttctcagttacctccacctggcctctcccttgatatgtggggattaaggggattacannnnnnnnnnnnnnntgggtggggacacaaagccaaatcatatcnnnnnnnnnnnnnnnnnnnnnnnnnnnnnnnnnaaataaagggaacggactacttacacaaacgtcaatataacaatacagatggctcttcaaagcattatattaagtgtggaaaaaaaaaaagaagagactaaatactgtaagattccatttggctgcaattcttaaaacaggcaaaccaatgatggaaagcagatctgtgtttgcagggcgctgggtcagagcgtgggttcattacaaaggggaatgacaggaccttctggaatgatgggaatattctaggtcattactgtggtggttacaaaacttaccaaattgtacatctaaaattagtgggttctggctgatcgcggtggctcatgcctgtcatcctagcactttgggtgnnnnnnnnnngcagatcacctgaagtcaggagtttgagannagcctggccaacatagtgaaaacctgtttctnnnnaaatacaaaa

SEQ ID NO: 7656 - DNA, 182 bp, Macaca Fascicularis
ccccaccccaccaccctactatgaaattggggagtgagagccagatgtgcgggatcatcatgcagccaaggttttgcctgcccttcgtggtggtatttcaggttattttggcaacatgtacattgctttttttttttttttagctttattgcttttattgtacagtcagtactataaaattt

SEQ ID NO: 7657 - DNA, 740 bp, Macaca Fascicularis
  misc_feature (1)...(740): n = A,T,C or G
caacnnnnnnnnnnnnnccactccccacagccaaggacaaagaagggcagctgctcccacagccacctnnnnnnnnnnnnnnnnnnnnnnnnnnnnnnctccaccccgtctcctccagtnnnnnnnnnnnnnnnnnnnnntggcccagtgggtggcctccaccttccttctaaagacagcacccacacgtggcctgacgctcagacattccctcaccnnnnnnnnnnnnnnnngacctggcgactgaaggcgccacctagggccggcctcagccccctgctgcacactgnnnnnnnnnnnnnnnnnnnnnnnnnnnnnnnnacacaacagctggctcagccagctgagggttagtttactcataagatgatcgtcataaccaccttggggctgttgtgagaatttgtgggaactggacactctggcaactcccaaggatggagacattattgcatacaagcacacacacaatcccccaaggccagaggtccctggggtctccctggcccctaagatccaggctaaatgaactccatttccagctgtgccttnnnnnnnnnnnnnnnnnnnnnnntgaattgggggtggcagcctaannnnnnnnnnnnnnnnnnnnnnnnnnnnnnnctagagctgcgccatccagtccaacagcctcaggccacgtggctactgagcacttaagctgtggctagtccaaactgagaagcactgtcagtgtaattgtgaaatgatcagat

SEQ ID NO: 7658 - DNA, 106 bp, Macaca Fascicularis
gacagaggagtgctgttttccctctttggtcgtcctccttagttagaagaggtgtgaccccacccatgaggaccctcgtcatcctcgttgccattattctggtggc

SEQ ID NO: 7659 - DNA, 680 bp, Macaca Fascicularis
  misc_feature (1)...(680): n = A,T,C or G
aagggactgaccaacnnnnnnnnnnnnnnnnnnnnnnnnnnnnnnnnnnnnnnnnnnnnnnnnncacattccaggtgttgcacttgccagtgcgctgatgaagagtcactgagaactccacctcatctcctgcctggagctcaaggccatcctcaacttcannnnnnnnnnnnnnnnnnnnnnnnctatctcttacttcatagttaatgaagccaaactgatctttcacacattccactgtggccctatgcaggggtgtgaggnnnnnnnnnnnnnnnnnnnnnnnnnnnccctggtctggacttttcaaaaagcaaatgtaataaaacaaaaagtggtctcttctagattaaggcaagagagataatcgaatggaaagtgtgatcctttattagcttctgattcattaaaaaaaaaacatataaaannnnnnnnnnnnnnnnnttggggaaataggaagatggaatgggtattagataaatgtggtgtgtttgatttttctagaagtgannnnnnnnnnnnnnnnnnnnnnnnnnnnnnnnnnnnnnnnnnnnnnnnnnnnnnnnnnnnnnnnnnnnnnnnnnnnntgttggcagcatattttcaaataaatatgtacaaaattagtcaactttttttgtggtggatgtagagatgttcattggtcatttaaaaaattt

SEQ ID NO: 7660 - DNA, 2031 bp, Macaca Fascicularis
ttgttgaatcaatgactgcttagactcctagctgaccatttttcttatttagtcgtggttattacattcaatttttgttaccatattcaaaaggttttaatctcaccatattatctactggaacctaaccattcactaaagatgtccttagacttctagaagcaacaccataaccttttctcaactacctgtttgtcaggcagtaatgaaatttcctctgatattgtctactgaaaagaaattctaaaagaatacatgaaacttaattcggaattacaaagactctaaaccattctgtagaaattatttcagaaaccagatagaagttattcctctaagtgacattccattgaagtggtttttgcagagatcattataactattgttgctgagccagatgactgttttcagtccataagtaactcaaacccatgatacattggtcaccattaatcatccaatcctctcctcttaaaattatttcctttcttagtttcatggcctttgtttctctgttttttctcttatgtctgggtgtatctttttaccttcttggcaaaataatcttctcttaatgaccccaaaagtgctggtattctccaaagctccatctcggttctctcctcttccttgatatcgcgtttactcagataatctcatttactcttttggttttatggtccaccagtatgtagatagccctgaaactggctagtctaacctaactgcataaactccacacccatgtagctaacttcttgctagatatttatttgctggttttatgtaaaattccttgtctaaagtttaacccaatatcttaattttaaaatttgcttccgtattttaatagtttaattgcgcactctgttgcccaagccagttaaaaaatgttatcccgttccttactgacatatctaatagatgaatgaagacttacaaattttacttatctgatatttcttgaacctgtccatgcagcattgtattcattctcattgcctccactctgactgtcattatggtttgcttggtctgtgaaaatatacactgttttcctagtctcaattttttaacttctaattcattctacttaccaccatagtgaagcttttaaaagtatttgtcaccgccttagaaaaattcaagataaaatttaacttcttcattacggatctgaatcttcttgtttgcttatctgtgctcttagtatcgcccccacataccttgtgctcattatactatgtctctacttaactactgacagtacttgtgtgtgccatgttctcttacaattttatgaactcacagcttctactccttctgctcggaaagcctcctgctctcaccacttaacctggcaaatttctcattcctcttgaaaatttaagtcagatgtaactgctattggaaatcttctccaatcctgccagttttcttcctccaggcagacatccttcatacccgtataaaatattctcttatttcaatagtttatatactgagtgttttaacatatttgctctctagcttactatctagcacttgaaatagtcagtagtcattatggaatcttacttaataaatgtcacgtcatataattccatgattatcaagacgtacaaagaacatgatttaaaatggcacactgccatacagcttaaagtgtattactttgcttaggaacaattaacatctgattttttgggtatataatgacggaaaataaagtagctggttggaaaataatatcccagccgtatacctaaaaatagcagtggctagaataaatgaaatttaatactgtaaatttttaaagtgatatttaaaaaaaaaactcacagataaaagactagtcattggttttgaaattcttcttgacagtgtataatgtttaaataatcaaacctattcagtttaaataaatcaattccagatgataaataaacttgaaatgaagttagacataaattagagacttacatatatacagctaagaaaaaaaaaaaaaaaaaaaaaaaaaaaaaaaaa

SEQ ID NO: 7661 - DNA, 768 bp, Macaca Fascicularis
  misc_feature (1)...(768): n = A,T,C or G
tatgcatgnnnnnntttattatacatgttacaaatatgcagactgtgttgtttgctccagtgataccttgtaagctagnnnnnnnnnnnnnnnntggttttgatgcaatgagcaatgtggatgtgaccaagagttgttgtgcaagttgacaaatgccaaatagaaaaccacttggccatttatttctatgttcactaaaaatcctattgccttgtgtgattcttaatctctttttgcaaacctttcagtctccgctagctctttcctaatgagcatttatagcagaagccgttttatnnnnnnnnnnnnnnnagagacactttaccaggaggctgagagagttctccagatctgggagaggcgcagagagagcgtgtgcgccgagcactgtctcagcaatccaccttgaggagctagagtatcctcctccctttaccattcagaccgagagaaaaagcccagcttgtgtgcaccctcgtnnnnnnnnnnnnnnnnnnnnnnnnnnnnnnnnnnnnnnnnntttgttttgatgtaaggctctgtggtttgagggggaacatctgtaaacattaatagttgatttggggtttgtctttgatggtttctatctgcaattattgtcatgtatatttaagtgtctgttatagaaaacccacacccactgtcctgtaaactttcctcagtgtccagactttgtgtaatcacattttaattgccacctcgtatttcgcctctacattgaaatctggcgtctgtttcaagccagtg

SEQ ID NO: 7662 - DNA, 693 bp, Macaca Fascicularis
gttgggttcaagcaattctcatgcctcagcctcccaagtccctaggattataggcgcacaccactatgcctggctaatttttgtatttctagtagagccggggtttcgccatgttggccaggctagtttcgaactcctggcctgatgtgatccgccctcccaaagtgctgggattacaggcgtgagccaccccgcctagcctctgaattttaagtgtcctatggagttactgaagtgcttctgtggaatgaacgtggccttggtcctgtatttcaaatgtgccatgatggtgttccgaagccacaggctggacagcatcaccacctgctgaagtcagggcctagactcaagggcctgggcctctagaggaggatctgaaattcactatagaacagagcaccctggtcctgacgtgcgagcagaccacgcaaggccttgacaaccgatctttacaacctcttcccacccctgcacaccttgaaatggttttcaagccaaaatttctgggatcttcccacctgcctgccttagagcccttctctcaggaaccagcccaaatgtttcctggatctctgaggatttgtcccacccccattcccgtgcagaggccatggctcggcgcctggcgttcccgaggcactttgtaccgtcttcagtggtgacacaaatgctatgggattagtgccacctgcc

SEQ ID NO: 7663 - DNA, 660 bp, Macaca Fascicularis
  misc_feature (1)...(660): n = A,T,C or G
aggtcccagctccatcccctagtnncagacccatcaccatggttaccatagcgactgcttcattgccatggttacatactaattgctgcagctctgtggcccagcccactgcttcagctatgggccatctgagggtacgtgccatcatctctccagcccaggcccctgggcatctcatgctgggggaaagggactgaacacctcttccctgccccatgcctgtgtcttcagcccttatgcacagcctgccagccccccagtccagccctctcccttccactggtgccttgcttagagccagaagggatgaagccgggggatctagggaacagaggaggagcaatgcggttgggaggggaagctagaaaggttatagttgagttctgtacagggtcgagtttccgacagggaaagaggattcctccgatgctcctagagggaaagcctgagcaggagatgatgcagcagaggggaagggccctgtggtgccactgcccttccttcagcctccgaagggcgatggaaatggagagtggaggaccaggcctccagctgtccggcctcgcccttcacgccttaacacaaagcccacctccccttctctccttcccagcattaagcccttggttgcgtgggccccaggctgggggttttcagtat

SEQ ID NO: 7664 - DNA, 753 bp, Macaca Fascicularis
aggctggcggggtgttcaagcggtagggaaatagtcactggttcttgcccttggaaaaaattcaggtgatgtctttgacatccagggatttctcaaaggcagtgagtaaaattccaaataaagcccccaaagagtttgcttttccaatcatctgtgccattggtaataaggagtagcccctatgaggtcaggtacacaataaagagggtaaatagaatccttgggaacttctatttcagtctgaggaatgcttggatttgtcaaaagaatggagctttgtaggaaacaggcacaaagacgcaaacccagggcttaacctgctaggaaatgcatggaatgtgaacacaaattaattatttcaaaacgtttttcagatgttatttaaatagtaatatatacgttgatttttcataatttatcaaagcctgtgatgtgcactgaattttctttgtcacatagttttgaatttcacagccttctgcattgcatacacttgaactggacatcaggggaagctacttgagagttctcaactactttcttaaacagtgttttctgaaggcccgtgtcatgatacaactgtgaattattctaccttagggactctggttaaactattggtgaggagctcgagtggtttgtatagaccccagatttttgtttactccaatgtgttccacaaaacccatccggtttttgttagttggttttgtttttaatctttttctttccttctctacttatttaaattgc

SEQ ID NO: 7665 - DNA, 158 bp, Macaca Fascicularis
gtaaaagtcaattaatatttcttatgggaaacttgtgctttgtggggaaacatttatagagcgtgtgagagctcctttttatataaaaagatttcaaagcagtatttgcgcacaggtgtgaccgtgtgggggggtgtcagtgtaaccaaagtatacgc

SEQ ID NO: 7666 - DNA, 733 bp, Macaca Fascicularis
  misc_feature (1)...(733): n = A,T,C or G
gattcacactcttgccttgctagcnnnnntccattcattntcacacagcacttngctctgttaaatcctctctcactctcacaccattgcatgccccttcaaagggtatggttcagctcctttcaagacatttggagtttctctctggggaaggagcgccccctactggtctggcttcagtctaggtccacggtccctctcttgatctggcgtcttgaagattaatttaaaaggcaagctcatcacaatgtaagcctacggtctggtcaaacttgcttttgggaactgtgacaccaaagcccccaggattatctgcccctccaggagtcagatagaatgacatgcctttatcctaattgtccacattccacccccaacccactgccactgtgggccaagccatccatcttgcaatcttcatctaaaacagctctcatttcatgccagttttgctctaacctgcaccgtcacaatatattcagaagatgaaaacgtagaaggcacccctgaattaaaaacacttacatggtagtggctggaattactctaaaacatgcccagtgatctcactgtaacatgggattttctcacccaaataggcaactcatgcttcctgagtgtaatcaaagcacgtggtgttttcgcgccatatgcgccagatttctattttagaaaccttcagctgtcttgcttatgtaccatatgtaaatttattctttttaaaatcactttt

SEQ ID NO: 7667 - DNA, 2069 bp, Macaca Fascicularis
gcgatgctccgagctggcgccggcgccggccgaatccggcccgggaaccacctccaggagcctgtatttttcccttctcgggcccctgcaatgagctcaagaagcatctcagaagtacatttcaagaaaagctcctggggagaatcaaggaccgcaggagggtttggagcaatggcatgacattgggttgcgatgggttatgtaagaagattaatgggacagccgtgtgtgggaatggaatggcccgcagagaggagagccagggaaggcatgaaccacagtaaaccacacagagacgaggacatgacctttggctctaaaaagaagactccatttttcatgataaaatggcagtggtgaaaacccccagcagaggacctagtggaggagccgaagcaaagaaaagaagtacctaatcacctcctcgaatcaaaggtttatgcaaaacttgtgaataataaggtcatacaggccagacctggcataatacattttggaggctatcaagtagaaaaacagcaccaacagattctgcatctggtcaatgtttccaacgaagacacaagtgttcatattttacccccgcaaaccaaatactttgagatcaattatgtaagaaaggaacaccacctggtccctggcttgtccctcacggtcaccgttacattttctccagatgagtggcgatactattatgactgcatccgcattcactgtaagggagatgacactttgcttgttcctattcatgcctatccagtaatgaactcactggactttccttcatttataaatctgtcaaatgttctgcttggtgaaagcaaaagttacgttattcctttgcagtgcagctgccctgtagattttgagttctatatcactttgattcagtctcatcaagcctttgctattgagccaacatcaggaataattccggctaatgggaagatgactgtgactattaagtttacaccctttcagtacgggaccgcacaaataaaaatgcagttatggatttcacaattcaactctcaaccatacgaatgtgtcttcaccggaacatgctatcccaacgtggccttaccaaaaagcaatgatgcatataaattttcaccgaccaccagcgaagctgcagcctcagaaggttcctcaactgtacaaaattaagagatatcagccattctctgtccacaagtcttcaacaagttacagacctcaaaagcttgcccgagccctaaagcaaggagctgaggatgaagtcaccaccatcgtagcccttccaaaacaagactccacaactcagctctctggcaagacatcagttttgagcatgaaaccacctgaggccttagccatgtctctggattatgatcctctgtatatttttaatcccaacccaggattatttgctgtaatgcatcctctgacctacgcagaaacgtcgatagattaccatctatgctctcacccgaagtacaaaatcaccaaagagtcccaccacgggtccagcattcctgtcacccaaaagcagtttctccatcacacggacattattcctggaataatgcactggaaaagcttccagtccctggttctctcctgcctgccggacccctccaaggtggagaccacaaagagctgcgattccttcaattcatttatgcttccgatagacgtccctgccatccttgatgccttaccagaagaagacagactagaaacagttgaacgtgagctctgtgagcagaatgtagaagttatattgactccagaaatgatcaaagtggaattccctatgttgaactacaaggacatcaagaaggagaaagaagtgaaagatcaagcacagccagcagagaaggcgggagagaagctactcgaggagatgaggaacctgcggggcaaagctctcaacacatacctgattctagaatgaaagtcgccagtaggtcagtcccttccatttgctttctgcagaccactgtggccccttgcatccatttacatgccagccatctctgcaattaaagtttctggagaaaacaatgaaaaaaaaaaaaaaaaaaaaa

SEQ ID NO: 7668 - DNA, 745 bp, Macaca Fascicularis
  misc_feature (1)...(745): n = A,T,C or G
ggggcaggtgcnnnnnnnngcgcacggcacagactgggacgggnnncagacactcatggattaccgnnnnctgcaaagcagacacccgtgccctggaggctgccttctcttgtgtcagattctcagagactcaaaacccccaacatctatagtgacgaagttcttcggnnnnnnnnnnnnnnnnnnnnnntggaccacatggtttcgccactggttcagacatcacggagcaggttccccccgataggcgtggagaccagggagcagaatacggcagttcctggatgccaccttgtgtcttacagaggaaggcatctacaaagccgtgtgtcgagtgccgtgcccgacggtatagaacgatcacgtcttcaagaaagaaccgctaccctggaacagctgtcgaggcccagcacaacccacacgttccggcagttggatacgcctcgaaaaagttcactgacacaaatggaatttgctgctcacacatggacagggcaaagtattttgacaggttcacaatatgtgcctaaatcttttcagaggacaaccttgactttaaagaagagattccaagtgacatcttgaaaccacctcaccagaaccattggcgcactcatggtcccagcacaccacttatcacttgaaaactggaggaacaagtattctatttatctgtgtgtctgacagtgtgagatgctagactgagaaaaatgcaaacaaataaatcacttaattttgaacactt

SEQ ID NO: 7669 - DNA, 730 bp, Macaca Fascicularis
  misc_feature (1)...(730): n = A,T,C or G
ctgtttcattttgtntnnnagacggggtttcaccatgttggccaggctggtctcannnnnnnnnnnnnnnnnnnnnnnnnnnnnnnnnnnnnnnnnnnnnnnnnnnnnnnnnnnnnnnnntaccatgcctgacctaacttttgtttttagatattatgcttgccatgtgatagggcctgcaagcctcattgctaggcttactaagaaaattttagtttttcaaaagctttataatttcttaagaaattgaattttttaatattcccatcattagtaatataaaatgaaaggtaagtgccaaaaatgtatttttaaagaccctcaagtttaagatttatcttgattataagccacgttttatagtatatttaaccaattccatcaagaataattttaatatcaaaaattagtgatttctgtagccattgtccatgtcagagttacagtcctttttgtcatcgataatacaacctatgaagcagataaggattgaggaatatgactggaaggaactactatttagctaaggggacaaggtcacttcttaagannnnnnnnnnnnnnnnnnnnnnnnnnnnnnnntttcactttcatcttctttctaaatgaaaataaaagtgctccctctcttcctagaaacatnnnnnnnactacgggaaaagtagaacatgacattgcagcctattgatttcttcttccagatagatttaaagtactccttaagttctga

SEQ ID NO: 7670 - DNA, 756 bp, Macaca Fascicularis
  misc_feature (1)...(756): n = A,T,C or G
acaggcacactgtcacggctgnnnncatactgtcgggagcctacagcccacccctgcnncgggcggcagaaaaaaccgagtnnnnnnnaagacagggtccctccactccaaggatccagatcaggtgcccggcacccctgggcctcctgcccgacaggtagcgaacggaggtcgccgggggcagagggtctgagccctgtgggctctgcggatgcacgccctcctcccgggcctctgcctcagtctgcagaatctctgccgagtggcactgagaacagcatcgatctaaggaagaacaaaagaaccaggagggcgggagccccctcttcctctcctgggttgggggctggggccctgagtgcccagccatccttgttcnnnnnnnnnnnnnnnnntggccgcgtggggaagcaggaacatggggtgtctgcgcatgcttcctcctcctagctccatcaccgcgcacacagctgcctgcctcgccagatgcagggggcgggcagccctccctggctgccaggaggctctgcatgcccatggtcctgccctgcctctcccttcaacctggcagtgcctgtagcaccaaggagcaaaaggggtggatggggtgcttggagaagggcagagcnnnnnnnnnnnnnnnncatgttgacatcttctgactgtcccctgcttggctggagccaggcccttccctagagtttcgtccagagcctcctggggaagggctcaggtggtttgggttgtgtttttaaa

SEQ ID NO: 7671 - DNA, 683 bp, Macaca Fascicularis
  misc_feature (1)...(683): n = A,T,C or G
atggaggagctgggggtcccccaggccaactggaaacatctcccaggctaggccaattgccttttgcacttccctgttcctgtcacatttccccagccccaccttcccctcctgatgccctgaaagcttccggaattgactgtgaccgcttggatgtcgccactgtcagccgctgccttgatgtccccatttagccatcttcatggagctcctgctggaggtccctgaaccctgcacttcgtggctgctcagctggctgcttcctgtcctgggaggaggcctcctgggtatcctcnnnnnnnnnnnnnnnnggaggatcccataggagaggcagcagaggggtcagcggaggtctcttgccagggactggcctctcaagcctcaggggttctagcctgttaaatatctcccnnnnnnnnnnggcccctccaatgtccccactgatggctctgacactatgttggtggcgatgttccagacaatcccaccaggacggcccagacatccctactggcctcgctagtggctcatctcggacannnnnnnnnnnnnnnnnngggccggccacccaggccgcctgtccatcggtcctccctccagcagcaccccctggcccctggagtggtggggccatggcaagagacaccatggcgtctcatgcgaacnnnnnnnnnnnctgtggt

SEQ ID NO: 7672 - DNA, 453 bp, Macaca Fascicularis
agcgtgtagtttagtatgaaagttcttaaccacctgtgtaagtgacaccaacacccagatgtcacagctctccagagctagtcagaagagaaatcaaattagtgtttaaacccatttgcatatagactcgtcagtacatttaactcaatataacaagaaattgtaaaatacttatatcttagagaaatgagtgctggttttgagcgttgttttttaactgaaagattatttctagatgggtatgtgctttgtgctggtttctgcttccatatatttcccaggcattttaattagagaagacactgtggtagaactttcctttcctttcttggccagagtctttaccctatttaaccctttgtgtatttctgactgctcactgttcatattataggagactagatttgtaatgtagaactgctccataacatcgaactgaagattaatccacgt

SEQ ID NO: 7673 - DNA, 847 bp, Macaca Fascicularis
  misc_feature (1)...(847): n = A,T,C or G
tcctccgcctattgagagcccaggtggagcggagaaaaggccggcgctggggtagccgcgtccaactttattgctctggagaacaggagggcaagccggcgaggggcggcagtacccaggcatccctctccccgaggctgccggcccggccgtgccgtcggggaggaccccgcaccgccgcgagcgcacacacacactcggtgacaaataaatacggtggccgccccgcccgtggggtcgaggatccgccctgccccgtcccgggaagcgcgccggcggcccctagcggacacgcgcgcggtatccgggacggccgggtcctccgcagcgcaggcccagggcagcggcggacgccggggtcgcgagaaattatggaccacccaggccggtggcctcagctcagcacgcagcgttcccgccggctcaactgccggctcagcttgcggcgccgctgttccaggccgcgttccagacgctcgtcctcctccagggcgatccgctccttgtggtccaggtcccggaccagctcgtcacgctggttcaccagctacaccatctcctccagcaggagctgctctcggtgctgctgtgcggacgttttctttccagtcttcgatggccagcatggcccgcagctctcggctcagcagctcaaaccttcgctccaagtcctgctcctcgatnnnnnnnnnnnnnnngtcctgcctccggataagagcgttcttcttgttgaccagggtgaaccactccnnnnnnnnnncctcctcctgcagcctgttggcacctgacnccatnnnnnncctcngctgcgtctccactnnnnngccgcccatctatctgctctgct

SEQ ID NO: 7674 - DNA, 762 bp, Macaca Fascicularis
  misc_feature (1)...(762): n = A,T,C or G
gcagctgnnnnnnnnnnnnnnnnnnnnnnnnnnnnnnnnnnnnnnnnnnnnnnnnnnnnnnnnnnnnnnnnnnnnnnnnnnnnnnnnnnnnnnnnnnnnnnnnnnnnnnnnnnnnnnnnnnnnnnnnnnnnnnnnnnnnnnnnnnnnnnnnnnnnnnnnnnnnnnnntggccaaagtttgcaccattattattattattattatcatcatttttcttttgagatggagttttgctcttattnnnnnnnnnnnnnnnnnnnnnnnnnnnnnnnnnnnnnnnnnnnnnnnnnnnnnnnnnnnnnnnnnnnnnnnnnnnnnnnnnnnnnnnnnnnnnnnnnnnnnnnnnnnnnnnnnnnnnnnnnnnnnnnnnnnnnnnnnnnnnnnnnnnnnnnnnnnnnnnnnnnnnnnnnnnnnnnnnnnnnnnnnnnnnnnnnnnnnnnnnnnnnnnnnnnnnnnnnnnnnnnnnnnnnnnnnnnnnnnnnnnnnnnnnnnnnnnnggccagtttgcaccattatgggagcacttacagagcctgccaactgatagtagggtggaaaagaagaggacaactagaagagagttcctacaccacaaagtaaacttcgctggctatgcgaggagcaggaaacctgcatgatgagaacaaggaactgggtggcactgcaggaaatgctcaattccagtttcacttcctgtgttaccactttttctttgctgcaatttcatctttgttggccaattctcttttaattttccatttt

SEQ ID NO: 7675 - DNA, 653 bp, Macaca Fascicularis
  misc_feature (1)...(653): n = A,T,C or G
cccacaccacacaccatgaggggatggcacagggggacgatgaggctggacggtgatgttatcaataggccagaacatccttcaaacactgaacctgcatctttcctcttcttactnnnnnnnnnnnnnnnnnnnnnnnnnnnnnnnnnnnnnnnnnnnnnnnnnnnnnnnnnnnnnnnnnnnnatgggcacagcgagatgcttgacttctttcttttgacctcttaaaaaactaaactaagccaaaccacaaaggaaatctgcacaacttaagagaaacttgaaagggatcgtgtaactactagtttgtactaagtttttttcaagaaagggaaacaaatttatatatatatatgtgcaatatatttttacactgtgtgattaacataagggagtactgnnnnnnnnnnnttatcagtgtgacaggtgatgtccatgtcatggctgttctgactctgaaaggcacttctgccaacgtctaaaccgcactcactgggaacgtctgtggggtggggtggctgtgctgtcccttctgcaggtgagaggcgtggtgtcgcctgttggacttgctgttgagcctggcttgcaaacctgtagtgaaacagctcatgtctgtgtgcacatgcccctgtgtgtctgctgtcattaacatt

SEQ ID NO: 7676 - DNA, 156 bp, Macaca Fascicularis
cccggcgacccggaggtggacaacgacaaggacgaggaggagggtcctttcgatcgcatgtcccagatctatcagacatccccagatggtgaccctgttgcagagtctgtctgggagctggactgcgagggggagatttctttaggcaaaataaca

SEQ ID NO: 7677 - DNA, 712 bp, Macaca Fascicularis
  misc_feature (1)...(712): n = A,T,C or G
catacatgtgggtattcttgggagttgtgactttggatgaccacctccctcatcgtcacaccttccctggtgataccaatctagtctgctggcttcgatgactttcttcactctgatgactcctaatctggcttctcagctctctttgaaggtttgcctgggtatcttgaagagaccttgaaattacacctctagttcaaaactcatcttccattctaaatttgctcttcctcctgagttccctatcctggcaaactttgtgaactcgtatccctgctagaaatctggattttttttttctaatggagcacatgcgtcttgatttttaaaaatttaagttttttgaggtattgtatgagactacgtctgttttattcatgaaaggacaggcgtcacggagccagtcaccttttttaggtttactgtctataactattgccaaaggccgggcgcggtggctcgcgcttgtaatcccagcactttgggaggtcgaggtgggcggatcacgaggtcaggccatccagaccatcctggctaacacggtgaaaccccttctctactaaaaatgcagaaaattagccgggagggtggtggtggacgcctgtagtcccaccttctcgggaggcaggggcaggggcaggagaacggcgtgannnnnnnnnnnnnnnnnnncggtgagcnnnnnnnnnnnnnnngcactccannnnntcgc

SEQ ID NO: 7678 - DNA, 741 bp, Macaca Fascicularis
  misc_feature (1)...(741): n = A,T,C or G
atgttcgagttttatagcaacagctgaaaaccatgaactattctaggaactgtgttggaactctttaaattaaataaaagaggaggaggaggaagaaagaaaaccaatttaagaagccttgactttggaggacagaaagccaccagccaatggagaacaaagagatgtttccctttcctttctttcaccttgtcgttctgggtttccttctgcttcactcttttccttcccccttaaaagtggtattcctggttggtctgtctgtccttgtgcttgtggtgatcctggcatggtgatgtgctctgctttgcattatccgtggtgtcttaccagcgcacaagtcagtggggaggatctaaacacgcctgggggtgaggaaactgaacttccaggcctgcgtcccatgtagcctctccatgaactgcagaaggcatgttctgcatggttaccagtaagtggctccctctcaccgtgttcattgtcaaatgagagcaaactttaggtgttggctccattgtacactctacttgctctgctcccctccctccaaccagggttnnnnnnnnnnnnnnnnnnnnngccctggcgaagctggtgctgtgagtgatgtttcccatacaactcagggatgccaggtggcttaccctgagatagtcattttaggcacataacagtgtaggaacgagaaatggatttcattgatatttaaatctgtcaatttcattttttgttaatgttttc

SEQ ID NO: 7679 - DNA, 1017 bp, Macaca Fascicularis
  misc_feature (1)...(1017): n = A,T,C or G
aggggccagagtttctatgaatcnatttnnnntcagaatgaanngttntggtnnnnnnaacccccgcagttgtcagcctcccnnnnnnnnnnnnnnnnnnnccccactcctcctttatttgctgtnnnnnnncacaggtggtgacctcacacacctctgccccttgggcctcccactcccgtggctctgggcggtccggaaggagcaggctctggggctccacctctgtgcagggcacagaatgctggggtggggggaggagtggattcctccccaccctgtcccaggcagcgcccctgtccactgtctccctcctgattctaaaatgtctcaagtgcaatgccccctcccctcctttaccgaggacagcctgcctctgccacagcaaggctgccggggtcaagcagggaaggccagcagccttccagtggcttcnnnnnnnnnnnnnnnnnnccaaatatatttaatggttaagggacttgtcccaagtatgacagccagagcgttagaggggccagcagcnnnnnnnnnnnnnnnnnnnnntactctaggactgggcccgagggtcctttacctgcaccgttgactcgtatagtttaaaaatctgccacctgcacagatatttttgaaagcaaaacaaggttttctttttttcccctttctcgtaataaaggataaaattccgagtctttctcactgcctttgtttataagagagttagctcgtcctcactggtctacactggttgccgaatttacttgtatttctaacttttgtatatgctgcattgagacttatggcaagaaggcattttttttttttaaaaggaaacaaactctcaaatcacgaagcgatataaaagctgtgtaatgcctccaaagctctgaattcaggtcccagttgctgtcacaaaggagtgagtgaaactctcaccccaccccttttttatataataaaagtgccctagcatgtganncggctgtcaccactacagtaagctggtttacggatgtttcc

SEQ ID NO: 7680 - DNA, 753 bp, Macaca Fascicularis
  misc_feature (1)...(753): n = A,T,C or G
gatnnctgaatgagcanctataaactgcaagtcttgccctttnnnnnnatcaaaactgttctgtttaattcatgaattgtnnnnnnnnnnattacctttctacattccagaagagcctttatttctctctctctgtctcctgagctgtaacaaagcctctttaaatcggtgtacccttttgaagcagtcctttctcatattgagatgtactgtgattttactgaggtttcatcacaagaagggagtgtttcnnnnnnnnnnnnnnnnnnnnnnnnnnnnnnnnnnaaacgcttggaacagtacacatgcaccacaacaaaggttgatcaaacaggtaaaatctcgaaggaagcctgaacgaaatctctcattgtgtgccatgtggctcaaaaccgaaaacaatgaagcttggttttaaaggataaacagttttcttttttgttttcctctcagactttatggataatgtgacctggtcttatgcaaattttctatttctaaaactactatgatatacaagtgctgttcagcataattaaacaaaatgctgctgctttgaagtaaagagaaggaagtattctgtttagctgtatctggtattaattgcatgttaaaacactggaattttaaaaattgaaattagatcagtcattcttttcttttctcaagatatcacatggctgacactgaagaagaaatgtaattcataacttgcactaaatgtatattttttttcttaaaaatttaccattc

SEQ ID NO: 7681 - DNA, 1345 bp, Macaca Fascicularis
gaacaggaggcttaccaccatcttggaagcagcccagcgacattttggaagtggcccgccaccatcttgggagactacaggaccagaggggatgaactccaaagtttaaggtgcagatggccaacgggaccatgaaactctgagactggacagtccagagaagaagagagtttctggacacgtacctctgctttggaaatgatttcgactcacattcttctatgagcaaagaagcaacctgataggagcagcaacatcggtagcagttgggtttgctccccctactccagacatgctgaatcagaaattttgaggttgaggtccaggaatgtgttttaacaagtcctccaggatgcactctcatgtttgaaacaccacatacctagatgacgagtttaacgatgagaaatatacttccaaagattaaaagacctcctcaatatatcaatatatcgaattgaggtggaactcaccgtggcctaagactggtccctgttaacaaatgcacctcaggaaactcaggacttgagaagcctgagccttggggttgcccagggctctgccacagttcagatggatacttactcagccatcaacttaactctgtcattggcaagtatcaaggtcacaagacttgtggagtgtatcctatcaaagagatggggtttcaccatgttggccaggtctcgatctcctgaattcgtgattcacccacctcagcctcctaaattgttgggattacagggactctacaaattgcaaagatactataattaagaaaccgcttccaggcaaagataaaatcgagggcactctcagaaaaacatgattgagatcagtgatctccaatctttttggcaccatggacgaggtcaagccaagactcttcatattccaccaatctatttcaaggatgacaagaccttcatgacgcttgaaaggacatttctatttcttatttttaaaaaaatattcaactgtttaaatattagtgaagataaatgttaaaaacactagtaggatacaaaagttgcaatcttaaaaggatcacatttaggctactgtagatatcttgaaatactctgcttttggtaggcagaaaatagagtatgatgtttccatgaagcttagccaagtggaggaaatttggcctaattgaacaagaacttatcacaatgtattttcaggacctctgtataggagcgtatggaatctaacaaatgtgttcaaattcactaaccttgtcagacttatttatataatactgaacaatgcaaaatacaatcttataaacagccatttaaaaaaaaaaaaaaaaaaaaaaaaaaaaaaaaaaaaaaaaaaa

SEQ ID NO: 7682 - DNA, 718 bp, Macaca Fascicularis
  misc_feature (1)...(718): n = A,T,C or G
tagaactcaggagtnntgagcactcatccttcctgtccttcctcagggtcttagagtacaagcccttagctgtcttcattcaggaggagttctagtccccagccccacctccacggatccaaaattccgttcccccattcctgtagggaatggagtgcgtggtccgtgcctccggactgcagctgcaagttccctagcaataggaatggcctgggccggggaggtagggaccctcgcatctgagctcggcacccaccctacccccaccgcgccagcgctagcgccagcaccagaagccacaatagcagcgctgcgatacccgtgatcatcatgcctgcagttctccacgcctggacctctatttgatttccaaaaggtcttgggtggagcaggggcggagacccgacgtgggaggagtgggcgtctctgggctgctcattccgtggattccccaaccagacgcctccaccctgcccccagccctagtggaactgtgccctggctccccctggctttttttgtgtgtgcctgcctcagcctgccctacttagcaactttcgtgcaccagcattttcatgtcaacacacctggccagcaggtgcagcctcctgagcccctagcacctttgagtccaatttactcggcctgcaggtgtgtattcctcaatctccgggccacctctgggcnnnnnnnnnnnnnnnccctggacctctgatcc

SEQ ID NO: 7683 - DNA, 678 bp, Macaca Fascicularis
  misc_feature (1)...(678): n = A,T,C or G
aannnnnngataaattgaagtttagccagccggcatcacggatcagcccaggtgtgttccctcataaaatgccacagacttgaagctcatcttggcatctgctccttggaggacttggactaaaaatcatttccatctgcacgtcaataactcttacttattccaactgaggtgcagcttcattccctccctgtgagtgtggcctggacttaatgactcacttctaactgatagagtaatgctgacataataatctgtgactctgggtgtagaacaccagattcactgcagcttctactttggttctctctttctctgggatcatgagccgtgggggaagctggctgctgtgtcaaaagcaggcctgtggaaaggtccatgtgactaggagtgaggcctccctggaccagacaacaagaagctgaagcctcttccaacagccatgtgagagattcttgtgtcttgtgaatccccaggcccatctgagccctcagacaatttagccctggatgacaactggactgcaactttgtgagaggccccgagtcagaagcatccagagaaacctctcctgcattcctgaccattggaagatgtgccagatggcaaatatttgttgatttgagctactaagtttgaggtgacttgtcgttgaactttttcatttgctctaaattc

SEQ ID NO: 7684 - DNA, 750 bp, Macaca Fascicularis
  misc_feature (1)...(750): n = A,T,C or G
atgtactgtgagagannnnnnnnnnnnnnnnnnnnnnnnnnnnnnnnnnnnnnnnnnnnnnnnnnnnnnnnnnnnnnnnnnnnnnnnnaaggcagcaaaacccacaccccgcnnnnnnnntttagcttttactcaaggacagagacctttgaagacgagggagcagaaannnnnnnnnnnnnnnnnccagacacggattttaccggacacnnnnnnnnnnnnnnnnnnnnnnnnnnnnnnnnnnnnnnnnnnnnnnnnnnnnnnnnnnnacgtccagcctcgctgacgctcttccttggtacctgccactccctgggttggtccattttcccagnnnnnnnnnnnnnnnnnnngggaggagatcgtcgtgcttnnnnnnnnnnnnncatgctaactggactatagnnnnnnnnnnnnnnnnnnnnnnnnnnnnnnnnnnnnnnnnnnnnnnnnnctccattgaaaacaaacaggcaaaaaataacaatgtcagcatggttcctgaaatccatttttgttttcattagaaaactattaataatattgtgtggtagagcaggtgnnnnnnnnnnnnnnnnnnnnnnagtgtttatgatgatcctctnnnnnnnnnnnnnnntagttgtgagatggattctnnnnnnnnnnnnnnnnaccaggatttgaagcaatgagagatatcatcagagaaaatgtaggagataaatgtcttatggtggctgcttgtactttatgtgtgtatattgtatg

SEQ ID NO: 7685 - DNA, 754 bp, Macaca Fascicularis
  misc_feature (1)...(754): n = A,T,C or G
ctggagcagacaccaatnnnnnncatattggaannnnnnnnnnnnngannnnnnnnnnnnaaatggcagatgagttnnnnntcnntgtcgataaaatnnngagcaacccacggctatttgaaccccttataaccaggtttatnnnnnnnnnnnnnnnaaccaatgcaatgatcaggaccaccacggcactcaccatnnnnnnnnnnnngnnnnnnnnnnnnnnnnnnnnnnnnnnggccaaggnnnnnnnnnnnnnnnnnnnnnnnnnnnnnnnnnnnnnnnnnnnggtcctagaactcacgaagaacattgnnnnnnnnnnnnnngtccagttccatnnnnnnnnnnnnnnnnnnnnnnnnnnnnnnnnnnnnnnnnnnnnnnnggccttgggctaccagctgctccgccagaccataaagtccgtcttcccggaagtcaatattactatcccaggtacttgtcttggcaacacagacagccgattctttacagacctcaccactggcatctacaggttcaatccctactatctacagcctgaagacttaaaacgcttccatggaatcaatnnnnnnnnnnnnnnnnnnnnnnnnnnnnnncaagtgaaattcatctttgagttgattcagaatgctgacacagaccaggagccagtttctcacctgcacaaactgtgaggtcaaggggcctgcnnnnnnnnnnnnnnncgaccccgggccaggactaacccaagggggaaagtcagtgttga

SEQ ID NO: 7686 - DNA, 746 bp, Macaca Fascicularis
  misc_feature (1)...(746): n = A,T,C or G
gagagacggccttcgcgntccanntgcgcgtgctggcgcacatgctgcgcgcaccgccatgggcgcgcctcccgctcacgttgcgctggctgcgccccgacctccgccaggacctctgcctgccgccgccgccgcacgtgcccctagccttcgggcctccaccgccccaggccccggccccaaggcgccgcgcaggtccctttgatgacactgagcctgagccagaccagggggatccaggggcttgctgctccctgtgcgcccagaccatccaggatgaagaggggcccttgtgttgccccaaccctggctgctggctaagggcccacgtgatctgcctggcagaggagttccttcgggaagaaccagggcagcttctgcccctagagggccaatgccctagctgtgagaagtcactgctttggggagacctgatctggctgtgccagatggacactgagaaagaagtagaagactcagaattagaagaggcacactggacagacctgctggagacctgatcctcagtgtccctacccacctcctacctcttttctgtgccacctgccgcgggtccggcgggtttttacttgagtacaataaagtctgagtcaagggtgccttatggtggatgcccagggtgggggtggagctagcagcccaaggtcctgccagtcacggggcttcctcaggggcacagaggaggcaggaggggcccctggcactagcatggaacagctctactc

SEQ ID NO: 7687 - DNA, 687 bp, Macaca Fascicularis
  misc_feature (1)...(687): n = A,T,C or G
acactttcaatgggggttgcattgtccttttagtgccttaatttgagataattattttactnnnnnnngtaagtatagaaatgtcaaaaaatgtattttcaaaaaattatgtgtgtcagtgagtttttcattgataattggtttaatttaaaatatttagaagtttgttggactttcataaattgagtacaatctttgcatcaaactacctgctacaataatgactttataaaactctgcaaaaaatnnnnnnnnnnnnnnnaatgtaaaaaggaaatatggcaatacatccatgatgttttccagttaacataggannnnnnnnnnnnnnnnnnntaaactcttgtccagtaacaagagttnnnnnnnnnggacagtatgatttattgtttatttttttaaccaaatacctcctcagtaatttataatggctttgcagtaatgtgtatcagataagaannnnnnnnnnnnnnnnnnnnnnnnnnnnnnnnnnnnnnnnnnnnnnnnnnnnnnnnnnnnnnnnnntggatatgtaataataaacatatctgttattnnnnnnnnnnnnnnnnnnnnnnnnnttaatgagaaataaaagtaatttatggatggatatctttaattttgactgcaatgtgttttctcatggctgaaatgaatggaaaacatacttcaaattagtctctg

SEQ ID NO: 7688 - DNA, 566 bp, Macaca Fascicularis
  misc_feature (1)...(566): n = A,T,C or G
actccatgttttcggggacactgacaaagtcatcccctctccggagagtatgcaattgaccagccgattccccggagccatcaccctcacccactctggtggccacttcattccagcagctgcatcccagcgtcaggcctacctcaagttcttggaccagtttgcagagtgaaagatcaagaaatgtctctgctcctacatccagcccctcttggggtagcctctctcatctgtgccctcccagggccctccactgctgtgagtgcgcctcaccaggaccagttaagagacaactatcaattcttgagacccaaattatatggaccctgccttgtattgaagaaagaggggagcatcaaggcctgtaatggagcattgaacttgtgaaactcaaacatgaaaatgattggaaggccgggcgcggtggctcacgcctgtaatcccagcactttgggaggccgaggcgggcggatcacaaggtcaggagatcgagaccacggtnnnnnnnnnnnnnnnnnnnnnnnnnnnnnnnnnnnnnnnnnnnnnnnnnnnnnnnnnnnnnnnnc

SEQ ID NO: 7689 - DNA, 792 bp, Macaca Fascicularis
  misc_feature (1)...(792): n = A,T,C or G
tgcatgtgctaccaacacatgatatgggaagaccnnnnnnnggagcggttcagtgggcgcaacaaagcaccacttttactgttgcctgcttctgaccaagaagaagaaggaccttagtatttagcataaaattccagcgttggatgaatgcaggtctagtttggtctgtggctagtttaaatatgtttctaaccacagagaatttcatatgtatacatatatatatatacatatatatgtataaaatttcacagggatatgctatttttttcttttttaaagactgaatgtgttcaccatttagcctgtagatttatttccattttccaaattccagcacacagagatcccagcccctatgagtagggtgtttgtggactacctaatggaatattttgaggcctggatgaactttgccatatgggtagaggttacagagggggatgatattttcagctaaaaaaaacgggtggagcttggactgatcaacttgagattttaaaactgctattccttttctttctagcatctctccccaccctctgagagctcctcaggcttagatagtgaagtgatcaatgccagtgtcattttgtacttaagttccaaagtaggaacattttatactttttctgtattgtaataggtagttttgtatgaaatcttttctcctctccccttgtaccgcattctttccagcattgtgctttttccctgggcttatttgaaaattttactgttttatacaannnttgtttagtacatttttctatgttttaccacaagttacaa

SEQ ID NO: 7690 - DNA, 698 bp, Macaca Fascicularis
  misc_feature (1)...(698): n = A,T,C or G
cttttggacagggaaatatgtgtaagaaagtatattaacaaatcaatgcttccgtcaagcaaacgatcatatgtataatttttttctaccttatctcatctcattgttttcagtgtgcttcaataatgcaggttaatattaaaaatggaaattaagcaattatttatgaatttgtgcaatgttagattttcttatcaatcaagttctcgaatttgattctaagttgcatattataacagtctcgaaaattattttnnnnnnnnnnnnnnnattacttttttcctttcaagataattttataaatcannnnnnnnnnnnnnnnnntaagtaaataacatatggtggactgttattaagagtatttnnnnnnnnnnnnnnnnnnnnnnnnnnnnnnnnnnnnnnnnnnnnnnnnnnnnnnnnactttaaggtagcttgaaatagcaatacaatttaaaaattaaaaactgaattttgtatctattttaagtaatatatgtaagacttgaaaataaatgttttattatttcttatataaagtgttaaattaattgataccagatttcactggaacagtttcaactgataatttatcacaaaagaacatacctgtaatattgaaattaaaacgtgaaatttgtcataaagaatttcttttatttttgaaatcgagtttgtaaatgtcctttaagaagggaga

SEQ ID NO: 7691 - DNA, 1924 bp, Macaca Fascicularis
ctttttccgcgcggctgccgctctttccacagcgccgcagtctgcacgagcaccgcgcccgcttcagctgtttgtcaccgccgctcaattccctcacccacacgccgagaagactagaaaggcgccctggggaaggctcgcgggaaagcccgcagccgctggacgcgggaggacatggagttgcctgggagagaatcaaaagaagcccaggaaaggaaacccagatgaggaaagaaaacggcaggaaatgactacatttgaaagaaaacttcaagatcaagataagaaaagcaaagaagtttcatccatttctaatcaggaaaacgagaatggcagtggttctgaagaagtgtgctacactgtcattaatcacatcccccatcggaggtcttccctgagctccaatgatgatggctatgagaacattgactccctcacaaggaaagtgagagaatttagagaaaggtcagagacagaatatgcccttcttaggacttctgttagtaggccttattcttgcacccatgagcatgattacgaagttgtgcttccacactaaaaccctcaagccgctttatcaccttgcagcaatgaagatgatgcagaacagcagactctggagaagttcttcaccctgagcagtgcatgaaacattcctttctggctaaagtttacaaatattatcttattatatatccttaggcaactctgaaatgtggcatctctgtggtttaggtggaatcatagaaattgaaacaatctaaaatattctatgtgtttttgcttgtaaagtttgaggacatggaggtgataaaaaaaactttcttaggacaataatgtaaaatgaaaataaattcctaatccccctgactaactgaatggacccccttctgggccaaggagacctcagatgatcttgaaagactgaattctggccatgataggaagggaggtgagacacatcttgttataccccttcccttttggagtttaggcacaagtgaccaggatgactcataagactgatgaaacagactgattgtggcaataagagtcccaattccaacctgactctggtgtggatcactcgctgtctgagtgattccatctatgagactttgtctatgtaacaaagaccttggtttccacaacccctttattttagctaaagcattcttttctactgacttcttaagtctttagacaaagcttaactctttcaaccaattgccaatcagaaaatatttgaatctacctatgacctgtaagctctctcctgcttcaagatcttgcctctttaagctgaaccaatgtgcactttccatatattgatttatgtctttgcttgtaactcctgtctccctaagatgtataaaactaaacggtgacctgaccacctcaggcacactttctcaggacctcctgagagtgtaccccaggccatggtaactcatattggctcagaatcaacctctttaaatattttacagaatttggcttttggttaccaataaatctccacaaataaatgtccaagaatcttcaattccaaccctgctcaccaaagtttaaatgccaacatctccccatccaattacctatttcatttttgaggtgtaatccactcaataaactgtataagaccagtgaccagaccctttgctaacctgatatttacttcaatttttctttttctatgtactggagatttttgcttataaacttacagtaatagttcaaaaattaatagtttttgacattggcttttctgagaagaaaattgaaagtgtcacaaaataaaaaaaaaagatgaaatgaatcataaaaaaaaaaaaaaaaaaaaaaaaaaaaaaaaaaaaaaaaaaaaaaaaaaaaaaaaaaaaaaaaaaaaaaaaaaaaaaaaaaaaaaaaaaaaaaaaaaaaa

SEQ ID NO: 7692 - DNA, 645 bp, Macaca Fascicularis
  misc_feature (1)...(645): n = A,T,C or G
caagtaaggctnncaggtccccacctgtggggagtggtnntgccnctggtatggagcccacnnnnnnnnnnnnnnnnnctgaggctctgatggaggatnnnnnnnnnnnnnnnnnnnnnnnnttggaannnnnnnnnnnnnnnnnnnnnnnnnnnnnnnnnnnnnnnnnnnnnnnnnnnnnngcactgctgcaggaacagtgggctggaggaaagttgtcaatacctgtaaagaagagaatggctgtactggtgcaagagctttcaagccatcggtgggacgcagcagatgacatccannnnnnnnnnnnnnnnnnnnnnnnnnnnnnnnnnnnnnnnnnnatggtaggagttaaaagattaattgcagaaaagaggagtctgttttcagannnnnnnnnnnnnnnngagaannnnnnnnnnnnnnnnnnnnnnnnnnnnnnnnnnnnnnnnnnnnnnnnnnnntaatcctcggttccgcagactcaccggannnnnnnnnnnnnnnnnnnnnggccttctctcacttggctcccttcttaccaccaacaagactgtcccactgggcctgacccacctataagggaagaggtcccacctggnnnnnnnnnnnnnnnnnnnnnnnnnnnnnnnnncattcaaaaaa

SEQ ID NO: 7693 - DNA, 138 bp, Macaca Fascicularis
ggaggaggggacgtgcaaagatagaatgtagggcggtgtttgctcgccatccttctttttgtagagaaaagagagatatgttttttctgtctttaaccaacttatcctttttttttttttgtttgtcattcattctgt

SEQ ID NO: 7694 - DNA, 1148 bp, Macaca Fascicularis
ctacaagatatcttcatggccatggagcagaactatatagattctgagtatgaaagcaagctggagttccagagcatgtggaatgatctcaaaaacatgaatttagaagagaagcactttctaaggctgcacctagagaacatagtagaagatctgtggagaaagttccaggatgtactcaagaattacactgatgccacagaggatcgaaaggctgcctttgagaccctacaggtgaaggatgagaagagctccaaagagattgaagtacagatgaaaaaaatacagaaactacaggatgccataactatttcaaaaggcaagatcatgatacacagccgtgagagtgaagatgagaaccggtatatccgtaacgacaaggaattggtccttgtacaactgcgaaaacttaaggcccaaaggactcaggcccgggcagcatcccagaagaacttagtcaaactcaccttggaaagtaatgccaccctcaaggccctgagaaagattgttgataagggtgaaaagatccttaaacttgctgaaatatgtaggaaatttgaaactgaggaagaaaaggtgctgcctttttattcatcagtattgactcctaaggagcaggaggggattgaggagaataatctagaagagcttactgaggagcttgccaaggtgatggtggactacacaggaatggagaatttctggaaaaggtacaacaaagtgaaactggagcaactgagcctccaacacagacgagcccagctgctagatatcaatggaaagctgcgggagatgctgaagcagtacttggatggcatctcagtgagtgacgaagtgctgagccagctcaacccactctttatagtcaactatcaaagcaatttaccccagcccttgtccatacctatagcccatccaggtgataaacaacatccaaccgcttaaaatataattgaagcagcccacgtgatcttccacaacctgtgatctaaggaaaaaaatctttcaactcctagagattttttttttttttttgagagatgtacggatgttgctattaaaaatttccaaggagtttaaaaaaaaaaaaaaaaaaaaaaaaaaaaaaaaaaaaaaaaaaaaaaaaaaaaaaaaaaaaaaaaaaaaaa

SEQ ID NO: 7695 - DNA, 687 bp, Macaca Fascicularis
aatgctttcatagagcttcattgtaaatattcttgtttgaaatgtattggaatagtatgaaaattagcaggaggtttggatccctgccttattttcatatgctatggatacatctctgggagcttgcagcacccttctcaaaactcaactgtcatatggagctcatttgctactcaaaccatagacagattatttaacagaagtgatataatgaccttcagtatttttctattgaacaagtttaacaacttttgccattaaacaaatacttagttatgcaaaatatttagcttttataatcattttggttatgactaaaaggggggaaattgagctgcatcactgatgatgaactttgtgagaaattttttttttaatctgactttcattccttcaatattcttgctataaatttcttttggagataatgaagatttatttgaaaatgtctaaaatgtatgtatattttataagtatatattatatatattgtaaaaatatatataatatataaactatatatatatatatataaaaaaaccataggtgcattttactgttttgtattttcatttttggaggtagtatacacagcagataatgatgagtatgatgagtgttgtgctgtttgcttttgcagtataatatatagttctaaatgtttaaattactgtatatacaatattc

SEQ ID NO: 7696 - DNA, 758 bp, Macaca Fascicularis
  misc_feature (1)...(758): n = A,T,C or G
agtactagcaggtcagtgtaggcttgcgataggattttaaaatacactactagttnnntnagctaccttcacatacattctgtaggccttcttaaattagcactaacctccacttcctnntctgccccattgcctcccaaatatgctatggagctatttttgttaccacattataacatgaatatttatacagtagcctcttcaggcttcgtaattttcattccaaaaatgcccggtgtgatgctttacactctacaaagtatggtttaaaggcacaaggtcatggcctttgtcatagcagttgaatgtgcattgaaatatttttctatgattttttaaaaattacaatagaaaaataagctgttgtaacgtgtaaggtcatgacaatttttgtatttatatttgaaatcagatttctataacttgtatttgtgtacagaattctcagtgggtttatatattgtgaaatttttatccgagattgggatgtggattatgcttaacagtgaaagctgaaatgagaccatttactttgtttaaaatgctgtactgtgcaagtttggaaatgtaaaagaatttactgtatataattatcttgagtttgtttatacctccaggtttttacactgaagataaactaactttaattaaattcaaaacctttttctttataagggaataagctgctgagctaaacctgtatccatgtgctttgtattttctggatgcacaatgaaagtttttacttgtatctcact

SEQ ID NO: 7697 - DNA, 738 bp, Macaca Fascicularis
  misc_feature (1)...(738): n = A,T,C or G
cacgtgacgcacgtnttcccggtgggctacttggtggtgannnngaggcttggcggccgggtcatctattccgaaagcctggagcgctacacccaccaggatctggccaacgtgaccttgacctacgagtttcctgctggaccccgcgacttctggcagcccctgatctgccacacgcgcctcaatctcgaaggcctggtggtccgcaacagctcggcacccgttacactgatgcttgcttggagccccgcgcccacagctttggcctccgtttccatcgctgcccttgtgggaatcctcctcgctgtgggctctgtgtacctgtgcaagtgcctacctatgaaatcccaggcgtaaagggggatgttctatgccggctgagcaagacaaaagaggaatatggaaccatttggggaatcggccagacatgnnnnnnnnnnnnnnnnnnnnnnnnnnnnnnnnnnnnnnnnnnnnnnnnnnnnnnnnnnnnnnnnnnnnnnnnnnnnnnnnnnnnnnnnnnnnnnnnnnnnnnnnnnnnnnnnnnnnnnnnnnnnnnnnnnnnnnnnnnnnnnnnnnnnnnnnnnnnnnnnnnnnnnnnnnnnnnnnnnnnnnnnnnnnnnnnnnnnnnnnnnnnnnnnnnnnnnnnnnnnnnnnnnnnnnnnnnnnnnnnnnnnnnnnnnnnnnnnnnnnnnncctatctccaaaaataaaataaaaataaaaataaatatggcgggg

SEQ ID NO: 7698 - DNA, 786 bp, Macaca Fascicularis
  misc_feature (1)...(786): n = A,T,C or G
ccagcacaacaggctgagcgacggngtnntcaagcccgacactttccagggcctcaagaacctcatgcagctcaannnggcccacaatatcctgagaaagatgccgcccagggtccctaccgccattcaccagctctacctggacagcaacaagattgagaccatccctaacggatatttcaagagctttcccaatcttgccttcattcggcttaactacaacaagctgacagacaggggactccccaagaactcctttaacnnnnnnnnnnnnnnngtgctccacctgtcacacaacaggatcagcagtgtgcccgccannnnnnnnnnnnnnnnnnnnnnnnnnnnnnnnnnnnnnnnnnnnnngaaaatcaacggaacccagatttgccccaacaacctagtggcgttccatgacttctcctcggacctggagaacgttccacacctgcgctacctgcggttggatgggaactacctgaagccgcccatcccgctggacctcatgatgtgcttccgcctcctgcagtccgtggtcatctaggccctactctgccaccggatctgctctgaccgcacttgaaggctggggcccaggcgcctgtgcccgccattcattttctctctctccctttcttgctcccagctttgcctcccttatcccaccctcaaggcagggaaaaaccatctattcttctgcagcctcagaagcgagacttccaagggctcggtttggtcccacccagtgaaagacacccagtgcacacccaaactcctggccttctg

SEQ ID NO: 7699 - DNA, 1209 bp, Macaca Fascicularis
  misc_feature (1)...(1209): n = A,T,C or G
ctgagcagttcaagacccnnnnnngagnnnnnnannnnntcaccacagtgacagaaatgcnngnataancgaagtgccactgggttctttgccctcccnnnnnnnnnnnnnnnnnnnnnnnnnnnnnnnnnnnnnnnnnnnnnnnnnnnnnnnnnnnnnnnnnnnnnnnnnnnnnnnnnnnnnnnnnnngcacagctacctgccttcactgaaatatacctcaggctgaaatttggggtgggatagcaggtcagttgatcttctgcaggaaggtgnnnnnnnnnnnnnnnngctcaaccacgccgccnnnnnnnnnnnnnnnnnnngccgactaggactgatgatgcattttagctttgagcttttgggggttattctaccaacaaacaaacagtccaatggaaagaaaacagtcccaggaattaacagntcagaatgttcacactggttaatctttttctaacagtgagcatgaaggtagcagaagctggtgtgtttccagatggttcttctaaccaaactaattttcactgttgacaagtgaggcaagggttgcactggaccgaaggctgaggcttggccatctagcattccatgcagaatggtttcccataagcattccttttattctctgttctatcctgggtctgcctcaaccatgagataggagagtttccggtactagctgctatccagggcagttaatggagtcttgaaccctttctttctctgggatccctgactagcaccttcctatagagatgactttaaaaggaaaaaaaaaaaaggaaaaacaacacaccatttcaaggagtctggcattcctgaatcctccttccctgctaggtgcctgtcacctgtcttcactgcctgcttttccctgtcatgctcatcatgatatggcttctgtccaagcacctgaacagaggactaaaacctccactgcaggctggttttaggtcttgatttatgtaagaatcttgcacagcactgctaatgtaaatttcagtttttcccctctaggacaaacacttaccaaaatatgcaacttttttttggtgggaagagagattgtcctgtgatttctacccatttcctgaggcctgtggaaataaacctttatgtacttaaagttatacagaaaatagaataaagttaataccaaacttaaaaaaaaaaaaaaaaaaaaaaaaaaaaaaaaaaaaaagg

SEQ ID NO: 7700 - DNA, 865 bp, Macaca Fascicularis
  misc_feature (1)...(865): n = A,T,C or G
atttnnnnagttgcannnttttnnntggttacctgtgagagtgaacatgttgccttatgtttgctgacctcctaaatggtctatttgctcctacttttgtaccccaaagtctgctctcaagacggtagccagaatgatccttttgagacatttcactcttctgcttaaagctctgcnnnnnnnnnnnnggtaaaagccaannnnnnnnnnnnggtctccaggatcctcgccacttggtcccttgnnnnnnnnnnnnnnnnnnnnnnnnnnttctgcccctccactgcaccatggcaatttcccctgctctgtgtggtcaactnnnnnnnnnnnnnnnaagctttgctcaaatgtctccttcctaatgagacctccccagcccctgagctccccatgtctcactcctgatcgccttacttaactcttctttttttttttttttaaccaatagtacttataccactgtctaaaatacttcataatttacttgtttattgtttgtctctctccagtagaatgtaagctccttggggcagagacctttgtcttgttcactgctatgtcccatgtgtaaacttgtctggcacagaagaggtgctcgataaatatttgttgagtgaatgaatgataaattttctgttcatattctttgactattttctattgtaatgttcatctttttagtattggtttataagatgtgtatttagcaccttttcatatatcgctctttgtcacatattatgcaattaatttatcatttccatcaatttttaaaatactttcttgatgcttcatttttaagctgtcagattattaatcttttctttattgtcttggactttattgttgcataactactgcc

SEQ ID NO: 7701 - DNA, 493 bp, Macaca Fascicularis
  misc_feature (1)...(493): n = A,T,C or G
cagccctcctcatctctgcaaagttcagcatcctaacggccttcccaagggtctctgtgcacttctgtcnnngatgctctgtggagctcatgagtgcaggagtccccaccagagggaggctcaggggactgtttgggccagggatgaatatttgagggataaaaattgtgtaagagccaaagaattggtagtgggggagaacagagaggagctgggctatgggaaacgatttgaagaacggagctgggaatatggctggatatctggtactaaaaatgggtctttaagaacctacttcccaacctcttccccaacccaaaccatagctgtctgtccagggctctcttcctgcctccagctgtgccccaggttcctcctagactctgtccctgggctggggccggagaggagggagagtagggttgggggagaggctgaggagggtgtgacacgcggggagaggaccagctgggtgcttgggcattgacagaat

SEQ ID NO: 7702 - DNA, 712 bp, Macaca Fascicularis
  misc_feature (1)...(712): n = A,T,C or G
tacttttcaattataatntnnngaaatgtaaatgcagatcagttatttggaaaacagcttagtgtattagggtcctctagagggacagaactaataagatgtataaatataaaaatatagaagcttattaggagnnnnnnnnnnnnnnnnnnnnnnnnnnagtcccacaataggccatctgcaagctgaggagcgaggaagccagtcagagtcccgatatctcaaaagtagggaagctggcagtacacccttcagtctgtggccgaaggcctgagagcccctggcaaatcactagtgtaagtccaggagtccaaaagcagaagaacttggagtccattgtttgagggcaggaagtacccagcacaggagaaagatgaaggccagatgactcagcaagtnngctcttccatctcctgnnctgctttattctagccacgnnnnncagctgattagatggtgcccatttagattgagggtgggtctgtctctcccagttcactgactcaaatgttaatctcctttggcaacaccctcacggacacacccaggaacnnnnnnnnnnnnnnntcaatcaagttgacactcagtattaactatcacagcttagtgtctgaatttaaaataggctgcaagtacaaaatatgtgttggatttcaaagaattagtagtgaaaaaactgtgaatttcttgttatttttttgtattagtatat

SEQ ID NO: 7703 - DNA, 724 bp, Macaca Fascicularis
  misc_feature (1)...(724): n = A,T,C or G
agctcaccagttccaagctgctggnnnnngaccctcgctgggaagcttgatcgccgcctgtttcgccagtctctatgcctttgcactgcccagcaacccggccactgcccaggacctgttaaaaatggaatggacctcccagaatcacgctcctgccaccgccgtttctagagacggcttttgannnnnnnnnnnnnnnnnnnncaaacttggaannnnnnnnnnnnnncacagctgggacactgatttggatagtttaggcccagagacagcttctgggttagtgttccagagaacactgatgaaaaattgtgacattttccttccccaaaactactacgttttatacatttcacatctctcctgaaatcacagcagtgtcagtttgcgccttttggtctgaggaacccaggccctagccactaccaggaaaaagtacttttaaaacttgaatctgtatctttaccatatgcccaatacagtagtccttggaagaaacagattaagagaaatatgtatgtcttcaagaacacttacgttctgagaaagaattctgaatacagattctaatgtaaaatgctttagagtgtaaagaatgcatgtatgattcttacggcattttaaactttccaccccacggttttaaagtattaatatatgttaatatatgcgatttagaaaggagacagnnagcccannnngagcagttttgnnttcgctgcca

SEQ ID NO: 7704 - DNA, 749 bp, Macaca Fascicularis
  misc_feature (1)...(749): n = A,T,C or G
agcannnnnnnnnnnnnnngctccagggaggnnnnnnnnnnatagaaattagaagccgtctgatttctagatgaagttttacaattgtttcttacagtcgcgtgcactaagtactctgtaagcagaggtgactggctgtgcannnnnnnnnnnnnnnnnnnnnnnnnnnnnnnnngaagtcatatgaactctgctcagcaataatctgttctcagaacagacctctcaacccactgcnnnnnnnnnnnnnnnnnnnnnnnnnnnnnnnnnnnnnnnnnnnnnnnnnncaggtcgtccagctttttatttcagtcataatagatgatggtgttaaccgtgaaaacttgagaggcactctgccctcctccctgtaaaatcaacacagtgtgattttacaaggtcccgtggcaccttgctcaggannnnnnnnnnnnnnnnnnnnnnnnnnnnnnnnnnnnnnnnnnnnctgattctgaaaggaatgtagaacttgacagcagcctnnnnnnnnnnnnnnnnnnnnnnnnnnnnnnnnnnnnnnnnnacttctttacacgcagctgtttcccaggagtcgccacagatgtgcccactatcctaggttcctgtgagtcagcggaagctcctgttacaccctttgctcctggtgggagagggaggagtgagctccctgggttccagtatttacttggtatacctgagtttgggggtacccttttttgttactgttttcaaaannngtgaattac

SEQ ID NO: 7705 - DNA, 750 bp, Macaca Fascicularis
  misc_feature (1)...(750): n = A,T,C or G
cattgcagcagaagtcaaagttacagactctagtttacttccagctttaacattaccaaaatatggtattgtcaaaaaacatgtagtatctgtataatttgagaatgtaattgaagaacccgatatagagcttttagaaaggggaaacagaaaacttaaaaagaatcttgcttggtttattaataccaacatctaaaatataacaaaattgaataaaccaatgagttttatactatgattgaaataaannnnnnnnnnnnnnttaagagtgctagtttaacaggaaatctccaaagcattattatccagactcatctcaaaggttcacttttcatttgcatgagcccttgctatttggagggtaggagggtgcacctcgttctggtgnnnnnnnnnnnnnnnnnnnnncactnnnnnnnnnnnnnnnnnnnnnnnnnnnnnnnnnnnnnnnnnnnnnnnnnnnnnncagtaaattgttttagtttgtggacctcagctgcagttgcaatcatcatcaaattccaattttgaatttaaaggtgaataatgaatgcaatgaactttctagaatttatgaagggcagtgatgttccttttatctaatacttctacatgtgtagcctttcagcnnnnnnnnnnnnnnnnngaatttacaaattgtcatttgtttaatgaactgtaaatataacatgatgactaattgagaacacatacaatttgctggtattccagaagtctatggattttgtg

SEQ ID NO: 7706 - DNA, 178 bp, Macaca Fascicularis
tttgcacaagatgacattggtagacaacgtgatccatcaggatgtggagatttggataaatggcaaataatttggggttaaattatggcccagcgtagtaagcaaatgaaaaactaaacaatcgtaaatgtatttgggaagcaaaggtgttcataatatgtcccatggccagatgcga

SEQ ID NO: 7707 - DNA, 721 bp, Macaca Fascicularis
  misc_feature (1)...(721): n = A,T,C or G
agcagctgtagagtgggtgttatgttnnnnnnnnnnnnnnnnnnnnnnnnnntggagggagggcaggtccagccctgtgggccctaccctcccgctgagctgcccctgnnnnnnnnnnnnnnnnnnnnnnctgcctccagcctggtggcccagctattaccacacttggggtttaaatacccaggtttgcctctccaagtcacaaagagatgtccttgtaatattcccttttaggtgagggttggtaaggggttggtatctcaggtttgaatcttcaccatctttnnnnnnnnnnnnnnnnncttggccaggagaagttgaggggagcatgcctnnnnnnnnnnnnncgggtcacacaaaggcatgctggagtgcccaggctatcaggtgcccttcnnnnnnnnnnnnnnnnnnnnnnnnnnnnnnnnnnnnnnnnnnnnnnnnnnnnnnnnnnnnnnnnnnnnnnnnnnnnnnnnnnnnnnaacccctctccatacccacaatctgagcacactaccaaatctcaaaatatcctaagactaacaaaggcagctgtgtctgagcccaacccttctaaacggtgaccttnnnnnnnnnnnnnnnnnnnnnnnnnnnnnnnnnnnnnntcccaagtctccagagagaaatcaggcctgatgagggggagtttctggaacctggaccacagccttggtgggggagcctctggaatgcatggggc

SEQ ID NO: 7708 - DNA, 754 bp, Macaca Fascicularis
taaaagcagagtgcctgtacgcaagacgatggccctatctcagtgcgaagtccccttaccgctccagacctaggcaggccagaatactcttctacaatgtaacatttatccaccatgtgtcactatttaccaatctgacaagccactgagctgtctccgtgctttccgtggttggaaaccaggctacagaccacattaggagatgaatgaaaatagatttaaaaaagggcatgtggctggaatgcagcttgcattgtggagggacgggggtgggagggggctggggcctgagtctagcacgatacagctggaagccagggctactcctacaaacccaagttctgactccttccagggaagtatcagcttgggaaacttgatcaggaaagtgtcactggtctttcaaagagccctctttaccctcccacccccgccctccacactgcaagctgcattccagccacatgcccttttctaaatctattttcattcatctcctaatctggtctctagcctggattccaaccacggaaagcacggagacagctcagtggcttgtcagattggtaaatagtgacacctggtggataaatgttacattctagaagactattctggccagcctaggtctgaaacactaaggggacttcgcctgagatagggccatcctcttgcctacaggcactctgcttttattattataaataatcactttgttactataataaaatttaacaggtaaaaaaaaaaaaaa

SEQ ID NO: 7709 - DNA, 815 bp, Macaca Fascicularis
  misc_feature (1)...(815): n = A,T,C or G
acaggggcaagtacacannnnnnnnnnnnncggaagtcaaggggaagaagtgtggggcccagtggctctacccggaggtacgccgctgcacccagctgagcgactctgagcagcaggagttcgagcaaggacttgnnnaggctgcaatgagacgctactgcannnnnnnnnnnnnnnnnnnnnncaggagcctcgtggagcggaaggatccagccgagcttcgggtgcattgcacagtctgttgcaccatacggggtgtgccctacgacttcnnnnnnnnnnnnnnnnnnnnnnnnnnnnnnnnnatgttgtcttcgaaccgctgtggcaatgaggactgcagggacccgatcctgcacatcctcgccacctgtgccaccaaggacctcccagacagctcgatccaaggttgcccttccatccgggcctgccccgagtgcgggnnnnnnnnnnnnnnnaaggagcgctgcaagtacgtgacgtgnnnnnnnnnnnnnnnnnnnttctgcttcgcctgcctggagacggctcaagcctgcgaggctgccaagccagccagctggtttaagcggtgcgccaagcccctggccccacgnnnnnnnnnnnnnnnnntgtggagcccgtaccaacagagattgctgttgcaaggccagcctcttgagttggaagcctttcgaccgagagctgtttttgcccagcagccggcggcgaacgaggagagatgtttgattttatgaatagcataaagcaggctctactcggtgctcccacctctgcctttcctgcctcagcctgaaacgtccttcccctgcctt

SEQ ID NO: 7710 - DNA, 700 bp, Macaca Fascicularis
  misc_feature (1)...(700): n = A,T,C or G
gtgttcnnnnncccttgggccttcagcttccctgtcagtgccccccaacctggctccattcctggttgtcactctaattcatgctgaagagtgaatggctgacacttgagnnnnnnnnnnnnnnnnnnnnnnnnnnnnnnnnnnnnnnnnnnnnnnnnnnnntcttcaggcggagggctctctaaggcgggtgagccaggtcccctttttnnnnnnnnnnnnnnaatcccatcattcaacttgggttcctcgnnnnnnnnnngcttctcagaccgcaggaggccaggaggggaaggagctcccttgagaggaagcctcaatttctcgacaccctactcctctttctcctctcctcagccttagagctggagggcagggggcaccccaatgccctggactgccccacagcttccccagccgcttgctttctcctcccgatggctggctccttcccacttcagcctcctctgtaccctccactgagtcccaggagcttcaaaagtcagaccaagactgtccttggtcccacaggggcagaggtgagatctgtgcgcgccccctctccannnnnnnnnnnnnnnngagcgtgagatttttgcgccccctccccaagatccccctttccggattnnnnnnnnnncccagtgacgtgaaatggtgtgtgtatttatatccgacatcaacaatctcctgcacgaga

SEQ ID NO: 7711 - DNA, 1024 bp, Macaca Fascicularis
cttttttactacgatgaagttacacccccagattaccagcctcctggttttaaggatggtgattgtgaaggagttatatttgaaggggagcctatgtatttaaatgtgggagaagtctcaacaccttttcacatcttcaaagtaaaagtgaccactgagagagaacgaatggaaaatattgattcaactatactatcaccaaaacaaataaaaacaccatttcaaaaaatcctgagggacaaagatgtagaagatgaacaggagcattatacaagtgatgatttggacatggaaactaaaatggaagaacaggaaaaaaaccctgcatcttctgaacttggagaaccaagtttagtttgtgaggaagatgaaattatgaggtctaaagaaagtccagatctttccatttctcattctcaggttgagcagttagtcaacaaaacatctgaacttgatatgtctgaaagcaaaacaagaagtggaaaagtctttcagaataaaatggcaaatggaaatcaaccagtaaaatcttccaaagaaaatcggaagagaagtcaacatgaatctgggagaagagtcctccatcactttgattcttctagtcaagagtcagtgccaaaaaggagaaagtttagtgaaccaaaggaacatatataaaaattatttttcttctgcaggtttgtggagttcttctcaacatttaaactgaaggaccctgtattatatttcactaactctgaagatgtgtatgtagtttaaagcagtttgtacactaaaattaagttcttggctggccgtcatattgtggtccttaatcttgagataaatccaacagaactttcgaataaaagcaaaagtacaaatgtcataattgattctgtaataagtaaaatttgaaaattgattttgttcattatctacttgatatttccattaaatacatactgttaaaaaaaaaaaaaaaaaaaagaaaaaaaaaaaaaaaaaaaaaaaaaaaaaaaaaaaaaaaaaaaaaaaaaaaaaa

SEQ ID NO: 7712 - DNA, 966 bp, Macaca Fascicularis
  misc_feature (1)...(966): n = A,T,C or G
atgcacatccacgtgttcgcannnnattttnnnnnnnnnnnnnnnnnnnnnnnnnnnnngcctctacccaagggaacagaggataaatatcagacaacaacgagccccagtttgtttgccatgctgggcaccctcttcttgtggatgttctggccaacttncaactctgctctgctgctaaatccaatcgaaaggaagaatgccgtgttcagcacctactatgctctagcagtcagcgcggttacagccatctcagtgtcatccttggctcacccccgagggaagatcaacatgacttatatgcacaatgcagcgttggcaggaggcgtggctgtgagtgcctcatgtcacgtgatccattctccttggattgccatggtgctgggtcttgtggctgggctgatctccttcgggggtggggattcacgagagccacagcgtgcaccttcggcttgccggctctgcttggagagatcacctannnnnnnnnnnnnnnnnnnnnnnnnnnnnnnnnnnnnnnnnnnnnnnnnnnnnnnnnnnnnnnnnnnnnnnnnnnnnnnntcagcttggccatggcgatgagtatcacatctggtctcctgacaggtttgcttctaaatctcaaaatatggaaaggacctcatgtggctaaatattttgatgaccaagccttctgggagtttcgtcatttggctgttggattttaagaaaaagcatccaagaaaaannnnnnnnnnnnnnnnnnnagacaacttccttnnnnnnnnnnnnnnnnnngtacgtgagaaacgctcatgaccgcaaagtctccttatgtacaataaaacaaggtcagagacagatttgatattaaaaaataaaagactaaaaacttagtttaagagtcaatttaataagtttaaaataaatgtttagtttcattaggatgatgctatcaatattttcttggttacagacacattataa

SEQ ID NO: 7713 - DNA, 3307 bp, Macaca Fascicularis
acaaggggcctgtggtcaacacggtttgcctccaaaggacggcccgccagtcggcacaggaaaggggcaaaggcagtgagctcagcgtgtgggcgagggtcaacggttctgggatcaagcggctgccgcccctccagaagcgaccgaagcgccagcagattccccctccgagtcagtgtagtaaacacacttcagaaacgtgaggtgccggtggtcacgtggggagcgcgccctccaatgaggagccgggggcggggccgaggccgctgacgcggcggcggcggcagagtcacccgggcagcctcgggaccgggcaccggccggcaaccgtccagcggcctcgaccaccgcctcttgcctccgtccccggtcctttctcctgggcctagagacagcgtcgccgacaggggctcattccccttcggttctcctcggtgactcacctcgggcgggccgttttgtctttaggagccgccttggtggggcgaggtttccgtgacgaacctcctggggccgtccgtgccagctcgggccgtcgtggcggctcgagctcgtggaatttgctcaggctccggaggtccgaggccctcgaagttatgcgtcgcctccaggaggttgcggcgggcgcgggctcctaaagggcgtcaaacccggactccgccgactgggcaacctccattcatcttctcactgcgcttccagcgcccccgccttctccagtcccctccttggagtcattttttcctgtcccccctctaccgccctttccttactcctcgggtgaggcagttctcttggaagcgaaggtgtcggctatgagccggagcctccttccttgaatttctccgtggaggacccgccgcgcgcccccagcatgggggtgaacgcagtgcactggttccgaaaggggctccggctccacgacaaccccgccctgaaggaatgcattcagggcgccgacaccatccgctgcgtctacatcctggacccctggttcgccggctcctccaacgtgggcatcaacaggtggcgatttttgcttcagtgtcttgaggatcttgatgccaatctacgaaaattaaactcccgtctgtttgtgattcgtggacaaccagcagatgtgtttcccaggcttttcaaggaatggaacattactaaactttcaattgagtatgattctgagccctttggaaaggaacgagatgcagctattaagaaactggcaactgaagctggagtagaagtcattgtaagaatttcacatacattgtatgacctagacaagatcatagaactcaatggtggacaaccgcctctgacttacaaaagattccagactctcataagcaaaatggaaccactggagataccagtagaaacaattacttcagaagtgatagaaaagtgcacaactcctctgtctgatgaccatgatgagaaatatggagtcccttcactggaagagctaggtttcgatacagatggcttatcctctgcagtgtggccaggcggagaaactgaagcacttactcgtttggaaaggcatttggaaagaaaagcttgggtggcaaattttgaaagacctcgaatgaatgcaaattctctgcttgcaagccctactggacttagtccttatctccgatttggttgtttgtcatgtcgactgttttacttcaaactaacagatctctacaaaaaggtaaagaggaacagttcccctcccctttccctttatgggcaactattatggcgtgaatttttctatacagcagcaacaaataatccacgctttgataaaatggaaggaaaccctatctgtgttcagattccttgggataaaaatcctgaggctttagccaaatgggcagaaggccggacaggctttccatggattgatgccatcatgacgcagcttcgtcaggagggttggattcatcatctagccaggcatgcagttgcttgcttcctgacacgaggggacctgtggattagttgggaagaaggaatgaaggtatttgaagaattactgcttgatgcagattggagcataaatgctggaagctggatgtggctgtcttgtagttccttttttcagcagttttttcactgctattgccctgttggttttggtaggagaacggatcccaatggagactatatcaggcgttatttgcctgtcctaagaggcttccctgcaaaatatatctatgatccctggaatgcaccagaaggtatccaaaaggtagccaaatgtttgataggaattaattatcctaaaccaatggtgaaccatgctgaggcaagccgtttgaatattgaaaggatgaaacagatctatcagcagctttcacgatatagaggactaggtcttctagcatcagtaccttctaatcctaatgggaatggaggcttcatgggatattctacagaaaatatcccaggttgtagcagcagtggaagttgctctcaagggagtggtattttacactatactcatggcgacagtcagcaaactcacctgttgaagcaaggaagaagctccatgggtactggtctcagtggtgggaaacgtcctagtcaggaagaggacacacagagtattggtcctaaagtccagagacagagcactaattagaaaacgttcaggaggaatactgttgcagctgaaattggtggggagttcaatacttttcaattaagttatttaaaaatactcttcattgatggaaagcagttacatattgaaatatgttgtttctaatgacatttctgtggtttttaactttttaatgaatttcacagaggacaaatggtaatttgtatataaagaacttggcaagagaatttgcttaatgtaaatataaatagtcacaattagtatagacccatcaatatatttttgataatttttcatgtatggtaaaagttaaaatgacaaattgatattctgatataaaactcaaagttttgagagtcagtgggaaaaaaggaggtttttagactttcttaaaagactttgttaaaattttaggacagaattttcttgacgttgtttgatctaactttgcactctttgataataatgttttagataatgtgcataatctaaattggtattgtagcctctgttaacacagacagtatatgttttaaactttgatgtaaacctttttagacccaaacttgtggaagtatcatgtgttaagttctctttgtctctgtttctttgttcatttattactaaaatgacctggttattaaagtatatgcaaatatgaaaaaaaaaaaaaaaaaaaaaaaaaaaaaa

SEQ ID NO: 7714 - DNA, 740 bp, Macaca Fascicularis
  misc_feature (1)...(740): n = A,T,C or G
tcagcagcagcagtctcagtgagcctgaatcnnnnnnnnnnnnnnnnnnngaaaaatgtccatggtatcggatcnnnnnnnnnnnnnnnnnnnnnnnnnnnnnnnnnnnnnnnnnnnnttcaaagatgcaccaaaattaagtattcattattttcagagtttgtatcaaatttacagttgtagccaaacaggaaatattacatgctgcnnngntcaccacaagcatatttaaaaacttgtattaaatatctggttgctgtagtgcaatatgaggtgctgttcaannnnnnnnnnnngctgtggtcctgccttctggcagcttacagcagcctaacacagacaaccctcacccacatgtaaggtgtaagaatttaaggtttgacagagcaggagcatcgccatattggacaagcaccgccattttaagttccctttgattaaaaaccgcctaaatccagcccaaaatcatcagcttaatggctaacgtcagcatgaccataaaccacaaatgacaccttagaccagaaacattccaaccctgagataaagccccctctgaccagaaacatcccagccccgagataacctctcctctgaacagacattccaaccctgcaataaaattctcctccacccagaaatactccgagcctgcgataggctctccctcactaaaccctgaagtacccatagtctgtaagagaatgctcctgatcgaaatcagccagaatatctccaaa

SEQ ID NO: 7715 - DNA, 665 bp, Macaca Fascicularis
  misc_feature (1)...(665): n = A,T,C or G
gcccccctccactccatccatcagtagataataggggttggttacaattcataagagaatagttaaaacccttctcctctcatgcctaccatggtattggggcgatctgttcacatatgggctcagcaacgcacaagtgaggtcagccatggcactaagtcattcccattttagccagggtgcctcaggaatgtcatattgtgttaaaatcattttatttctgtgtatcttacctttaaatcattgtgatttactctgagattctgtagtcctaatactgtgtcactgtgctgtctgtgaaacaacttgaatggattttgtttgcatcttttgttacatgtaaggcagcttactttatgttctttgcagctgttttcattatgataactctgtgctatttacaaggttacattttccttaagaaacatcttggccaggcgaagtggctcacacctgtaatcccagcacgttgggaggccgaggtgggcggatcacttgaggtaaagagttcgagaccagcctggccaacatggcgaaacctagtctctgctaaaaatacagaaattagccaggcaaaattnnnnnnnnnnnnnnnnnnnnnnnnnnnnnnnnnnnnnnnnnnnnnnnnnnnnnnnnnnnnnnnnnnnnnnnnnnnnnnnnnnnnn

SEQ ID NO: 7716 - DNA, 653 bp, Macaca Fascicularis
gagccatagcttagagcttgggactgggagttatgtgctataggaaaattggataggaatagaagggatgaattctaattttttggcaagctgtatgtggtgttcaaaatccaaaataaacatcacttgatagccataggatacacaatgatgaaaaatacaatgattaaaaaacatgctggccagatgtggtggctcatgccagcagtgccagtactttggggggctgaggtgggagtatcactttaccccaggagtttgagacaagcctgggcaatataatggaatcttgtctctacaaagaatttcaaacatcagccagacatgttggctgaggcaggaggatctcttgaccccaggagtttgaggttacagtgagctatgattgtcactgcactccagcctgaacaatagagcaacaccctgtctcttaacaacaacaacaaaaaagcgccaatgattttaaatgtgttgaggtttcttctatggcccagttacggtataccttggtgagtgttctataggtacttgagaatgtgcattctgctgttggagtattctataaatgtcagttagattggttgatgatattaagttcttctatattcttgctgactttgtacgtaataagtctatcagttgtgaaagaagag

SEQ ID NO: 7717 - DNA, 777 bp, Macaca Fascicularis
  misc_feature (1)...(777): n = A,T,C or G
ataaaggtttactattattaacaagttatcactattatttacatgtttataaaatggaaataaaaatgacatacacatttggtgccaaaagtggcacatccaaacnnnnnnnnnnnnnnnnnnaaattttcaagctatgtgtttttaaaataaannnnnnnnnnnnnntaagggggaaaannnnnnnnnnnnnnnnnnnnnnnnnnnnnntcatcatcannnnnnnnnnnnnnnnnnnnacannnnnnnnnnnnnnnnnnnnnnnncacccccgcgtgctcttgcaagacgccaagcaaacaaacaaaaaaacaaatataccagttatgttcctgagctacagaagtttagggcgtctaaactgnnnnnnnnnnnnnnnnnnnnnnagaccctgtgggatcggatagtgtggcaccaggacctggctctcctgagcgctcagctagtgtggcaccaggacctggcactgcactgagaagacgctagnnnnnnnnnnnnnnnnnnnnnnnnnnnnnnnnnnnnnnnnnnnnnnnnnnnnnnnnnnnnnnnnnnnnnnnnnnnnnnnnnnnnnnnnnnnnnnnnnnnnnnggacaagggctgaggacagacagaagccactgggtttgggagcccctgtgcccannnnnnnnnnnnnnnggtggttcannnnnnnnnnnnnnnnnnttcgttcctttgtannnnnnnnnnnnnnnnnnnnnnnnnnnnnnnnnnnnnnnnnnnnnnnnnnnnnnnnnnnnagnaanncattcctctgtc

SEQ ID NO: 7718 - DNA, 664 bp, Macaca Fascicularis
  misc_feature (1)...(664): n = A,T,C or G
gtnnnngatgttttgtctgnntngctttgttttggtagtcatttctttttcnnnnnnnnnnnnnnnnnnnnnnnnnnnnnngaattcannnnnnnnnnnnnnnnnnnnnnnnnnnnnnnnnnnnnnnnnnnnnnnnnnnnnnnnnnnnnnnnnnnnnnnnnnnnnnnnnnnnnnnnnnnnnnnnngatggcccaaggaagcacattgtcctgttttattactttctaccctgtgcaatatnnnnnnnnnnnnnnnnnnnnnnnnnnnnnnctttatattcaattgatatataataacnnnnnnnnnnnnnnnnnnnaaaatatttttagaactactagcttttccacatataagaaaatgagggttcttaagggagccactccaccatgctattaagactctggcagagttatgnnnnnnnnnnnnnnnnnnnnnnnaataagtcctgtaaatacaatgtcttnnnnnnnnnnnnnnnnnnnnnnnnnnnnnnnnnnnnnnnnnnnnnnnnnnnnnnntctggnnnnnnnnnnnnnnnnnnnnnnnnnnnnnnnnnnnnnnnnnnnnnnnnnnnnctatgtttggtttgctttttcnnnnnnnnnnnnnnnnnnnnnttgtgagatagnnnnnnnnnnnnnnnnnnnnnnnnnnnnnnnnnnnt

SEQ ID NO: 7719 - DNA, 769 bp, Macaca Fascicularis
  misc_feature (1)...(769): n = A,T,C or G
gnnnnnnnnnnnnnnnnnnnnnnngagattggcgannncnttttggagaggatctgcagataccaacannntcagggtttcctcaggtccaggagtgccaggctcctgtggactcttcctttggggaagcaaaagaagactccatctgtacacacagaatgcgttaattatgttttcttgttttctgttttcttgacgctctagcatctggtgtttactgggaaaagattgcctnnnnnnnnnnnnnnnnnnnaaactaccaattcagaacccatactcctaaccacctactttatctggctctgatactgtaggagacaataccgcccttccttcatcaccacagggtgaggtactagacaactagaaatggcccctannnnnnnnnnnnnnnnnnnnnnnnnnnnnnnnnacagcctaagcctgcctgccctgcctgcccttgctgtcccacagagaccacagcagaggatcctgcccatgcctttccctctcctgcctctgcctggggcgtccctgtgcctcctatttctagggatctgtgagtatgaatgggacagtcacttccatgtttgcaggtcttaacatccctgattaaaacaaattctgagtacatttgaaaacataaggcttccaacggaatttttaaaacccttatatggacgaattttaaacatatatgtaaataaaccatgaatataacaaacnnnntgtatatcaataacccttcagagcaacaagaaatacatgggcaattctgttctgtcta

SEQ ID NO: 7720 - DNA, 441 bp, Macaca Fascicularis
tagctcttaatgaatgaccgcctatatcaaaaaagctatcattgacaccaattcttgcaagtcccagcacattgtgccaaatctcgactaacctggattcagttgcatttctagcagctacatagattgtccttagtatcggatcaccttctggcttaggttatcccctacgatccatttttccatttggagttgtagggaaagcctgtagctgcacaaaataggttggaatcatgtaatccggtaattcctttgctagatgcgctctcggttcagctaatgtgatctcctcttctgctgtaaactccgctattaataacggttgctcggttgaatcctcggcaacgacaacaacggcctccctgatcagataggaatgtcagaatagcattttcgatctcgccaatctcaattcggtagcccctaattttaacttgttca

SEQ ID NO: 7721 - DNA, 120 bp, Macaca Fascicularis
gggtgtgtgaaatattgttataatacgcagagtgagcacagtgatctatacccctctccacaaatgatgttttcaggtctcatggactgttccccccatgttttcatccagagttattaa

SEQ ID NO: 7722 - DNA, 387 bp, Macaca Fascicularis
atgggaatccaaggagggtctgtcctgttcgggctgctgcttgtcctggctgtcttctgccattcaggtcatagcctgcagtgctacaactgtcctaacccaactactgactgcaaaacagccatcaattgttcatctggttttgatacgtgtctcattgccagagctgggttacaagtatataaccagtgttggaagtttgcgaattgcaatttcaatgacatttcaaccctcttgaaggaaagcgagctacggtacttctgctgcaagaaggacctgtgtaactttaacgaacagcttgaaagtggtgggacatccttatcagagaaaacagttgttctgctggtgaccccacttctggcagcagcctggtgccttcatccctaa

SEQ ID NO: 7723 - DNA, 643 bp, Macaca Fascicularis
tcctattctatattcactgggtcctgcactgtgtagaggccacttggcctccttgatttaatggcttgacatccttgtttgctccttctcttcccactaggtcttggcttttctttctcccttccagtagaatatccagacccacctcccagttgttcttgagcttaaaaactcagcttaatcctcagctgtttctcaactatgattgactcccttagcaagcaagtggaattctggtctctgtggccttggcgtaggaaaaaccggtgtctccaaggacctcagctgctgaaagggagctgcatttaggagttgtattgaccctgtagcatgatgtctttccagaacaattcacaaggcctggggaaagtttgtcattttactggggtaagaatccccagtaaattcagtgaccagtaagagtcagtggtgggtgggaggccgaggtgggcggatcatatgaggtcaggagttcaagaccagcctggccaacatgacgaaatcccgtctccgctaaaagtacaaaaattaaccgggcgcggtgatgggtgcctgcaatcccagccactcgggaggccgaagcaggagaatcacctgaaacccaggaggctgaggcctgcagtgagccaagactgtgccactg

SEQ ID NO: 7724 - DNA, 732 bp, Macaca Fascicularis
  misc_feature (1)...(732): n = A,T,C or G
tnntcnnnnntaagtggaaacaacttccaaacagttgaggaaggcagtaannnnnnnnnnnnnnnnnnnnnnnnnnnnnnnnnccaggctnnnnnnnnnnnnnnnnnnnnnnnnnnnnnnnnnnnnttagagaaaagccatcaccaaatccaacagacaagtgagtcttttcagctgtcaatcaccaaagnnnnnnnnnnnnnnnnnnnnnnnnnnnnnnnnnnnnnnnnnnnnnnnctgcaannnnnnnnnnnnnnnnnnnnnnnnnnnnnnnnnnnnnaaactgtgagtgtcccagtagagcccattattgctgcgtgtgttgtgatctttctgacattgtgctttggactggttgctagaagaaannnnnnnnnnnnnnnnnnnnnnaaggataaagaccctcacagggaaacagctctatgagaaagctgagataccatcgaatacagagagagttttgcannnnnnnnnnnnnnnnnnnnnnnnnnnnnctgtatttatcgctattattaaattcactcctgtcactcctgtttcattaatcacttaacagtagttgttagggctaatttgatacacttgtggaatatttttatggagacagctgttaagaatgaaaagtaagatttctttaagnnnnnnnnnnnnnnnnnntattaatgagatttgtttcaaataggttggtaataatttactgtttagtgtgttttttttctaggtaggagatgc

SEQ ID NO: 7725 - DNA, 701 bp, Macaca Fascicularis
  misc_feature (1)...(701): n = A,T,C or G
gctgagtgtagtgaatggaatattgatgatatgagagtcntaaatgcagagcaattccgaggaaaggggcatcgtgtgtctgggaaggtgcatcaggttgttcttcaactccctaagaaattgttgtgaaggactcaactgcaaactcgggatcagatacaaaatgggtctttccttccccttctccccccaaaaataggagcactaaattttaaaatctactcaggtgacaattgctttgcaatgaaacttatcacattgaaattttcactgttaaataaaaagatatttgtgatatttttaaatacaaacttttgcatcagtagtcagcatcctgacaattgaaatttggtaagtcgatatattttaaaatattttgctctccaaatagaattgtttttaaacaattgggaggattttttgtttctttaaatctattttaattgtcattgtaaaaacaaaatcttgcttgaccctatattatgccatgaatgaattgctgagcctttatgatacagtgaaagcttgtttcatgcatagtcatggaacatagagatgttctttaaactgacctattgataagaggtttaatgagtttcacggctttcaacactattgtcatatagttatctttgccatttggagtttataaaaccattttatgtattgtgatactaaaggaagttgttttgctttacttt

SEQ ID NO: 7726 - DNA, 664 bp, Macaca Fascicularis
  misc_feature (1)...(664): n = A,T,C or G
gaggccctgggaggcggtcattgacacccagccaagcagacagctgtgggtgcccaagcccttgctgggcctgtgcatgaggagtcccaccacttccaaaggaagtcctgggtaggaggtggccttggtagttggttccaaagttgaaaatgcttgcagtttgaccttagaagaagaagtgggaagaagagggagctctacagggtcagctttgttcctgttttcaagtctagaaagtcctattgccaaagctttctgcaggagctcccgggcgaatgccgcagcttggcagcccctggttttttcttagaaatggtcagttttccctcaaagtacccaaagtagccttggcttgagtttttgtccttgcctcccttttcagaggagagggcgtttacactgcatcttcctcgttaaagaagattaaagcaggccaggcgcannnnnnnnnnnnnnnnnnnnnnnnnnnnnnnnnnnnnnnnnnnnnnnnnncacgaggtcagnnnnnnnnnnnnnnnnnnnnnnnnnnnnnnnnnnnnnnnnnnnnnnnnnnnnnnnnnnnnnnnnnnnnnnnnnnnnnnnnnnnnnnnnnnnnnnnnnnnnnnnnnnnnnnnnnnnnnnnnnnnnnnnnnnnnnnnnnnnnnnnnnnnnnnnnnnnnnnnnn

SEQ ID NO: 7727 - DNA, 712 bp, Macaca Fascicularis
  misc_feature (1)...(712): n = A,T,C or G
cagggaagcacatgcctcnnngcannnnnnnnnnnntagtccagtcaagtgcagtaagaggtgggagtggggagtgtaaatggagtagtctctaactatccaaataggaaggtggtttttttttttttctctttcctggcatgaagataatcaaatcatttcaatagtgaattatgaaaatgaatgataatggttttatctgttatagaaatataacaatcagactttagccatgtaaatcataaaacatagagataacaatatgcatattgttcctagagcattttgtaaaattatgtttgtcatattctctttgaagagttatcactcaatattttatttctgtcttgtaagacccnnnnnnnnnnnnnnnnnnnngcttctcagggcctcagaggcctggccacgcagtcccctgctcttgtcagatatgtgcaccctgttcacccactaagcaggaagcctccttccccttctgagttcccctatcggccagtcagnnnnnnnnnnnnnnnntctcaacctggctcactgccctccagcctggaaaattattcaaacaagcctgtcacatctggaggaaccaggaatcgcctcttcctcttgttattgcaaagcctgccttccacagcccctgctggttcactcttttcccaaatgcaactctcctgtgatcctgcatggcatacagtgacctccctccttgggctct

SEQ ID NO: 7728 - DNA, 771 bp, Macaca Fascicularis
  misc_feature (1)...(771): n = A,T,C or G
tgcaaagaggaaacacagcangnnnnnnnnacagtgctagcaccatcgcaaactctgattcgaacnnnaaggtaccctgttgcacacattctctgcccatagaagatccacagtggagcacagacccnnnnnnnnnnnnnagagagctgtgtagtctaccagccaccaatacggaaacccatccagccaaggatgagactttctggaaaagaaagagcagagcaagaannnnnnnnnnnnnnnagaatctcatgggcaggaaggttaagtccttggacctgnnnnnnnnccagcagaaatggaagcagagtgtagacagaccagaactgcgtcggtctttaagccagcagccacaggacacttttgacttggaggaggtgcaaagcaacagtgaagaggaggagagtcagagtcgctggcccagcagacagaggcacccgccccaccaccaggcttnnnnnnnnnnnnnnncgtgaagctttctccgccaccacaacagcatgtggtctgacagaagtggcttcatagaaaacctaattccaacctcttgcaggaaactgcactgccctcaacatccagcccctacaccttggtcctccaaacccccaaattctgcaggagaaaggcagcatggtacatgggaaagaagaccagactgagcgatttggaatctacatcctaatgctgccacaagctgcatgcacagagaaannnnnnnnnnnnnnnattttgtttctctgtacactggtgtatctactatgtatgtataaa

SEQ ID NO: 7729 - DNA, 618 bp, Macaca Fascicularis
gtttttttcctccctttagttccaccccaacccccattccccagggtccttcttagagataaagaaataataaggaaacatctttcatagccacgttaaataagagaaactgatacacattattttttctttttaaagatgacttataagaaccctgaaattcacacaggtgagacaatagaaataaaaagatcttcagccaggcctttctgaatgagttattctgctaaaaatggtcttagttgtctgacaagccaactattgaacctcttcataacagtgtcaacactggtttctcctggttcattttatgtgtgcaagaagtcagtggtaactgctgcagggcttctacattagtggtaactggtttaaaaaacagactgtaagcctgtgtgtgccactgtttgcttcaacagtatatcctactaacaagcctcacctatttaatccaatgagttttaaatctaaatctcattcccttcctctttccctacctttttctttttttcttaaaaatttttttgtgttattaacataaattcatatttggtgtggcttaactgtatttcagaaggtcatcagattgtgagactgcttccttgaaacatttttgcaatc

SEQ ID NO: 7730 - DNA, 625 bp, Macaca Fascicularis
  misc_feature (1)...(625): n = A,T,C or G
acactgtctcattntnnntgcaannnctgagtttcttccatcctcagggccttttgcacaagttcttcctttgccttagaattctttcctggcctgcacacctcttcatcccctttccctaagctaatgccttaccctttaggtctcattttaaacatctcttacccaggaaaagtttccctgtccaaacaagtctagattggttcccctttgtttgttctaactgttctatatttctccttcttagcatttatcacaattcttgatatgttgtccttttcattttctcagtctctattattggagtaggtaatacatccatatagtacaaaattcaaagtgtattaaaggtatagagtaaaaagtcttctcttccctgtccccctgctacccagttctcctctttagaaccacttttagcattttgaatatccttcccgaaatattttctaagtatacaagcaattatgtatataatattcctctttatttttgccttttattaatacagatactgtatgcattttctgcactttgtctgttaataatgtatcttggcaattattctatattaatatgtaaatagttgcctctttctttttcatgcgccatatagtatggactt

SEQ ID NO: 7731 - DNA, 682 bp, Macaca Fascicularis
  misc_feature (1)...(682): n = A,T,C or G
agtaagccgagaggnnnntctggcctnnnatctagccaagnnncatggagannnnnnnnnnnnnnnnnnnnnnnntctgggacaccatcttgaccaaacaccaagaaggcatctacaacaccatctgcctgggagtcctcctgggcctgccactnnnnnnnnnnnnnnnnnnnnnnnnnnnnnnnnnnnnnnnnnnntggagcccaccaggcaagaggggccagcagccagagaagaacaagaagaaaaagaagaagaagaagaaggatgaagaagacctctggatctctgctcaacccaaacttctccagatggagaagagaccatcactgcctgtttagcctctgtccctgaactgctactggcaacccacgggacctnnnnnnnnnnnnnnnnnnnactcatctggggaggttaagttcacgggggacaaaaaaaggattcctagagaagaggcttcctagaccagcacaggctcgagaaagagatcccctaggcctggacttctccggccggcagccagaggcggcctttccccattgctcgatggattccatgtttttatttctcgggggggagcagggagggagaaaggtagaaaaatggcagtcacctttccaagaaaaatataaatggtccaannnnnnnnnnnnnnnnnnnnnnatttttttttctgtaaaat

SEQ ID NO: 7732 - DNA, 725 bp, Macaca Fascicularis
  misc_feature (1)...(725): n = A,T,C or G
acaaagcaaccggaagcgaaacagagnnnnnnnnnnnnnnnnnnnnnnnnccgnnnctgctggttcttcacgcnnnnnnnnnnnnnnnnnnnnnnnnncgcggactgctgcccatttgcccatgggcctgcggagctgcggccaccccggaccaccccgaggaagannattccatgagctgtgtccttgccagccaagtcctggtcagtgggggccaaaccaaagagagcttccccagcaatcctcagtgccgtggtctctgctctggctgtgtttcagcccacctcctcccagctttctctagatcctcacaccgatgaaccatgtttcataaacatcacnnnnnnnnnnnnnnnnnnnnnnnnnnnngcccccagctgggtacctggcttgtttcagatgcagccactnnnnnnnnnnnnnncatcttcgtatcacaaagnnnnnnnnnnnnnnnttacagtgtctcctgggggagagcagccggggatgccttgcacaggtccctcccagggcgctgtccnnnnnnnnnnnnnnnnnnnnnnnnnnnnnnnnnnnnnnnnnnnnnnnnnnnaagcaagnnnnnnnnnnnnnnngtttctcaccacgctggagagcagccactctgaagcagggatccaccagactggtatttttaaaaaaggtataaggcttgctctgttgaggttgtttttactagttacagagaataaaacaaaacaccc

SEQ ID NO: 7733 - DNA, 745 bp, Macaca Fascicularis
  misc_feature (1)...(745): n = A,T,C or G
cagaaaacagtttaataatanctcttnctaaaataaacactggtttcagggtcttcaggatgcctattttgccaagaaacttcagtatnnnnnnnnnnnnnnnnnttttgtttttgaacaataattatattggtttgctttaaaaaaagggagtaaatgtgactttaaagagacttcaaaatattgaatattttaaaaattaaaagtaggtcagtttataacgagtaaatacctaacacaaagaatgtgcagtgaacctcaggcatttaaggcacatcccccaccgcccgcccctccgaagtatggtccaaaaacaannnnnnnnnnnnatgtctcgaagaagacaactctgatacttaggttatttgttgagactcattggtactgactggcaagtattctgctttaaagtatcatgtattaaaatgtttagacagcatgtgttttaaagtgataaatgtaaaatgttaagtttgaaatggttaacagtaaattattatgttagtttctannnnnnnnnnnnnnnnnnnnngtagggaaagcctactttaaagtatggtaaatgtgtgttttaaagttcctatcaagtgacatacttcatttgattttttgtttaaggagccatgcaacttttttcttgtgttactttggatatgttttttcaatgccatctgaagattttgtaattgagtagcagtaaatatacaaatttaccatgttctaactacagttcatgaatagctgg

SEQ ID NO: 7734 - DNA, 728 bp, Macaca Fascicularis
  misc_feature (1)...(728): n = A,T,C or G
tcctcactttttagggagggttttagattctattagccacaaaggcttgaggtttctttnnnnnnnnnnnnnnnnnnnnnnnnnnnnnnnnnnnnnnnnnnnnnnnnnnnnnnnnnnnnnnnnnnnnnnnnnnnnnnnnnnnnnnnnnnnnnnnnnnnnnnnnnnnnnnnaggtcacagtgagctatgattgtaccacggcnnnnnnnnnnnagcaacagagtgagaacctcttaaaacaagacaaaccttttgaaactttgtgtaaaattattttccttacatataatttacccattcatagctggtgtggcatgtggtcactcttcttaaatacattaaaatgaccttaatgactgaaaaagtactcacagcacatctgtattatggatgtttccctctggatatggttactaccccttggaaactctataaatgagcatttcttcttttctctccctagtcctttctctcttctctttttcctgtttatgttcataactgaaggcctatgtgatatgatgnnnnnnnnnnnnnnnnnagtttgtgatagcaatggtcaaggagagaatgtatttcaaagcatatacaattaaatctgagcttctatagtatgaattgtgaaagacactaggtcgtgtatggttttgtataagggttgggacatttaaagtataatatctaagaaacttaaggcagactcacaatatttgcattaccattaagcca

SEQ ID NO: 7735 - DNA, 743 bp, Macaca Fascicularis
  misc_feature (1)...(743): n = A,T,C or G
acttattaaattctagttagtgnnnnnnnnnnnnnnnnnnaannnnnnnnnnnnnnnnnngcaaaattttattacaaaatctaaaaactttatagagttgannnnnnnnnnnnnnnnnnnnnnnnnnnnnnnnnnnnnnnnttaccttctagattgatgttggtatagtatccttaatacagtgtagtgtgttaatgtccttaatacaatcgggagatttttacctttaagcaaataannnnnnnnnnnnnnnnaaaagacttaagggatgattagatttggcaatctgtaagcaggagtaaaaaggttttaaattgcattgtccctatataactatctnnnnnnntatatatattgattnnnnnnnnnnnnnnnnnnnnnnnnnnnnnnnnnnnnntttccttcatccctacacgttttctacacttacatcacctnnnnnnnnaaaacgaagtcatgcattttctacttgaacatcaaaatatcaaaagccaaggtacccaaaagatgcaagtcagagnnnnnnnnnnnnnnnnnnnnnnnnnnnnnnnnnnnnnnnnnnnnnnnnnnntttnnnnnnnnnnnnnnnnnnnnnnnntgctttgctacttgtgtgaatnnnnnnnnnntttttagagccactcttaagagagaatataaaaaatcatgacaattactactgtttccaaatttacaaattgtgtacttaagtgaacctcatttaccttttatgtctgaatggc

SEQ ID NO: 7736 - DNA, 2110 bp, Macaca Fascicularis
gcagggttgcctttaggtggtggccagcctaagagtaagaaatattagtaatgttcctggcttctatttaactccctcagtagcctgaagtgttgccagaagtttcaccacttatcactcttcctgtaggctaggaaaacacaaataatctgaaagaagttaacattgcgtcaatgctagcaacttagggtaaatgattttatgaaatccttcatactagctgggaacagttctacacgcaagtcattgttttgattggtaagaggtgtggtgggaacaccatactgagagtcaggaggtgcctgtcttagaccagcatcttgtggaactggagccttaccccaagtgagccctttattgtaagggccggagacaaagtgaaggaccctgtaagatcttagaaataaggccacagaatttctctctaaatgtctaatattagatcagtccatatcaaagtagaaatgtacacctgaaagaaacaacaagggtgttgggcctattgcattcataaccagtggtgtgctggtaaatgttgaaccaccagctttctgtgtttgcggggagagcaccctgatttgtaatgtttgccagtttctgtagtgtcaatatttccatcatggctgatgtcaagctgccaatgtgacatcactgaaagcagcattgggaaggtaggtacacagcctgtgctcctgagctgatgcaagtcactgggaatgtcatcattggtaccacccataccactacttcatcatccaattgagtgcataagatacacagaaggaatatttccaacagaaaaggagttgaacagctatagtatggcagaggaaggaaaatcactgagactgcccttttgagtactatccaggagagaggaaggcttgacaatctgaactttacatattttgaaatccaaaggctacctccccaaccctgtaaaataaatttataaggttattttagctcagtgccattaaagaataacttatctaatgcctcattttccatcctgttccagtcaaacaagcttctgctcatggcctggcttgcttgcttgctttcttgcttattacactttaagttctagggtacatgtgcacaacatgcaggtttgatacataggtatacagaacttcaaacaggatggaatatcagtggatggcaggagcttgggaattcttgctgttaagtacaaattttgcactttttgaatgttagatgcttagtgtaaagttgatacgcaaggaaaatggtccatgtttacccacggttttcaggtactcccggactttaaagatgtcttggacattaagttcttaagcagtacacactacaccgtttatttttttttttcctcctaaggatttttttgtagggcagcacagcagagcaggacatggatgaaatactaggaatacgcatagtggggcagtgtgggggcttctcagcaatggagaacagttggtgaaacctttatttttatcaaactaagcatttaatcttgtatatttcccacatttaaaaatgaattaggtctctatcctaattaggatttgatcccatcaacactattgtagcagttaggaatcttaagagctatttttttttcatacaattactatagtccagtttaccaaagttttctttagatgtctgattatcttgaggtgattacttaccttaaaaggtatagaaaggatcacttacatatatggaaaaatgaaacaagggtgaagctgaataaagttctacttactgtattaactggcaacagttgagtttcttaagatctgaattgctgtgtgtgttacgctgtattcagaaccagtttctaaccagcctgtgagatgggaagtttttttcccataattgggatgaaacctttcattcagatattttgaattgaaggtgtatgtgttgtttgtaaccttgtgtagattgcaagtggtgttgacattctggatcttctatgtaacagttgaaatttggaagtgacgtcgcttacctgtctaacatggtgtgggagagaatttacaagtcatttattgaaagaataattgttgcaaaatatattgcttcgactttgaaaaaaaaaaaaaaaaaaaaa

SEQ ID NO: 7737 - DNA, 2549 bp, Macaca Fascicularis
agctttttttttccacagtagtggatcatagcatgttagagttagaaggttcagtgttggtggagctgttgaagaaatgatagagtaagagattcttttctaagcaactcaagtttgcagtgattcaggcctacttctgaagaaacagccttttatctcaatgaatgacacagaaaaaccagcagatactgcctctgaggaagaggactttggtgatccaaggacatatgacccagatttcaaggggcctgtttccaacaggagttgtacagatgttctgtgctgtatgatcttcctactgtgtattgttggctacattgttttaggacttgtggcctgggtacatggggaccccagaagagcagcctatcctacagacagccagggccacttttgtggccagaagggcacccccaatgagaacaagaccattttgttttactttaacctgttacgctgtaccagtccctccgtgttgctaaacctacagtgccctaccacacagatctgtgtctccaagtgcccagaaaaatttttaacctatgtggaaatgcaacttttgtacacaaaagacaaaagccactgggaagactaccgtcagttctgtaagaccactgctaagcctgtgaagtccctcacacaacttttactggatgatgactgtccaacagcgatttttccaagcaaaccttttctccagagatgtttccctgacttctctaccaaaaatggcactttaacaataggaagtcagatcgtgtttcaagatggaaatggagggacaagaagtgttatcgaactcagggatgctgcgaatggtatcaataaacttcttgatgcaaagtcacttggattgaaagtgtttgaagactatgcaacaacttggtattggattctcattggcctgatgatcgccatggtccttagttggatatttttgatacttctgaggttcatagctggatgcctcttctgggtcttcatgatcggtgtgattggaattatcggttatggaatatggcactgttaccaacagtacaccaatcttcaggaacacccacgttctgtattaactgtctatgacatcgggattcagactaacataagcatgtactttgaactgcaacaaacatggttcacattgatgataatactctgcatcattgaagtgattgtcatcctcatgctgatcttcctcaggaatcgaatccgagtcgccattatcctgctgaaggaaggaagcaaagccattggatacgttcctagtacattagtctatccagctttaactttcattttactctcaatctgtatttgctactgggtcgtgacagcagttttcttggcgacatcaggggtacccgtgtacaaagtcatagctccagaggggcattgtatacatgaaaatcaaacctgtgacccagagatttttaatacaactgaaattgccaaagcttgccctggggctctgtgtaactttgctttctatggtggaaagagcttgtaccatcaatacatccctaccttccatgtatacaacttatttgtctttctctggcttataaacttcgtcattgcattgggtcagtgtgcccttgctggtgcattcgctacttattactgggccatgaaaaaacctgatgacatcccacgatatccactttttactgcatttgggcgagccatacgatatcacacaggatccctagcatttggatctttaattattgcattaattcaaatgtttaaaattgtcctagaatacttgaaccaccgtcttaaacgtaccgagaacacattgtctaaattcctacaatgctgcctgagatgctgcttctggtgtttggaaaatgcaataaagtttttaaacagaaatgcctatattatgattgcaatatatggcagaagcttctgcaggtcagcaaaagatgctttcaatctgctgatgagaaatgttttaaaagttgcagttacagatgaagttacatactttgtattattcctggggaaaattctagttgctggaagtataggtgttctggccttcctattcttcacacaaagactgccagtgattgcacaaggaccagcatctttaaattactactgggtacctttgctgacggtcattttggggtcttacctgattgcacatgggttcttcagcgtctatgcaatgtgtgttgaaacaattttcatctgcttcttggaagatttagaaagaaatgatggttctactgcaagaccttattacgtgagtcaacctctgctgaagattttccaggaggaaaatctacaaactaagcagcagtagaagagcaaactggtcgtcctacagctgtgtgttaccttttctccatctgctgtgtccgtgcaacatttgtttcataagtgctttgtgtttagcaacactgtatttacgaccttgttggcttgcatttgcatgttttataccaaagcttatactgtaatatgtgaagccatcagaaatcgcaagggaattgttaataacataaaacatttttatactaaaaaaaaaaaaaaaaaaa

SEQ ID NO: 7738 - DNA, 722 bp, Macaca Fascicularis
  misc_feature (1)...(722): n = A,T,C or G
atatccttcttccatcccaaactgtgatctctttgagagctaaaatgtcagttttctctctgtcttttgtggctagggcagagcggatgttgaaaaaatatttgttgaatgaaatgaatcagcatacatgcttgtaaagagacagagttttatagaactgattaaactaattccttatctgaaagaacgtgtacacagcaagtcaaatagtatagatgagcttatgatacaaactttgtttctccttccagcttatcctacccctagctttattccctaaaggtagcctctctttaaccatttatatttttggattttctggttactgtgcctctgacttctatagctgtatgtctaaagaaaactgtacacatcctgggaggtgcataagatgcttaatttgagtactgaaagaaattattgccgggcacggtggctcacacttgtaattccagcattttgggaggccgaggtgggtagatcatctgaggtcagaagttcgnnnnnnnnnnnnnnnnnnnnnnnnnnnnnnnnnnnnnnnnnnnnnnnnnnnnnnnnnnnnnnnnnnnnnnnnnnnnnnnnnnnnnnnnnnnnnnnnnnnnnnnnnnnnnnnnnnnnnnnnnnnnnnnnnnnnnnnnnnnnnnnnnnnnnnnnnnnnnnnnnnnnnnnnnnnnnnnnnnnnnnnnnnnnnnnnnnnnnnnnncaaaaaaaaaaaaaaaaaa

SEQ ID NO: 7739 - DNA, 689 bp, Macaca Fascicularis
  misc_feature (1)...(689): n = A,T,C or G
gggtgagccnnnggcaggacgatnnnnnngctcaagcacagcagaatcatggcccctccgtgaattggaacttggtgcaggttaagtatccctaatcctaaaatctgaaacacttctggttccaagcattttggataaggcgtattcaacttgcagtctcttttctgggggaaaaaaataattaaaaacctagcctagccaggcgtggtggctcacgcctgtaatcccagcacttcaggatgccaaggtgggtggatcacctgagttcaggagttcaaacnnnnnnnnnnnnnnnnnnnnnnnnnnnnnnnnnnnnnnnnnnnnnnnnnnnnnnnnnnnnnnnnnnnnnnnnnnnnnnnnnnnnnnnnnnnnnnnnnnnnnnnnnnnnnnnnnnnnnnnnnnnnnnnnnnnnnnnnnnnnnnnnnnnnnnnnnnnnnnnnnnnnnnnnnnnnnnnnnnnnnnnnagagcaaaacttgtctcaaaaaaacaaaacaaaaacctggccattgtttcttccatgtttctagaggtatcatctcctagcagcttatgaacacatatgcttggccaggcagggtggtgtgnnnnnnnnnnnnnnnnnnnnnnnnnnnnnnnnnnnnnnnnnnnnnnnnnnnnnnnnnnnnnnnggctgtagtgagctatgatgagaccactgtactccagcctg

SEQ ID NO: 7740 - DNA, 2329 bp, Macaca Fascicularis
  misc_feature (1)...(2329): n = A,T,C or G
tgaatgaaatatgaggtacccctaactagctgtctaaaagaaaaatgaggtaaaggacaaagtgagtgttttgggggtaggggattcatggggagatgacagtctagcaatgggccccaggtaagactccagttctgtcttctctcgatcaggctcttactttcttgccaaacatcatacttacatcccttttaagggcaaagttagcctccctgatttgttttctccatacctgctttggggaagcatgggcataaacccagtagaccttggagatctcctgagacaaggatcagaggtgaatcagaggtacagaggaggtagggcacctgaaaaagtactgttacttttttctctttttatttttatttgccttgccacttgaattcatcctaaatgaccagtcctagtgtgtgtagcttagctaacaaaccaaaaaattctctgcccatcccccttcccagacagaaagaagggcttctcagttagcttggtttggagaagagttaaacaaacttcttttttgcaaaacttgttaagggggagggagtgtggaatttatagcattttctaaacttgtgaccttgactctatttttaaaaaatagtattccttaaaattttaataggaaataatatttgttaaccctgttgcaactgggaaatgctggattacatggtttccccatgccacattagaaatttcagtgtgtattcacactctggcagcctggcaatgtggggaaatatggactgtgttgattcctgctcctctgcttacttgctctcttgctgtcattcatttagtcatcaaatactgtttcaaggtatgctagtggacaaagcagccactgccctgccctcatagagcttatagcctaacacaaagcaacagcaaacattaggcatttgttcataaaacctttcccacaaagacttacaggcaggaaaattaggttttattttgagtaagatgggaactcattatagttttaaacaaagatatgatgtcatctgatttataagtttaataagatcactcagacttccatggcaagaatggcttggaggggcaggagtagaggagagagactacttaaagagcctaatattttgtagtaaggctcgctaatggttgggtgtagggagacaatgaggggaagaacagaatctgtgattatagctaggtttttgactgagcaactgaatggatattgtgccattgactgagatggggagggatagaaaagaagtaggtttaagggggagaagaggatcaggaattctgtcttacatagactccatttggaagatgtctatccaagatgtctatatccaagtggagatagatgtctatagatagttatatgtaagagtgtggttgtcagaggatagttggggctagagttataaatttagacattagcagtatatatatcgggtattgaaagtcttcaaacttaatgaaatcatcttaggaggaaatgaagagaatgaggaaaacagagcagaaaacaggcactgagcacttcagcatttcaacatatagaggattgagaaacagacttaaaaaacaaaggtcctaggccaggcgccgtggctcacccctgtaatcccagcactctaggaggccgaggtgggcagatcacgaagtcgggaatttgagaccagcctggccaacatggtgaaatacatgatgaaactctnnnnnnnnnnnnnnnnnnnnnnnnnnnnnnnnnnnnnnnnnnnnnnnnnnnnnnnnnnnnnnnnnnnnnnnnnnnnnnnnnnnnnnnnnnnnnnnnnnnnnnnnnnnnnnnnnnnnnnnnnnnnnnnnnnnnnnnnnnnnnnnnnnnnnnnnnnnnnnnnnnnngtgtctcggggggaaaaaaaaaaaagggtcctaagagaggaggaaaccaggagaatgtcctactacaaaaacctagaaaaccgattgctgtggcggtaggggtgttaatgtgtgtagagatgagggtaaaagaaaatggaagcattgccagcggggcgtannnnnnnnnnnnnnnnnnnnnnnnnnnnnnnnnnnnnnnnnnnnnnnnnnnnnnnnnnnnnnnnntgagaacagcctacacaatatggtgaaaccccatctctacaaaaaatacaaaatacaaaaactagccaggcgtagcggtgtctacctgtagtcccagctactcaggaggctgaggtgggattattacctgaacccaagaagtcaaggctgcagtaagccgtgttcctgccactggactccagcctgggtgacagagtgagaccttgtctcaaaaaataaaaaaaaaaaaaaaaaa

SEQ ID NO: 7741 - DNA, 745 bp, Macaca Fascicularis
  misc_feature (1)...(745): n = A,T,C or G
aaaatattttactctatgtatgatgctaatcaatgaacactatttattttacagagaaaacttatctgtgaactttactatatatctgtttattttactttattattattttttttaaataaaaaagggttttaaannnnnnnnnnnnnnnnnnngaaaattttttaggactctgcctgccctgtaactatcttaatatgatctggcagaaactcgcatgtatccaagtaaagtagtttagctaaagaaagtttctccattgcttttctgttcacagtcgtggctctgttttttaagaatgtaacgtttttagattatacttgcatctgtgactctactaccagccccattgacataacacagnnnnnnnnnnnnnnnnnnnnnnnnnnnnnnnnnnnagccgcaaccctctctgctggtgttcattcccctgctctgtgctgttctgaagnnnnnaccaatactctttccatactgtctctttcagtgaagagaaatgcattcaacgattaggtccctcccgtctactnnagnnncaggattttatgttgtttcatacacagttgtttcagtatagaaannnnnnnnnnnnnnnggcgttcttttaaacatgttttaactctcatatgagcaaaccgtccaacttcagtttttcataagattaaacttcctacgatccaatcngtctcctnnnnnnnnnnnnnnnnnnnnnannnnnnnnnnnnnntttttaaatgtttgttca

SEQ ID NO: 7742 - DNA, 690 bp, Macaca Fascicularis
  misc_feature (1)...(690): n = A,T,C or G
cgagtatatannnnnannnnnngtcactttagaacagctttgaaactagagtttcaaaggtaaaaggatttcatgtttctgaannnnnnnnnnnnnnnnnnnnnntcatttgacaggtttaattactagtttttgttttgttttgttttgttttttgagatggagtctcgctgtgtcaccnnnnnnnnnnnnnnnnnnnnnnnnnnnnnnnnnnnnnnnnctccacctcctgggttcatgccattctcctgnnnnnnnnnnnnnnnnnnnnnnnnnnnnnnnnnnnnnnnnnnnnnnnnnnnnnnnnnnnnnnnnnnnnnnnnnnnnnnnnnnnnnnnnnnnnnnnnnnnnnnnnnnnnnnnnnnnnnnnnnnnnnnnnnnnnnnnnnnnnnnnnnnnannnnngnnnnnngaaatataanncaccatgcctggcctaaccctaattactagtatttttgtgggtggatagaatgaatagtttggaatatttaaaatgtttttataaatgtttgcttactctctctctatatgacattattcccaattagttttatatctccaagatatatgtatttggtatatacacatatgtatatatacatattctatataagaatatattccatataagaatatgctgtatatattatatacgggaatatattagtcattgatgtatttgccagaa

SEQ ID NO: 7743 - DNA, 736 bp, Macaca Fascicularis
  misc_feature (1)...(736): n = A,T,C or G
cagtccttacttacactncttgtctgttttaggtgtacttgttaattcttacgtcctaattttatttaattctgagttgctcacacggcattttaggggaagcgtacaggcaggatgaacactttgtgttaaagtgttatttttatgtattacctggaaggaggcaggtttttttctattttctaaaaagagtaaccaagagacctccaaggtgtcattaggttccagctgctctcctccacactgaatgataatcctgttaatttataggtacatttgtagtaatgtatatgtctattaagtataagagataattcattagtaatagaaattaattgaacccttttggatggggagagcatcaggctggggtcaggtaagtgtaaatggccttctgagcatgctcttctaggctgactcccagccctgacttgaaaccattagtggtgacttgctctgttttgagaaaaattttccaaccttttgcatgagaaactagaaaaaggaatgtatgccacgtaactggattacagaaatgagttaatttaatagtctctgtgattaaaaaaaaaatgaaatattttcttattgaattaatatttttgtctcgaagcgttttctagtgataggatgtatttgtctttttcctggtgataccctcttagcttatatctttgctgtccttaagatcctaaacaaatcatctttgtcagttaagtatagttgtgcaaaaatt

SEQ ID NO: 7744 - DNA, 1896 bp, Macaca Fascicularis
actttggcagtcattgactgggagatacagcagggcctgctgagctcagaggaacgggaccagggagcgaccgtcttccttcgagagatccaagacctctacaaacacatccttgaagactgcgccctcgggatggtggaccggctcgcggatggctgcctggacactgatgcccagaaccttctcagcagcctcaagggccacatcactgacatgcaccccgaggtcctcaaggcccaccgcctgccgtggagccgcgacctggtgaaccccaagaacaaaactcacgcccagtacctgaaggagctgggcgagcagtttgtggcgagggccaatcaccaggtcctcgaacgcctccgtgagctggatgtggccggacaggagttggcgtggctctaccaagagatccgccaccacctttggcagagctcggaggtcacccagaacttctgcggacgtcaggaactcctggcccggcttgggcagcagctcaggcacgatgacagcaagcagcacacccccctggtactctttgggcccccgggcatcggaaagacggccctgatgtgcaagctggttgagcagatgccaaggctgctcgggcacaagacggtgaccgtcctgcggctgctggggacgtcgcagatgagctcggatgcccgtggcctgctgaagagcatctgcttccaggtgtgcctggcctatgggctgcccttaccccgtgcccaggttctggatgcccacaccagggtggtccagtttttccacaccctcctccacaccgtctcttgcagaaactttgagtctcttgtgctcctgctggatgctatggatgacctggactctgtccgccatgctcggagggttccctggctgcctctcaactgccccccgagggtgcacctcatcctctcagcttgctcgggggcactgggggttttggacaccttacagagagtgctcctggacccggaggcctactgggaggtgaagcccctctctggaaaccaaggccaggagatgatccaacacctgctggtggctgcaaggaggacgctgagcccggtgcacacagatttgctctgggccagcctcccggagtgtgggaacccggggcggctgaggctggcctttgaggaggcccggaagtgggtctccttcactgtacctgcaccactggccaccaccgcagaggaagccacacaccagctctgcgcgcgtctggagcagacacatgggcggctcctcgtggcccacgtgctgggctacatcgtgtcttcccggcacggtctctcggaggcggagctgaaggatgttttgtccttggacgacgaggtcctgcaggctgtgtaccgggactggaccccacccagcaaggagctgctgccaagacaaggactttgagatgtcggatgagcagtccaaggaggcagagtctgaggccgtcagggaagatgggaccggaggcacacacagagggcccagggagtgtgagaaggggcttcctgagggtaggggtgagctcagaggcctcgtcgcctcaggcgccgaaggtatcgacttgaactccccggaccatcggaatcataagtcgaacgaaagccttctgatcaccgtgctgtggcggcgactatccatgttcagtcgtcggggctcctcgcggtcaagcaagagacaatcagaccagattaggtcatcaatgttcagtggtcgggactccttgccgtcaagcaagaggcaatcagatcagactcggaaacaggagcgtccgatccgagaaggcaaccaggaggagccggagaagggatgaccccagacctgctcttagtcagccccaacctccagagaataaaatttctaacgtgtacctgcaaaaaaaaaaaaaaaaaaaaaaaa

SEQ ID NO: 7745 - DNA, 721 bp, Macaca Fascicularis
  misc_feature (1)...(721): n = A,T,C or G
tgctcatgtagctgcattcagctggaaggttgactgaactcagctacgttggttggatcttcctctccatgttgtctttcattcgagtttcttcacatcctggagtcttcttggcatgatggnnnnnnnngagcatttccagagggcatgcccaaattcataagcacaaatcaagcctctgcttacacctagttaacttggctagagcaagactcatggacaagcccagagtcagtgtgggaggggactacacaaaggtatggatactgagaggtgtgtttcattgggctatgactataaccatattgcacagaaggataaaagagatcaccaaccagatctttctaacccaggtctcctgtcctcttctctacctgttgacgtctctgcagtcctaacctgtagttctcacgtgtgctctgacttttggtgctggaaagggtacccaggcagcagctaggccaacatgcacatccttagcccattgcccttagtcaagtttttgggaaggcagaccctgcttccaggtctaattctgatcttnnnnnnnnnnnnnnnnnnnnnnnnnatgcccttttcttctctatataacattctttgcaccacaaaaaggaaactccctttggagcttnnnnnnnnnnnnnnnnnnnnatgcatctaacaggacaaaacttctcaatgtttacgctcagatgatatctacgagagggaaagtctcctg

SEQ ID NO: 7746 - DNA, 2350 bp, Macaca Fascicularis
gttgtgaccggcgggggacgctggtggtggtggtagcggcggcggggacaccgggccgcggcgccaccatggcggtgcgacaggcgctaggccgcggcctgcagctgggtcgagagctgctgctgcgcttcaccggcaagccgggccgggcctacggcttggggcggccgggcccggcggcgggctgtgtgcgcggggagcgtccgggctgggccgcaggaccgggagcggagcctcgcagggcagtctttctggccttcgggctagggctgggcctcatcgaggagaagcaggcggagagccgacgggcggtctcggcctgtcaggagatccaggcaatttttacccagaaaagcaagccagggcctgacccgttggacacaagacgctggcagggctttcggctggaggagtatctgatagggcagtccattggcaagggctgcagtgccgctgtgtatgaagccaccatgcctgcattgccccagaacctggaggtgacaaagagcaccgggtcgcttccagggagaggcccaggtaccagtgcaccaggagaagagcaggagcaagctctgggggcccctgccttccccttggccatcaagatgatgtggaacatctcggcaggttcctccagcgaagctatcttgaacacaatgagccaggagctggtcccagcgagccgagtggccttggccggggagtatggagcagccacttacagaaaatccaagagaggtcccaagcaactagcccctcaccccaacatcatccgggttctccgcgctttcacctcttccgtgccgctgctacccggggccctggttgactaccctgatgtgctgcccccacgcctccaccctgaaggcctgggccacggccggacgctgttcctcgttatgaagaactatccctgtaccctgcgccagtaccttcgcgcgaacacacccagcccccgcctcgccaccatgatgatgctgcagctgctggaaggcgtggaccatctggttcaacagggcatcgcgcacagagacctgaaatccgacaacatccttgtggagctggacccagacggctgcccctggctggtgatcgcagattttggctgctgcctggctgatgagagcatcggcctgcagttgcccttcagcagctggtatgtggatcggggcggaaacggctgcctgatggccccagaggtgtccacggcccgtcctggccccagggcagtgattgactacagcaaggctgatgcctgggcagtgggagccatcacctatgaaaccttcgggcttgtcaatcccttctacagccagggcaaggcccaccttgagagccgcagctaccaggaggctcagctacctgcactgcccgagtcggtgcctccagacgtgagacagctggtgagggcactgctccagcgagaggccagcaagagaccatctgcccgagtagctgcaaatgtgcttcatctaagcctctggggtgaacagattctagccctgaagaatctgaagttagataagatggttggctggctcctccaacaatcggctgccactttgttggccaacaggctcacagagaagtgttgtgtggaaacaaaaatgaagatgctctttctggctaacctggagtgtgaaacgctctgccaggcagccctccttctctgctcatggagggcagccctgtgatgtccctgcatggagctggtgaattactaaaagaacttggcatccgctgtgtcatgatggtctgtgaatggtgagggtgggagtcaggagacaagatgacgcagagagggctggttagccagaaaaagcttcaggcttggcaaatggaagagcttgagtcagagttcagtctgcagtcctgtgctcacagacatctgaaaagtgaatggccaagctggtctagtagatgaagccgaactgaggagggagaggcctgcatccacatagaggctccatgccaaggcactggctgtcagtggcagagtttggctgtgacctttgcccctaacatgaggaactcgttgaaggaggcagcgttgcatgtctgcatttgccacctggatgaaggcagctatcagcatgggtcagcacgagacagcagattcagttacgggagtgggaaacgtctgcgtgaggcctgggcctctgtattcccaagctgtgtgttctggaccagctactgaattaatctcacatagcgaaagtgactgatgagcaagtgtggggatttacacttgagggcttccctcctgaccagcctctcttacaggaactgtgaaatattaaatgcaaatttacaactgcaaaaaaaaaaaaaaaaaaaaaaaaaaaaaaaa

SEQ ID NO: 7747 - DNA, 637 bp, Macaca Fascicularis
tggcatacatgtgcatttggtgttgtgaagttgaccatctggtcttctttaataaaatggtggaaagcaccccacgacgatgatgggggcaggaggatgtttttgagaacagcgcttctcatccagggctggattttgccccccaggagacatttggcaatgcaatggcaacttttggttgtcgccgccggggaagggaagctaccagcatctagtgcgtagaggtcatggacgccattaaacatcatacagtgcaagtgcagcctccaaccacaaagagttgtcttgctcaaatatcatcagtgctgcagtgtagaaacttgataggtggttttctgttaatgcaaaactctcataaaaacctctcacttttcctgttattgactatatgcttgatacacccaaaaagaaaaggggaggggtgccaattcacctacactgcagtggcttcttcacctttaaaaatatttataaaatagttacaaaaatatgatatctgaaaagcaatccaagcctgtgtaaatgggaatcattgataagtatcatcatctgtatgagcttggcttagacatgaaaagttgattctctttatatcactcctcgcacctggacaaattcaatccttggtacttaagtc

SEQ ID NO: 7748 - DNA, 628 bp, Macaca Fascicularis
  misc_feature (1)...(628): n = A,T,C or G
agtatacagctncnncnnnnnnnnnnnnnnnnnnnnnccaaagaagtcattacagtccttacgaaagcccatgacacattcctagagattcatccagatgtaacccagtgcgtggtccagtgcatgcctgtgcttaacttattatagatcaagtgttatataagtccaacacatcaaacgtgcccgaaatactatatgcactaaattggaagacaaatggccacactggatactctcccacatgcacttacagggcacgccatgctccatcttccccatcttgcctgggaacacgaccaatgtggctaaaccagcaggctccttggctgccagtttctggctggttgaaccaatgggaaacacgaaaggagagccacgggtggggagagagtcagatcagagtttctgtcctcagggctctctccctgggaggtggtggcaggaatggctgccttcctctctgaaggctccttcaagcccctcaccaaacagttcccatctctgagtccagccacctgctccatcttctcctctgtaggcccagtggtgggaacggcccaccactnnnnnnnnnnnnnnnatactgaagcaccccttactgcattccctaaattctatgcacatgtta

SEQ ID NO: 7749 - DNA, 128 bp, Macaca Fascicularis
atggggagtatgagtgacagggtgggtcttgatatgggtcttgtgccagccccaggacactgaccccagggtgttgcccctgggggtcaatacagactctccggagcgtggccctctttttgtggggc

SEQ ID NO: 7750 - DNA, 754 bp, Macaca Fascicularis
tgctcagtaggcagtgtttgcagactttgggagcggtctgtgtggccaaatatcgtgtgtataggcagactttgaaatcaggtcctgcttcatttacaagaattttggtgggcatctaatcctacataatgcaaaagaaaaacagaccatttaaaaactcagacacgattatatttaatatattaattactaaaaaggcacaagattacactgaacacattagctactaaaaaggcactgctaagacattcaagcaaatagctattatacactgcagcagattttacaggtttctaattccaacatatgtttgaaaaatctgtgagtgttctaaaatatatttaataatggaaggtctgcattaatataccatccatgtgtttttaccatttgccttaatattgaatatactgtttacctcactctaaaaagaaaaccagaagccttatttgtgattttggagtggaagcttccatttttgtgtcaaaaatgaatcctgattcttatggaaatctctgttattaagtcatttcaagatgagacaacactgaagatcaaattgtgttgggtatcagtatcttctctcctcgtttatctcttactcctcatcctcccagaatctatccgtttatgatagaaagatgggaaccttatttgaatgtggggtttttccatgatgtccaattttgttgtgggaaaggatttgcataaagtttttgtttaaattttggtagatttttatctatacaaatta

SEQ ID NO: 7751 - DNA, 684 bp, Macaca Fascicularis
  misc_feature (1)...(684): n = A,T,C or G
ctaaagaagttcatcgccaaaaaactcaacnnnnngtcnnnnnncgagctggacattttatgcaacgaggagatcctgggcaaggaccacacgctcaagttcgttgttgtcacgaggtggagattcaagaaggcgccgctcctgctgcactacagnnnnnnnnnnnnnnnnnnnnnnnnnnnnnnnnnnnnnnnccgcagactgggcccttgcacccctgggtgctcccggccaccgcgcttaagaacgttgnnnnnnnnnnnnnnnnnnnnnnnnnnnnnnnntagagaatatttataacttttgtatgagagagannnnnnnnnnnnnnnnncactaccagcaccacgtttannnnnnnnnnnnnnnnnnnnnnnnnnnnnnnnnnnnnnngtcctctccccaannnnnnnnnnnnnnnnnnnnnntcgcaggcgagannnnnnnnnnnnnnnnnnnnggttctgagtcaccttctgacacgagctccctctgcttgctttccaggtcttgaaaatctgaattcacttcagtttagtttatgaattaggtttcatgataagcctcaaataatagttggacttttattgaatccttcctaagttattgaaaaaatgtcttcatggtgaatgacaatatttatgttacctttagcttcttgaagatttagaagttatatgaaaa

SEQ ID NO: 7752 - DNA, 712 bp, Macaca Fascicularis
aaaattggccaggcttggtgacgtgtgtctgtggtgccagccactcaagagactgaggtgggaagatcacttgagcctgggaggttgcagtgagctgagattgcatcactgaactccagcctgggtaacagagtgggactgtctcaaaaaacattatatgtatttacatatatatattatatatactatattacatatatttatatataaagctatgtgtatttacaaaaatatagctgatttatatatataaatagcctttagtggtacacttgagattataacatgcgttcttgacttaccgatgtctaatgtaaattagtattttttcctcttcccagacaatgctaaaagagtttattggatattttagttatttctatatttaaaactccacaagacacattgcagttgatgttcattttgatggcccacgtatatgccactatcattgcgttttatccttctgtgactttatagggtcatttcccttccacctgaagtacccccactattatttcctttagaggaggtctgttcatcatctcagttgtgtttgtctgaaaatacttgtatttaatttttattcttacaaaatattttttctgagtatggaattctaggttgtcagctagtttctttcaacacattaatgatgtaactccactgtcatatgcatccatattttctgctgtttttgaaataaatatga

SEQ ID NO: 7753 - DNA, 514 bp, Macaca Fascicularis
agtgtgaaatattgcaagaattaccaaaatgtgacacagagacataaagtgagacatgctattgcaatgatgtcaacagacttccttgatgcagggttgccacaaactcttcaatctgtaaaaaatgcactatctgagaagtataataaaataagatgtgactgtacttacttgctaatggacctattaccatactgacatcttacaaaaaaaattacaaggaaggagattatatccagggattctctttgttttcaaggcaaaggttaccaagttacaatggaccaaagtagctggaatgcaaaggagtataatccttgtctttgaaaaaagagcatttgtttcaatcatatggcatatcaaagtaatctttctcccttcctccctcctttccttgcttcatcttttcattttttttcttttttttttttgtttttgtggtcgcacaaatcacctattcagccattcattatccataaagaccattcattcttccttggtttccaagcatctg

SEQ ID NO: 7754 - DNA, 1822 bp, Macaca Fascicularis
ttcccaagaaaggatgacacttctgtggtgtgtagtgagtctctacttttacggaatcctgcaaagtgatgcctcagaacgctgcgatgactggggactagataccatgaggcaaatccaagtgtttgaagatgagccagctcgcatcaagtgtccgctctttgaacacttcttgaaatttaactacagcacagcccattcagctggccttactctgatctggtattggactaggcaggaccgggaccttgaggagccgattaacttccgcctccctgagaaccgcattagtaaggagaaagatgtgctgtggttccggcccactctcctcaatgacactggcaactatacctgcatgttaaggaacaccacatattgcagcaaagttgcatttcccttggaagttgttcaaaaagacagctgtttcaattcccccatgaaactcccagtgcataaattgtatatagaatatggcattcagaggatcacttgtccaaatgtagatggatattttccttccagtgtcaaaccgaccatcacttggtatatgggctgttataaaatacagaattttaataatgtaatacctgaaggtatgaacttgagtttcctcattgcctttatttcaaataatggaaattacacatgtgttgttacatatccagaaaatggacgtacgtttcatctcaccaggactctgactgtaaaggtagtaggctctccaaaaaatgcagtgccccctgtgatccattcacctaatgatcatgtggtgtatgagaaagaaccaggagaggagctactcatcccctgtacagtctattttagttttctgatggattctcgcaatgaggtttggtggaccattgatggaaaaaaacctgatgacatccctattgatgtcaccattaatgaaagtataagtcacagtagaacggaagatgaaacaagaactcagattttgagcatcaagaaagttacctctgaggatctcaagcgcagctatgtctgtcatgctagaagtgccaaaggcgaagttgccaaagcagccacggtgaagcagaaagtgccggctccaagatacacagtggaactggcttgtggttttggagccacagtcctgctagtggtaattctcattgttgtttaccatgtttactggctagagatggtccttttttaccgggctcattttggaacagatgaaaccattttagatgggaaagagtatgatatttatgtatcctatgcaaggaatgctgaagaagaagaatttgtattactgaccctccgtggagttttggagaatgaatttggatacaagctatgcatctttgaccgagacagtctgcctgggggaattgtcacagatgagaccttgagcttcattcagaaaagcagacgcctcctggttgttctaagccccaactacgtgctccagggaacccaagccctgctggagctcaaggctggcctagaaaatatggcctctcagggcaacatcaacgtcattttagtgcagtacaaagctgtgaaggaaacgaaggtgaaagagctgaagagggctaagacggtgctcacggtcattaaatggaaaggggaaaaatccaagtatccacagggcaggttctggaagcagctgcaggtggccatgccagtgaagaaaagtcccaggcggtctagcagtgatgagcagggcctctcgtattcatctctgaaaaatgtatgaaaggaataatgaaaagggtaaaagcaacaaggggtactccaggaagaaagagtccccccattcttccttcgcagtttatggtttcttaggcaaaaa

SEQ ID NO: 7755 - DNA, 2110 bp, Macaca Fascicularis
agaacaagcattgcattgcatcaggatgtctatgaaatggacttcagctcttctgctgatacagctgagctgttacttgagctttgggagttgtggaaaggtgctggtgtggcccacagaattcagccattggatgaatataaagacaattctggatgagcttgtccagagaggtcatgaggtgactgtactggcatattcaacttccattcttcctggtcccaacaacccatctgctcttaaatttgaaatttgtcctacatctttaactgaaactgagtttgaggatagcgtcacgcaactggttaagagatggtcagacattcgaaaagacacattttggccacattttttacaagtacaagaaatgatgtggacatatggtgacatgattagaaagttctgtaaagatgtggtttctaataagaaacttatgaagaaactacaggagtcaagatttgatgttgttcttgcggatgctatttccccctgtggtgagctgctggctgagctacttaaaataccctttgtgtacagcctccgcttctctcctggctacgcgattgaaaagcatggtggagggtttctgttccctccttcctatgtacctgttgttatgtcagaattaagtgatcaaatgactttcatggagagagtaaaaaatatgatctatatggtttattttgacttttggtttcaagtatgggatgtgaagaagtgggatcagttttacagtgaagttctaggaagacctactacattatttgagataatggcaaaagctgaaatatggcttattcgaaactactgggattttcaatttcctcatccactcttaccaaatgttgagttagttggaggactccactgcaaacctgccaaacccctacctaaggaaatggaagggtttgtccagagctctggagacaatggtgttgtggtgttttctctggggtccatggtcagtaacatgtcagaagaaagggccaacgtaattgcatcagcacttgccaagatcccacaaaaggttttgtggagatttgatgggaataaaccagataccttaggactcaatactcagctgtacaagtggctaccccagaatgatcttcttggtcatccaaaaaccagagcttttataactcatggtggagccaatgggatctacgaggcgatctaccatggaattcctatggtgggcgttccattgtttgcagatcagcttgataacattgctcacatgaaggccaagggagcaggtgttagtctggacttcgacacaatgtcgagtacagacttactcaatgcactgaagacagtaattaatgatcctttatataaagagaatgctatgaaattatcaagcattcatcatgatcaaccagtgaagcccctggatcgagcagtcttctggattgaatttgtcatgcgccataaaggagccaaacaccttcgggttgctgcctatgacctcacctggttccagtaccactctttggatgtgattgggttcctgttggcctgtgtggcaactgtgattttcatcatcacaaaatgtctgttttgtgtcttgaagtttgttagaacaggaaagaagggaaaaagagattaattacatctgaggctggaagctgggaaatctgataaatgagatttcttcagtttattacaatgagaataggttgtgatacaagattcctttcttcttgtgacaaaacatctttcaaaacttaccttttcaagtctaattttttttttttggatatttagtacctgtttaattgttagaaatatttcacttcaaggaggaaaacattaggggaagtaaaaatgttataaagccatatgagcttatattgaaatttattgagtttgtattgaaatttattgttctcattcacagtttatatgaaaaaaattattaagcttaactacatgtcaacattgtacgtggaaacaagaacattaagaagtgcactgagggtatcaatactattttgcatatactcggcatactttggattcatttcatgcaggattgtgttgttttaactgtctgtgaggaaactattaaataattagattgtaaaaaaaaaaaaaaaaaaaaaaa

SEQ ID NO: 7756 - DNA, 492 bp, Macaca Fascicularis
atgagaatttcgaaaccacatttgagaagtgtttccatccagtgctacttgtgtttacttctaaacagtcattttctaactgaagctggcattcatgtcttcattttgggctgtttcagtgcagggctccctaaaacagaagccaactgggtgaatgtaataagtgatttgaaaaaaattgaagatcttattcaatctatgcatattgatgctactttatatacagaaagtgatgttcaccccagttgcaaggtaacagcaatgaagtgctttctcttggagttgcaagttatttcacatgagtccggagatacagatattcatgatacagtagaaaatcttatcatcctagcaaacaacatcttgtcttctaatgggaatataacagaatctggatgcaaagaatgtgaggaactagaggaaaaaaatattaaagaatttttgcagagttttgtacatattgtccaaatgttcatcaacacttcttgattg

SEQ ID NO: 7757 - DNA, 3794 bp, Macaca Fascicularis
gggaaaggattcactctgtgaaagaatgtacacacagaagtcaagagctcttctgtggtggaatcccaattgttaaagttactgctgagtggcccttatttttcaaactagaactttgaatcatagtataaaatgttacagtttatgcaaactgtgaattcccagaggagacttacctggtcgctgctctctggaaaaccaaggctccccgtgcttcttccggttgcttcctactaaagaggacaacaggaaaaagcacctagaatatttttttgggggggcggggggcaaattaattaagggtatttgtaattgctgcttttttcaggggttatttccaacacacatacatgcacacaaacaaaatgttttaaaatgtgatttgtagcagtcaggaactaggcatatcatgcctttgtttaaaagtacaatcagaggtggtaagatgcctttggcttgtacagtgattcatcaagctctatcaacactggtaactaagacctacttatgccacataagagatgcattttttaagttactgcatgtttttattaaggccaccggttttcaaaataacaagtccttacaaagtatgattttataaatgatattctcgtaacactgcgctttgccagtagcacagagaatgtatgccaaatgcaagtccattccaaaatccatttggaaatcttgaactcagctgtggttcttacactttggcagtccatagggcctttttttttttcctccttccaattttgtgataaattcatgatgtttacagcacagataaaactttgtgccataatcctaatttagctgaaatcaatattaactgttggataaaaacttacttgcacatgttaataaaccaatgtgaggggaattacagttggccaatgacaaagttgcacactgcattatttgggaaacgagagggattgtcaaaaattattaagagaaaggtgaatatagaggactttgaaacagaacttttaaaatttaacataactgtatctagaggtcaattgagtttctacaggcagttcaggtcattttaaagcactccttatttatgaaatagaacttcagggtgtggataagtgaagagatataaaatcatgtgactcactaaggcgcatcactggaaacttaatagcacgtttcattaaggtctctgccattgctggagttccttcttggctcagaattggagttttggaatcttcccctcattttggtgagtataaacagcaataaagttagtaggttctcccatcctaaaagattttacctgaggatatcatcttaggaatatccatagactctcccatcaggtatctccccgaacccccatacacagacacacaccccccttctaatttagcagtaatctctggcagacctggaaaagcaagctgctcttaatagcataatgaaaccaaaggcgtaataactcatcatagttttccatcagaatcatcatttcacactctgcctacagctttgaaaacattttttcatatgtgaaaaattcccccaaaatatatccacttgtctcccaaaggaagcgtggtaattacactgataaaacatctctcatacaacaactgtggcaaaactgtgaaaataacggtgagaaagcagatgggctcaaaagcatggtccccaaaacaatgttctttaaaggtttttgtaacactggtctctgtctccaataacagtctagccgtcctactgttctgtaatatgcctttgcctttgtatggtttcatatctctttagtgatggtcaaccccacttgtttttaagttacaatttaggggaaaatatatatatatactgcttggtgtcctagctaaaaggtttaccagtattcatagtgatatgctgaagtggaggcaattaacttggcagttgtcagttgagaatgaaagtagcatgtctgaaaacagtctgatgctttataaaaccacgtagatgactttaaaactattgcatgaaaatacatcaaggttaattagctgttatacagtagatgcatggtttcaattctttggtgatatatctagtcaatcattgttttcacctgccaggaaaagagagcaaacagtctattggataggtgtaaagggtggggtatgcagtatcagattgattttaaggaagttttgtacatgttaatttttaattgtgcataagtttcatatgccaacataggctgtattcagttttaaaacaggcaaaatgacttgacactgataaatctgatatatttaactgtgtcccgtatgtatactgctttttgcctatgaccagtttgaacaagaattcaccgaactttcaaggtgccttttcaaaaggatcttgtaatcagttggtatgtacagacagttggcatgaaagtggtaggatataaatcggatgatgcctggctgctgaggtgcctgtgctctctggatcagctggtgcacttcttgtttcctgtaagaggtttgcttctttaaaatgactagtttgatgtatctggtaacatatagacctgactatacattttacattatttcactattttgtaaactgggattttagaaagcacgtttgccattttgttaaagtacattgccccttaaatttttggagtagtttttaaaagtttaaaatggtaatagaggagccagaaactttctaagcattgtaaaatgttttgaattgatattgactttgtttggaggagagtagaggcagggggttttaaagaaacaaagaaatgcattgtaaaaatgtagttttagagcagattaataatgatggtggggaaagtgttgctaatttgtttatttccctggaagaaatgggaagtgtgataagcagtttaatttttaaggagctggtctcaattttagtactttttaattatgcaaataaatcaatgtttccttaaattttgtcattgctttgtcacagttgtctagggttcatatccaaccttctgtggcaattcaattttatatagtcttttaagaggtaattgtaatgtatttctgacagtataaacaaaaagaatataaggcatagacgaattgtcctttaaaaatatcaatgatgtatcctggaatgtgaagatgtctctttagagttaaaaatcgaattattttaatattgtaccattgttagaccttgaatgagtccatgttaccgtgtgtgtctgtatatctgtagagaaagaaaaatgacaactgaaatgttactttttaaaatcggaataaattgggcactgcctgtgttgcgccactactgtatcttttcgaaagaattaactgtatttgcctattgtaaaagttaattctgatgacgctttcacattcaccagacttcttttcctctattatttgcatcctcaaatatttaatacaagtagattctgcatggcttgggcattcagagattaatagaatgatgactcaattttaattctaaagccatgaaaagttactttaagactgaacaattctgaattatttatgataccaaatgtccatgtttctttccctactgtaaaagaattgatcagtttcttcattaaagcagcaaaaacttattaaatcttgtaaataccatgtctcttttagatttctgtgtatgctgtgaatgaaatcattttgagatgaaattgtacaaaggcatttttaaaggctctgcatgcatcgtacctccaaacagtacatattcggaaagtcaaagattcctgcaaaataaataaactaaaagcaaacactaaaaaaaaaaaaaaa

SEQ ID NO: 7758 - DNA, 1673 bp, Macaca Fascicularis
acaatcctagcagacggcagtggcgagtcagcctgaagaaatctcaagcagagcttcagaaataacagcgcgaaatccctgaggatcctaaaggacctgcaggaggcatcggacctgcctagaccatgtggggatgagaaaactgaggcaaaagcagttgaaatgattttccaaaggtcctacacagagtgactggcagaactggaatccaacccaggagtccacactctccccaaatgcactgctcagcctcctctgagagatggaaaatgggataaattggaagatggatgcagctgcagcttaccaaaaagggagagcaaaaaaaactgagaaagagtacagacatactcagcccaagtaatgaggattaacccacaccaggacatagcaccataatgtgtcataacactgaggaaaagagatgcattcagaagcttccagtgaggaaaacaaagcagaccatatacacaggaccaggaataaaaatggctttacacgtaacagcaaccagaatattgatgacaatgaaccaacaccttcaaaatcctgaggattaagaatttccaatctaggcaccagtgttcaaacacaccatcagtagtgtttgttgcacacagacaatttcaaaggtaaaaatgtttcaaaatttaactcccatgaaccatttctcagaaagctacaagaggatgtgctctaggaaataaaggacatggacaaaaggaaaaaccaggacaagaaatgcaaacccaagcaaggcccaagaatcccctggttgatggcaaaagcaagtcccaagacagccactgactgccctgtggcctacaggctgtacagaacacgtggctggggaggcctcaggaaacttacaatcatggcagacggcaaacgggaaggaggcacaacttacatggccagaggaggaaaaagagaaagacaagctaagccctgggattctatttgaaatcaccccctaaacaagaacagactgagaaacttcctacactccctctggaaaacaaaaaagaaatctgagagaatccagagggcaggaatcatttttctcttttctcctcaaaaccagcatctgattggctgaccaacaaaacatgtctcaagaaacggaagctgggtaaagtgaagacaaactaaatgtcccaagggcttagctttttagaggcaccatatatatgcgaggagactcgtctaagtcccagggcctccacttgctccctggagagactgcactccatacctctcaggttgttctctgtgaggaaataaccccgaggctgatacacactacgcactccggcagacatagccatgatgagtatcttgggccatccccagatagtactgaagcccagaaccaggaaaagacaggagggggctgaggacacatcaacttgtaaagtttctaaagagaaacctcaacccaaagacattctgataagaagtttgtgcctacggaaaataaaaggaagagaggcacagagattttttagagcagtatcaggggattgttctctgctttcctatgaaatgtttacagacagagaacaaatatcttataaagtgccatccaatgctttgtgaaaaaataattacaatagtgtgtctgaaatgtacaataaaggactaatagttgaaaaaaaaaaaaaaaaaaaaaa

SEQ ID NO: 7759 - DNA, 726 bp, Macaca Fascicularis
  misc_feature (1)...(726): n = A,T,C or G
cagttgtnnnnattccagaggactctttagtcatatgcagcaacatgacattttagataccctgtgnnnnnnnnnnnnnnnnnnnnnccatgtggtcacaaggatatctggcaaaggaaaccaagctgcttcttgacattnnnnnnnnnnnnnnnnnnnnnnngtccctcacccccatgctgtttgtataagttttgcttatttgtttttgtgcttcagtttgtctagtgctctctgcttgaatggcaagatagatttataggctnnnnnnnnnnnnnnncagaactccagatgaaaaaaacttgcatcttcagtatacttcctaaagggcaatcagataatggatatgttttatgtaattnnnnnnnnnnnnnnntggctttcatttaatatgnnnnnnnnnnnnnnnnnnggatccnnnnnnnnnnnnnnnnnnntttaaacttacagcatttttactgtgtataatatggtgtcctctgtgccagttttgtaccttatagaggcagattgcctccgatcgctgtggttcttattatcaaaattaagtttacttgtatacggaacaaccacaagaaatttgattctgtaaagaatcctctttagctgtggcctnnnnnnnnntaaatggtgctttatttaacagaatacctgtggaggaaataaagcacacttgatgtaaaaataattgttttatttttattgacacgactgattgctattctg

SEQ ID NO: 7760 - DNA, 1642 bp, Macaca Fascicularis
atgagatgctgaccctggagccactgcacacgctgctgcggatgaagtggaagaaatttgccaagtacatgttctttctgtccttctgcttttatttcttctacaacatcaccctgaccctcgtctcgtactaccgcccccgggaggaggaggccctcccgcaccccttggccctgacgcacaagatggggtggctgcagctcctcgggaggatgttcgtactcatctgggccacgtgcatctccgtgaaagagggcattgccatcttcctgctgagaccctcggatctgcagtccatcctctcggatgcctggtttcactttgtcttccctggcctcactgattgagaagtgtcccaaagacaacaatgactgcagctcctacggcagcttcagcgacgcggtgctggaactcttcaagctcaccatcggcctgggtgacctgaacatccagcagaactccaagtatcccattctctttctgttcctgctcatcacctacgtcatcctcaccttcgttctgctcctcaacatgctcattgccctgatgggcgagactgtggagaatgtctccaaggagagcgagcgtatctggcgcctgcagagagccaggaccatcttggagtttgagaaaatgttaccagaatggctgaggagcagattccggatgggagagctgtgccgagtggccgaggaagatttccgactgtgtttgcggatcaatgaggtgaagtggactgaatggaagacgcacgtctccttccttaacgaagacccggggcctgtaagacgaacagcagatttcaacaaaatccaagatttttccaggaacaacagcaaaaccactctcaatgcctttgaagaaatagaggatttcccggaaacgtcggtgtagaagcgggaccggcgccggcgtgcgcgtgcgctgtgtggcgctgcaggcggagtcacggcctctgcggagaggctttgagggatgatggagtttggctctgctggtgtagcagcagagtgcaccctcatgctcagtgctcagtgggtgtctgaactgaggggcagttgtcagtttgtctgagtgggaaacatcctggattttgttcctgggcagagagttggtgtaaacctacagccagcagcagtctggagcctgggagcctcctgaagtcctgggggaagcctctggttttaccagttgcaggtgggcttggctgggagagatgggtggcagggaaggggcaggagccttgaggagcagggagaggcgcctttcctcctgccagctttcccctgacagccccagccccagcccacacgttgtaccgtctctcctgctgtgactgggttgcctgaatttggggagacccttgatcccatcccagagtgtgcaggggacggagttaagccggatatcctgggggaggaagggaatgagctcgggaaacatccctccggaacccttcagggaaaaagagaccatccttggagtgaacgtcccctgacgccccaaggttcacactgcctcaagctgagacaggtttttagtagcataagtaatacagggtttaaattttcaatatggaaaagacatttcagttaagaatgaaaattactacaatgaaaaaaaaaaaaaaaaaaaaaaaaaa

SEQ ID NO: 7761 - DNA, 782 bp, Macaca Fascicularis
  misc_feature (1)...(782): n = A,T,C or G
cagccactgtgtgnnnnnctacaagaaggttgtggctgggttagctgagacagggcaggaggaaggcaggataataagaaaagccacattttaggaccttaggaaaaataaccagacctttttatgctcctcttgcaatgaaaaaagtgtagaatttatcttcttgggacctgggttggggcagtctcaaggttcacatccatgtgtcagnnnnnnnnnnnngcttctcagcctcaactacatgtttgagccacctgggaagctaagactgcacgattccagtggcagccaagcatgggaatgatggtcagagtgtggtgtggtgactgtcacgtgttctacactagggtgaactacatttcccagaattccctgtcctgtgggtttctaattggcatggaccccaaaataaattcttgggagattccaaggatggaagggcagcagcactttccaacacgtacgttgtcactcatttgccagccgggcctgcaactgctccaccttctggatccttcttcaacttctctgactcctgggccatatgtgtgcatttagctccatggtgaagagctgcagcttctgcaggacatttgtaccatcgaggtcaaaggcaacaagaagtgacatgagtttcagtccatcttcatgtggttccagttaaggcctgtgagttcctgattgttctccccaactgcctgtcctgtgaacctcacacactcacgtcagatgcaaaaacaaccnnnnnnnnnnnnnnnnnnnnnnnnnnnttactatcgcaa

SEQ ID NO: 7762 - DNA, 739 bp, Macaca Fascicularis
  misc_feature (1)...(739): n = A,T,C or G
acggccccgannnnnnngcatgcagtgccaccgtgagcnnncaggtgcaggaggtgcagggcgtcactggccacgggccttggagagactnnnnnnnnnnnnnnnntgggagaannnnnnnnnnnnnnnnagaagctgtgcgaatgactctgccgtcatgcaggtttgaatttagagaatgtgcagggcccgggatcctccgaaccatgtaactgatgtgaacagaacaagctcccccgtggcagcgggaggcacaggatagaggaaaatatgaagcctnnnnnnnnnnnnncgtcctcacctaacagagggtcacctggctccccacctgcaaagtcattttgannnnnnnnnnnnnnnnnnnnnnnnnnnnnnnnnnnnnnnnnnnnnnnnnnnnnnnnnnnnnnnnnnnnnnnnnnnnnnnnnnnnnnnnnnnnnnnnnnnnaatttaaagacatgaaacataggactgagaacagaaaaagaatgagacatacttagggtaaattnnnnnnnnnnnnnnnnnnnnnnnnnnnnnnnnnnnnnnnnnnnnnnnnnnnnnnnnnnnnnnnnnnnnnnnnnnnnnnnnnnnnnnnnnnnnnnnnnnnnnnnnnnnnnnnnnnnnnnnnnnnnnnnnnnnnnnnnnnnnnnnnnnnnnnnnnnnnnnnnnnnnnnnnnnnnnnnnnnnnnnnnnnnnnnnnnnnnnnnnnnnnnnnnnnnnnnnnnnnnnnaccactgt

SEQ ID NO: 7763 - DNA, 862 bp, Macaca Fascicularis
ctccttcaccccactctctgcctcctgcttcctcttctgccccagcaccccccatgaggtttccttattcatcctctagtagtagctctgcagcagcctcctcttccagttcttcctcctcttcctctgcctccccctacccagcttcccaggcattgcccagttacccccactctttccctcccccaacaagcctctctgtctccaatcagccccccaagtatactcagccttctctcccatcccaggctgtgtggagccagggtcccccaccacctcctccctatggccgcctcttagccaacagcaatgcccatccaggccccttcccgccatctactggggcccagtccactgcccacccaccagcctcaacacatcaccatcaccaccagcaacagcagcagcagcagcagcagcagcagcatcacggaagctctgggccccctcctggagcatttccccaccccctggagggcggcagctcccaccacgcacacccttatgccatgtctccctccctggggtctctgaggccctacccaccagggccaacacacctgcccccacctcacagccaggtgtcctacagccaagcaggccccaatggccctccagtctcttcctcttccaactcttcctcttccacttctcaagcgtccttcccatgttcacacccctccccttcccagggacctcaggggacgccctaccctttcccaccggtgcctacggtcaccacttcttcggctaccctttccacggtcattgccaccgtggcttcctcgccagcaggctacaaaacggcctccccacctgggcccccaccgtacggaaagagagccccatccccgggggccta

SEQ ID NO: 7764 - DNA, 651 bp, Macaca Fascicularis
gaaaataataaataatatattaaaaatttgctttctgacaaactcagataatggaccagtcttaaatattgttatgtcataaagcaaaattaaggcagtaatatgggctgcttaaatctgactagaagatgaaagcttttattgtaagtgtaacacagagatactatcaggagtgaaatcagtccataaatattgatttagaattttattctttatttcttttttgttgtgtttcttttagctacagtttcattttggttgtacaggatataaaccatatttgttttctgtacacaagattctcaagtgaattttgcatgcattatacattaggacacatttataaattaatgagtaactatataaatttatgtgtattaaaatgtctgtagcttcagtctaaactctactgctttttctgaatctccagatatcatttctgtatggtttctgactggcctgctgcctgagtttcagaaaacaagggaggcattatttttatgggaagaggaactaagatggtactgaagatgtctgactaaaacactaccctaggaagctgtcttgtaggaaaaagaataaaacacacagaccagaagaaactgtcaagaatcaaacagccatccaaaaatagtcatgagaaatctaaag

SEQ ID NO: 7765 - DNA, 668 bp, Macaca Fascicularis
tccaagctgcctcacttagcgggttctgtcacccacaccctggcccccaggcaacagcggctgcacagcccttgcagggaggagacgggagagaaaagccggcctagcagctgggatgggagggccacagctccagtggtggcgggggaagctgtagcccctggaaccccacactgggaagagctggcctctaggaggcaccatgggggagtcacatgacttgctggggattgacttgcgatgtggacggtgttcctggagtcccttgtggccactccaccaccgggaggccgggaggcctcttggcctttgagcctctctccacaggtgagtggagtcccccaaagagggctgggggcttgctgtccaggtggggctgggtgggcactttgggcctcggagaacatcagtggtccgttccctcccgcacgtcggcggcaagtggcagcaggttcataatctccagtagcgaggccacttcaggtccagccctggacatctgaggaggaggtgggcagtccctgctccttcactaaccgcggaggatgccaggcccgtggccccctgctctgcccggagctcatgcgggcagccacggacacaggtggcacccagcgcccagcggcctgtgaatcctcctgtgggcaaggctgggagccaggggctgg

SEQ ID NO: 7766 - DNA, 1808 bp, Macaca Fascicularis
  misc_feature (1)...(1808): n = A,T,C or G
tagattgttggcaggtacacttaactactgccagcatcactcaaaccagccaactctttcatctttagtaaatactttgtcaaataagagatcagtctctttaaattttagataatgaatagaattcgtttagacgttagtttacagtgcagttaaaataggctatcttagattatctttgttcttctatttggtttagattaaaagtgctaaaggaatgctgaagagggtggaacaagagcataaacatttttgagagggtagaacagagagcataaacatttttggagttctaaatctaagtaaaattatttcagaaatgaaaatattttgtattatttctgaggaaaatcaacttttttgggggtactttttctacagcactgtttagctgtttttggcaaatgaaaaaggatccaggtaatggggtagagacagagatttcctatttgaagttgaggcaatgaataactccttgccccactccagtctccttaagaaataagcttttcttcattgataagataaagttagttttatactgtttatttaaaacaccaccaccaccaccatctcaactcttcccccaaattagctttgcgtctgaactctactttagtcaatgattcctttatatttttatatctcttaggcttgaaaactaggagtcatccttgattttttttttcccgcttatctacaatcatcaaattttctggagctgactccttaggacttgctttaagttttacgttttataacaaacatgataatgttagtggtttctttcagctttaaaatattatgacctttaagatctaaaattaaatgttgaaatgtaaaatttaaaggcttattgaaagaatgttaataacttgtttaaaaagtcttggttttagattagattctcctaactaaaaggatcctaaaaattaagggtaagatatttagaactttgtactaagtgtaaagtcttagtattacacataaatcattgggtatttattaatattatttaaatgtctgatactgagctttgcatcttatggagaaaaatctttgaattccagttgacgcaagaagaaatttattgttatatcttaaccagcatgtaggcaactgggacccttcagatactaacactaaaagaacttaatcccaaaataaataaaaattttgaattaacattctttttagtccnnnnnnnnnnnnnnnnnnnnnnnnnnnnnnnnnnnnnnnnnnnnnnnnnnnnnnnnnnnnnnnnnnnnnnnnnnnnnnnnnnnnnnnnnnnnnnnnnnnnnnnnnnnnnnnnnnnnnnnnnnnnnnnnnnnnnnnnnnnnnnnnnnnnnnncagacacctgtggttccagctactcgtgaagctgaagtggaaggatctgagccctgggaggttgagagtacagtaagcagtgattacaccactgcacttcatcctgggcagaactagaccctatctcggggaaaaaaaaaaaaaaaattctggccagtcagggtagctcacactnnnnnnnnnnnnnnnnnnnnnnnnnnnnnnnnnnnnnnnnnnnnnnnnnnnnnnnnnnnnnnnnnnnnnnnnnnnnnnnnnnnnnnnnnnnnnnnnnnnnnnnnnnnnnnnnnnnnnnnnnnnnnnnnnnnnnnnnnnnnnnnnnnnnnnnnnnnnnnnnnnnnnnnnnnnnnnnnnnnnnnnnnnnnnnnnnnnnnnnnnnnnnnnnnnnnnnnnnnnnnnnnnnnnnnctgggtaacgagcgaaactccatctcaaaaaaaaaaaaaaaaaaaaaaaaaaa

SEQ ID NO: 7767 - DNA, 882 bp, Macaca Fascicularis
  misc_feature (1)...(882): n = A,T,C or G
atggagtgagagaacaagnnagccgctagaagccctctatgggtatgactactttnnnnnnnnnnnnnnnnnnnnnntggatggcataagacagtttaaacatctcccagatggtaacatctgccggcacctgctgccccaggtccagtgccccaccttgattgtgcacggtgagaaggatcctctggtcccgcggtttcatgccaacttcattcatgagcacgtgaaaggctcacgnnnnnnnnnnnnnnnagaaggnnnnnnnnnnnnnnnnnnnnnttttgcaaatgaattcaacaggttagcagaaggcttcctgcagtgagagtgcgcactagagtctcggtggctccttcgcgtggnnnnnnnnnnnnnnnnnnccnnnnnnnnnnnnnnnnnnnnnnnnnnnnnnnnnnnnnnnnntctacccctcccttcaatcttatcctgaccagatgagaacaatgacatactgaaaccagcctctagcttcagactgggcacgnnnnnnnnnnnnnnnnnnnnnnnnnnnnnnnnnnnnnnnnnnnnnnnnnnnnnnnnnnnnnnnnnnnnnnnnnnnnnnnnnnnnnnntagggagactctggctctacaaaaaaaaaagttttttagaattagccaggcgaagtggcacacacctgtggtcccagctgctccggaagctgaggcggaggatcacttgagccaattcaaagctgcaatnnnnnnnnnnnnnnnnnnnncactccaacctgggcaannnnnnnnnnncttgtctttaaaaaaaaaaaaaaaggaataaagcctctaacttcaatagctatgaaaattaaatctcatatctatgaaaattaaatcgtgataggttataacattaacttatg

SEQ ID NO: 7768 - DNA, 744 bp, Macaca Fascicularis
  misc_feature (1)...(744): n = A,T,C or G
tnnntcatcacattctatatttctattgacattttgtagacccatctgtttctnnnnnnnnnnnnnnnnnnaggcaggttggtcccagccatttttgcatccccaatgcctagcacatgattggctggccaaatgccagttactctgggcagttctgttcccttctcgtctcnnnnnnnnnnnnnnntgaacaggttctgctaaccacggtctcctaaatatttctttgtactgttggggctcagaaagcgataccccaaagactggcgctttgacatggtgagaggccttcaaagctgcctcagaatcaaggtccctctaaccttctctcccaagtatagggaggcactctctctagaatgtcctaatctaatcaagaaaacttctttccaaaagaaacaaaattgccttcctcccctccgcgaaatctcatctatctcagaaaagaagactgaggaaggcaactacgcctggatggatttttcacaagatgatgcctgcttctcgggctcattcaaattctaaagagaatcattttcaagttaatttctgtccattttttcgccctaagaatcacgtgcttccctcaaaagaattgtctatattctccatctctccccttcccctttgaaaaagggtgtataagcttctgtaccccattgggttattgggtaatcattctcctgtgacccttcccttcccgccgcctcacccccaccccgtgctatgccacgtaaaaaaaat

SEQ ID NO: 7769 - DNA, 694 bp, Macaca Fascicularis
tcacacggcagaaaagcagaagagagcaagaacccactcctgcaagcccttttgataagggcattagtctagtcatgtggaccaagccctcaggaacatctctccttaggtctcacctctcaatactgttgcattggagattaagcttccaatccatgaatcgggaggagacaaaaacattcaaaccatagcagaaaaatagagactgaaaagatacagatctaagcgatgttttgtttctagaactggattttggaattcaaagatttggaataaattcctcacaaaaggaagctgtgtattttggaagattgaagaaccagtaaacaattagaagccagaatacatacccagtccttcatccttggaaggaaggatatatcccttgtgcaaagaccaaccagcatcagaccctcacccagtgtggagagcaaaataagaaggcaaggagacagttggatttggccattccacaatgtatacatattttaaaacatgttgtacatgataaatatatgtgatttttatttgtcagtttaaaaaggaaagggaaggggtgggggatgaggaggggtggagggcgctggaacacatgtaacaactagggctagggtcacctgcgctttaacatcccctgagtttgccttgagcctccaggccatggactttggaacatggctgtgagtccctaatc

SEQ ID NO: 7770 - DNA, 730 bp, Macaca Fascicularis
  misc_feature (1)...(730): n = A,T,C or G
gagagcttgcatccagcctcaccagcacgannngagggctctccctatggagagatggttgaattccattgaaccaggataagggcaannnnnagccacacaatcattcttgaaattatctcatgatttgaactttggattatccaagttttaggtgttcggggaccctcttctcatctttcttatgggcataaaaggtcactgtgaacccacatgtggcaaaatctatatcctgggttttttgttgtagttgttgttgttgtttttgaggcagagtctgtcacccaggctggagtacagtggcacaatctcagctcactgaaacctctgcctcttgggttcaagcgattctcctgcctgagcctcccaggtagccgagattacaggcgcctgccgccacacctggctaatttttgtattttcagtggagatggggtttcatcatgctggtcaggctggtctcaaatttctggcttcaagtgatccacccgccttggcctctcaaactgttgggattacgggtgtgagtcactatacccggcttgtttttattatactgcctacagaataaatacagagctgggaattggtggatttggactgcgatacaccactgtgaggtttggaattatcttctgaaagtgtatgttgttttcatttgctcttatgtcagaacattctgtgactgaacttcccttagtttaattttgtatattaaaactgaagagga

SEQ ID NO: 7771 - DNA, 623 bp, Macaca Fascicularis
  misc_feature (1)...(623): n = A,T,C or G
atcatttanntcaaagaatgctgaaanannnnnnnnatattttgggccagatgnnnnnnnnnnnngatgggtgcagatccnnnnnnnnnnnnnnntctgagaaagcctctgcnnnnnnnnnnnnnnnnnnnnnnnnnnnnnnnaatgggaagccagaacccacttctattagttgatagtttggggaaccattttactttggtggatttaaatttctcattcttcaaagaaatatttctgatcatctctcacaaaacacaggcaacccagactatcttgtttttcttctggattgagtattatagtcaaaagtaaagccaaattttgaggacatggaccaatacttcttaagagttgtgggtttcttcccactcagggcaaggaagagagataatccctatcaaagcttnnnnnnnnnnttggtactatacctaaaaggaaagtgacatctttgtaatgggatttccaaagtcatggatagaaatccacttaagtagctaggtgggagctgtctttgtgagtagtgtcttttagatactgatggccctaatatctggttatctctatctaaagacctgcagtttaacttttcttcacctctacttnnnnnnnnnnnnnnnaac

SEQ ID NO: 7772 - DNA, 2896 bp, Macaca Fascicularis
ttcgagcgagcggggaaagtagctcagaagagagcaaatgtgagactgacgtatatcccaggctaggcctcatatggagcgtcttaactccatgcgcggggaaggagaggacctggccactaggccagggcggggggtcctttttgtctgactctgctgccccgaacttcactagttttatgccccagttatttggttagtaaggcttttacggtcacaggtctcccccagccctttgctttcatatattgacctaaatcccaagtcttttgttaatatcatggaacggaattattccgtgttttctcaggaaaacacccagagttggaactttgatttatttcattagcggagtggtgccactggggagaacgaacccaggtttggttaaaggatagcgtcagggacatcatggacaggaccaggactaaggccaatctggacccactgctgtcacttcttccatttccctccctgagttggacagttggattcacagattatggctgtgaattccgcaagttactcaaggtggtgttgctttgcagacagctggcagagagagaagttggctagcatggaatcaccagaggagcctggagcatccatggatgagaactactttgtgaactatactttcaaagatcggtcacactcaggccgtgtggctcaaggcaccatgaaactgtgtctagaggaggagctctttgctgatgtcaccatttcggtggaaggccgggagtttcagctccatcggctggtcctctcagctcagagctgcttcttccgatccatgttcacttctaacctgaaggaggcccacaaccgggtgattgtgctgcaggatgtcagtgagtctgttttccagctcctggttgattatatctaccatgggactgtgaaacttcgagctgaggagttgcaggaaatttatgaggtgtcagacatgtatcagttgacatctctctttgaggaatgctctcggtttttggcccgcacagtgcaagtgggaaactgccttcaggtgatgtggctggcagatcggcacagtgatcctgagctctatactgctgccaaacactgtgccaagacccacctggcccagctgcagaatacagaggaatttctccacttgcctcaccacctactcacagatatcatctcggatggagttccatgttctcagaacccaacagaggcaatagaagcctggattaactttaataaagaggaaagagaggcttttgcagagtcactcaggacaagcttgaaggaaattggggagaatgtgcacatttacctgattgggaaagagtcatctcgtacccactcgttggctgtgtccttgcactgtgcagaagatgactccatcagtgtaagtggccaaaacagcttgtgccaccagatcactgcggcctgcaagcatggtggagacttgtatgtggtgggagggtccatcccacggcgcatgtggaagtgcaacaatgccaccgttgactgggagtggtgtgctcctttgcctcgggaccggctccggcacaccctggtgtctgtgcccgggaaagatgccatatattcactgggtggcaagacactgcaagataccctctccaatgcagtcatttattatcgcgtaggtgataatgtgtggacagagacaacccagctagaggtggctgtgtcaggggctgctggtgccaacctcaacgggatcatctacttactggggggggaggagaatgatctggacttctttaccaaaccttcccgactcatccagtgctttgacacagagacagacaaatgccatgtgaagccctatgtgctgccctttgcaggccacatgcacgcagctgtgcataaagatctggtgttcatcgtggctgaaggggactccctggtatgttacaatcccttgctagacagcttcacccggctttgccttcctgaggcctggagctctgccccatccctctggaagattgccagccgtaatgggagcatctatgtcttccgggaccgatataaaaagggggatgccaacacctacaagcttgaccctgccacttcagccgtaactgtcacaagaggtattaaggtgctgcttaccaatttgcagtttgtgttggcctaaggctgtggggaggggaggagagctgctcactccttttccctccccatccaaactcaaagtcccccgggccccaattcagagtaatgtattttttggcacatactagaaaggcagtgcctcagcccttccctgaacccatggaggtgttctgtttggggcttcttagactgctgctgctcagctggttgcttgaactgacagtaggccagcctgttctctgccatcccctagtcattgtgtgcctcaccacagcttgctttagagcaagctgtttctcagaccttaggcacagcctctcctctttacctgatcaatgttaaatataagcacccctgatcccaggacataaggaaagatgcccaattgtacttttgttctataacctatgaaatggctagttgatcatttttccacaaagaattaggtgttaagagttttccttcgggctttacttaggagtatggactaagctgaaggtgtacttcaccagcaagagtcaactctagaattcaggacgttccttctattgttttctcatccatctgtcaggaaatgtaactttggttttatttttggcttattccaaggggtaagccagaaaatagaaatgattatttctgattaatagcagaaactttttcaaactcaaatatgtaaggtgtctgctcttttaaaagctctaagctaagtcaagagctaggaagtgttgatacaaataaaagtttttgaagggaaaaaaaaaaaaaaaaaaaaaaaaaaaaa

SEQ ID NO: 7773 - DNA, 718 bp, Macaca Fascicularis
  misc_feature (1)...(718): n = A,T,C or G
aggagtaattatttcctggcttagagaaactgaaaggtgttaggaatagtatagtttggcttttattgtttaaannnnnnnnnnnnnnnnntggtnnnnnannnnnnaggttcatgaacngatacgannngaatggcaaaagtcattttaaaccatttttaaagctattaaagaatcagaaaaggttagcttttttttcctttctgaaggaaagctaaatgatgggttttgtatgcttttatattattcattcatattttaatatatataacattaatttgcatttataccattttctttacaaagtgctttaatgtaaactcatgtaccaatgttgactaactcttagtctattaagtttaatgttaatttcatgactaactgatctaccaagtaaccctaatagatgacttttctgggtattttccccattttacactagagagtattgaaacttaaaaaggacgcatgatttatccagtgatccaaagtgtgtatttcataaannnnnnnnnnnnnnnnnnnnattgtttagtcatacgttactttccacagtatctcaaatgcccttcatgtaaatcccatactatcaaaaattggtgataacctaaaannnnnnnnnnnnnnnnnnnnnnnnntttattttcttagagttgatttatttgatggatttttagacttttattcaagatcttttgtttgttttgactttgcttgg

SEQ ID NO: 7774 - DNA, 720 bp, Macaca Fascicularis
  misc_feature (1)...(720): n = A,T,C or G
aaatcatgannngataaataacaannnnnnnnnnnnnnnnnnnnnnnnnnnnnnnnnnnnnnnacccaataagctattcatcttaataaaaccttgtttagtaatgtatatgcataatttagaagttgaaggctgaaaattgttgtgtacttctccatatatatataactttcatcggggtcccttgagttaagaaatgccttctattttataggtaatctcannnnnnnnnnnnnnnnnnttgtgtttggttcaatatgctaagaagatagacaaataataataattttgtgagtcttcatgtgcagaatgacaaactgagcaattttctgtataattctggattcttaaaaccttttttcccataattgtttgaatgcannnnnnnnnnnnnnnnnnntaagcctctacttcccccggaatgtgtagaactgtcattttgcttgcaaaggggctatgtgtttgtggctggcagcccagatggagcaccctgggtgttggggattgagannnnnnnnnnnnnnnnnnnnnnnnnnnnnnnnnnnnnnnnnnnnnnnnnnnnngccacagatcagttggtactaagcatcaaaatgactcattatgcccnnnnnnnnnnnnnnnnnnnnnnnnnnnnnnnnnnnnnnnnnnnnnnnnnnnnatgtcattattgtattatatattgtcgtgttatgcagtatttctgnaaatttattttta

SEQ ID NO: 7775 - DNA, 1438 bp, Macaca Fascicularis
tcaagaaagaaaatctgattggctgagcttgcctctacctgagctatagattcatcaaaagtctaatcaaggtccattgttgtaccaagaaaaaggactttcctctacagtctgagtgagatgagagctttgattgtggttgaggggcagggcatgaggtaatagagataagttattaacatgatatgaaatctagaacatgagtgtgaaggcagcatagaggaggagttaagcatttttgctctaaagtcagactgcatgacattagaatcacagctccacatacggaactcaatcttcctagacctaggaaatgggcatacaaagaggaccttctttataagctagttgtgagaattaaataagataatttatgttccagtcaccaaataattattcaatacgtattaaaaacacacaagatgaaagattaccttttacagagaggtctaaggaaagcaagaaaaattgaaggcacaaacaatctgaaatggagaagcaagaaactcatatattttctgaacaaaggtcttcagccttcctggcaaagtagattctgccaatgtattagatctctagtgatcttagtctgatatgaccataattccaatacagaaacagtaaggataaacctcaatggtacgacatacagcagagagactctggttggcatctttaaatatttatatattgtgtagaataataatagaaatacagaaaacagccataatgatagtgaacatttattggaggttccctacacgctggggcctgccttaagtgctttttatgtattaagccatttagtacttatatcaagcccataaattcttattatcaacattttaggaacaaaggaactgaggcatagtgaattcaaataacttggctgagtagccaagctagcaagtagctaaggtagggctcaaagcctgatctcctggaatggataatgcattacattgtctcactaagagaaacatccaatggtagccctcagactttttttaaaaataaatatattgacagtgggtgaaacaaatgaaataacttgaagaagaaacaaactgcaaaaaagtttatttattaacaatgtaataataaatatgtaattttttttttaaaccctaactctagggggagaaaaagcattctttttcaactgattacaaaaacaatcctggaaagtaaaagaaatagttgttcaaaatgatcgtatctgaaatcttggtgtaagctgtttccttcatctgtttcctccactaaaaaaaaaaaaaagagagagagaaagaaaggaaaaagaggtttagactaaacagagtcagagttgcagtgacctaacaggaagttgggctattcccaactgccagtgatctctgaagcgactctcaggctccctctttgctctaacagacagcagagacttcaggctggataa

SEQ ID NO: 7776 - DNA, 722 bp, Macaca Fascicularis
cttatgttgttagtagattcagtgcacccagctgggataggcaagccgtattatgacagcttccctgtttcacctacataagtcgtcttgtctgagggctttattcacagtaagcaccaaggtctccatgtcttgaggtcagtttcattcttttgaaaagtgcatgcttcatttgaacaatcagcagcagatggactttcagtgatttaaaataaaattttgatccaaagctcaggacacaaaaaccacagtggtaaaattgagtagcatataatatcatcagactaaattatctgtaattttccacaacccagattgtatgtgttttatgtgtgtttaaataaatatattagatacacatgtgtatacatacacacatacacaacagatccaagcctggctgacttcatttgaaatggttgaatctgcagtgtaataaagtggttcaaccaggattaggaactgaaatttagtagaagagagaaaaggagttaatgtaacaaattcttttagctacaaaccctggtaatagagcacttgggggatgggatggggtgggttggtgagacaatcagattggtaaattgattaaatgctcctaaccctgtaattttgtgcatagagcaccctgtgctgtggaaataactgttcttagatttcattgtaactggactgttcaggttgcccagagggaaagaacattcctaattctaataaaataa

SEQ ID NO: 7777 - DNA, 767 bp, Macaca Fascicularis
  misc_feature (1)...(767): n = A,T,C or G
gatcatcatcaacatgnnnncnctgaatttattcagtagttggattgctctttggttagaccaagaaaaaggaaatcccccccttttcatgtattccttggtttgaggacatgtctcctgtaagggagaggaaagggagatgattnnnnnnnnnnnnnnnnnnnnnnnnnnnnnnnnnnnnnnnnnnnnnnaaccttatggcaactcacacacacattcctcttttctgttgctgccgaaggttcgggtttagtacacttcagttccactcaagcattgaaaaggttctcatggagtctggggcgtgcccagtgaaaaaatggggactttttaattgtccacagacctctctatacctgctttgcaaaaattacaatggagtaactatttttaaagcttatttttcaattcataaaaaaaagacatttattttcagtcaaatggatgatgtctccctcttttcccctattctcaatgttcgctggaatcttttagtattttttaattctccccatacccacttcctgatcctttggttctctttcctgctcaggtcccttcatttgtacttcggagtttttctcatgtaaatttgtataacagaaaatattgttcagtttggatagaaagcatggagaataaaaaaagatagctgaaattcagattgaagaaatttatttctgtgtaaagttatttaaaaactctgtattatataaaaggcaaaaaaagttctatgtacttgatgtgaatatgcgaatcctgctata

SEQ ID NO: 7778 - DNA, 763 bp, Macaca Fascicularis
  misc_feature (1)...(763): n = A,T,C or G
gaaggtgttgccaggggcccnnnnnnnnnnnnnnnnnnnnagtacannnnnngacccggaatcagtccctgatgagctcatggagcttgagatcttcttagcccagagagcagtggagttgagtgaggannnnnnnnnnnnnnnnnngagccnnnnnnnnntggctccggcnntcctgcagggccagaccaaagagaagatggnnnnnnnnnnnnnnnnnnnnnnnnnnnnnnnnnnnnnnnnnnnnnnnnnnnnnnnnnnnnnnnnnnnnnnnnnnnnnnnnnnnnnnnnnnnnnnnnnnnnnnnnactgaattcnnnnnnnnnnnnnnnnnnnnnnnnnnnnnnnnnnnnnnnnnnnnnnnnnnnnnnnnnnnnnnnnnnnnnnnnnnnnnnnnnnnnnnnnnnnnnnnggagcccaagctggacctgctgctggagaagagcaaggagctgcagaagctnnnngaagttnnnnnnnnnnnnnnnnnnnnnnngcgccctgtgaacctgatgggaacctctctgtgacaccctccgtgttcttgcctgcccatcttctcagcctttgggcnnnnnnnnnnnnnnngggctgatgttttgaggcccttcaaggcaaaagatcaggccgactggaagatggaaagccacaggaaggaagcagtacctgatggtgatcttggcattcttcatgttctctacaagaagctgtggtgattggccctgtggcctgtcaggcaaaaacacagcnnntccttctagtta

SEQ ID NO: 7779 - DNA, 733 bp, Macaca Fascicularis
  misc_feature (1)...(733): n = A,T,C or G
ttttttttttnnngggggtgcagtataccaaagtagccagccagccagtcactgggctgtcagttcaaaatgtctcatacttcagagtgaggaggtgtttcagttcctctgacagaacctggcatgcaggagacacagagttgttcctatgagaaaaccagtgcccagagtgtgagctgcccaagcccagtgactcttccacttccagtctaatgcttcatagggcaccttgaggcgtgctgcccggtgtggcttagactaaatgttgtttgttgttgttgttttttttttttgagtcagggtctcgnnnnnnnnnnnnnnnnnnnnnnnnnnnnnnnnnnnnnnnnnnnnnnnnnnnnnnnnnnnnnnnnnnnnnnnnnnnnnnnnnnnnnnnnnnnnnnnnnnnnnnnnnnnnnnnnnnnnnnnnnnnnnnnnnnnnnnnnnnnnnnnnnnnnnnnnnnnnnnnnnnnnnnnnnnnnnnnnnnnnnnnnnnnnnnnnnnnnnnnnnnnnnnnnnnnnnnnnnnnnnnnnnnnnnnnnnnnnnnnnnnnnnnnnnnnnnnncgcgcctggccaatgttgagtattttaaaagtcattttaaaatatttgtcatcgatgaaacttggtttcagcacacataattgctttccctctcttccttgtaattaggtgtaaacctctataactcaagtcctagattagaatgtcctttgtcctgatgtttgcagtaat

SEQ ID NO: 7780 - DNA, 553 bp, Macaca Fascicularis
ctcccgagatgtgtgatgacccacacttgttttctttgtttattttatttcggcaagaaaaagtgtgagtaattgaggaaaaactgacagttgcttttgctaataccaaaattgagcttacaattaggagctgagtatgtgtaacaggatacaggtgacagtgaagatagaagaaccatgatgaccacagactcaatgtgctctgtaacattgcacagtttacccagcatgactttccttagaaggccccctcctcacgctagagcaaaagtcccagttaactgaagcctaccagaagaagtggtagaagaagctttgctgcttttgtgcctcttacaggcgcctaaagtcattgccatgggaggaaaacggagtggggggcggggttggtggggctttccctaatttatcttcatgtccactgagcagagttgcgattatccttgtagcatgtggaaatgatttactggaattacagaacctatttttcctttacatttcagcgttggctctggctgctttttatgataatgcttgatacaaatcacacctg

SEQ ID NO: 7781 - DNA, 1544 bp, Macaca Fascicularis
atttacttatgcttttaaaataagccctcatggtatcttcttctggaattgtttcttttcatctcctgcttatgtgaagggcctttataaaaccttgcacatatttttatcatgaatactctattataattgtttgtttctgtttccttcatgaaactgcacttattaaatttagggctgcatcgtacattattgtattctaagcttctagcatagtacttttatatagtgaatacaaagcaagtgttatctattaaaagtagtggtttttgagggcttttctcatgtcctaattgagtactacccaaatggaattctcatttaatcctcttttgaaccttaggtgggaagttctattattagcctcatttttgtgatgatgacctgaaatatagaaaggacagtcaaatgtcttacctgttacatgctacagaagttttagagctaggattcaaacaaatgagtctgtcatccctgagcattgttctacactgttcctcagcatgagcaaacgaatggacaaatgaatgatgcttccagattaacttcaacttaaatctacaaatgtctcaaaaatactatttttactactggctccagtttacagctgtagacctgttatcagattaacaaggctgcagcaatattgagatttctctcatttttctttggtggacatgcttatggatatttaaatatctcaaagccaggcaaccagaaaaccagaagaaagaaatttaaaaaggaacatagttatctaataaacccaatacttagcccgcagtgtttgaacttttctggccttctagttaattctatattgatttagcatgttggtatggtttgaatgccctcaccaaaactcattttaaaatgtaattgcccttgtaatggtatcaggcagtgagtccttcttcttggtggcaggagaaagaagtgcagagcaaaggggaaaaagccccttataaagctatcagattttgtaagagctcattcactatcatgagaacagcatgggggaactgcccccataatctaatcacccccataaggtccctcccccaagacatggggattacaattcagattacaattcaagttgaggtttggtggggacacagagtcagaccatatcattctgcatctggcccctcctaaacctcgtctttctcacctttcaaaacacaatcatgccttctcagtggttccacaaagtcttatctatttccacattaacccaaaagtccaagtctatagtcttgtctgagacaaggcaagttccttccgctgatgaacctgtaaaatcaaaagcaagttagttacttcctagatataatagaggtacagcgtttatattttggagccttcctgaaggtgtaaaattgtaaatatttttatctatgagtaaatgttaagtagttgttttaaaatacttaataaaataattcttttcctgtggaagagaaaaaaaaaaaaaaaaaaaaaaaaaaaaaaaaaaaaaaaaaaaaaaaaaaaaaaaaaaaaaaaaaaaaaaaaaaaaaaaa

SEQ ID NO: 7782 - DNA, 504 bp, Macaca Fascicularis
tcggctgtatcacattaccccctagtccccagagctgtcccagccaccagccctgtgacatcgtagcccagagatgggctagtcagcaagcagcaccccctcccctcccaggggtccagagagaacgccccctcccttcccagccctcacactagcagctgaggctgggtcacccctcctgctttcccacaatagagctttctatgtacagccacgtctacacaggcactgcttccccccagccctcctccccggcacctccccttgggggctggaccccccctcctccccggcttggaggcagacacagggtcccttgcaagacacaacccagcacctaccacggaacggctccaaggcccctgggcccctctccagcctgggcctgggggctacgcgcgagggcccccgcaggccccgggggcgcgcaccctgggtgcgggctcgcgcgggaggggcggtgccaggcccggcgccggcgctacttgacgttgaacaccatca

SEQ ID NO: 7783 - DNA, 734 bp, Macaca Fascicularis
  misc_feature (1)...(734): n = A,T,C or G
cagaaaaaaaaaaaaaaaatgcaaagaacaatnnntttttctgtgtaaaaaacattgatcctttgggaatggggtgggaaatgggagtaggacaacattaannnnnnnnnnnnnnnnnnctgagatttcgtaacctcagtagannnnnnnnnnnnnnnnnnntnnnnnnnnnncaatcaatctctccttaatgagtaagactttagcaatttgtgcagaatttgatcgggtaaaagcaaactacaattctcctaaaccctgctagagattaagtggtggttctcacttcctcaatgaaannnnnnnnnnnnnnnnnngcttgnnnnnnnnnnnnnnnnnnnnnnnnncagactctcaaatacatgaccaggtgaccaagcaatggaaaaatttgcaccaccatgtcccatgaaattgtttcaatgtttagtttagatattgctaacttgtgctattaaccttttgacaagcgtgtagtattgtttgttttgggtttctttttgatttataactatttagtagtccccagctagctannnnnnnnnnnnnnnnnnnnnnnnnaggattctattgttaagccacataacaaagcacactaattctgacaacactgcagatggaaaatacgaaccaaaaaaaatttacaccgataagttcaacaaactgtccatttttgatatttgcatgctcccctatggactggctgnnnnnnnnnnnnnnnnnnnnnnnnnnta

SEQ ID NO: 7784 - DNA, 710 bp, Macaca Fascicularis
  misc_feature (1)...(710): n = A,T,C or G
gcttccatgcgannnctgaaaacagcttgnnnnaacacttatttgaccctgtnnntctgtgtggaactttctatggttcttcactgcccagaggctaaagtacaagtcattgaactttgcattcaaggccttgttcccactcctccaggtggccccttctgcctgcacatttttatacccctctctgggctcccaccttggcttctgctcatgctgttccctcatctttgcctggtgcccttcctggtcttttggcatttggcaccgtctcttctccaaggagacttccctgaactccccaaccccagttcaggtcagatgacctctctgggcacctcagccccagggtttccttgcgggggatacnnnnnnnnnnnnnnnnnnnnnnngatgaggggtgacctggtgaaaagatnnnnnnnnnnnnnnnagccttggtctcctaggtctctctcctcactgaagggcgatgtgtcccacaagtggggtgcagggctggttcgtggacctccttgcaggaagggaagtccctggcgatttcctggccctctctcatgcctcctcatcaccttgaccacagtcttctctacaccccactccctgaccactggcttgtccatgccccacacctggtcccagacttgccacctgtccctgccctctcccccttaggactgtcatatttacctgtcatgtgtctcagaccttct

SEQ ID NO: 7785 - DNA, 702 bp, Macaca Fascicularis
ctgttatgtcagcagttcagaaggagcgtggcaggaacatgttgtttcttctccataaagcctggggcttcagatgggaaggctcaagggctgggggtgacatgacacctgagggatggaattacctaaaggtagttaaggtgtgtgcctagcacttagacaaggatgactcaaaggccaggacagccagccacagcccctgtgtatgtccctccacctgcctttgctccctcgcagcatgacagccttcccgtggtggctccagacccaagtatgtgttgaacactgaggctgcatcaccttttctgacctagctctggaagtcacctggtaactccttcactgtatttgattgtgttacaagcaagtcacaagcccaaggcagggcttcaggttgaaggaggggagtattagaccctacctatgatacttcacagggaagtatcaaggttctagaagaggaagagggacgggagagactgttggggccttcagaaaatatagtctgccacagcaaagaagcagttacatccactgttaagctgcacttaaaagaacaattttattttgaacgctatgtcttgaacactcttgtctactttgatacatagagatctagttcatttctgttaaattcatacgcatatactacattctctttgaccattttcctaatggtgtttcgggggttttttttgtttg

SEQ ID NO: 7786 - DNA, 768 bp, Macaca Fascicularis
  misc_feature (1)...(768): n = A,T,C or G
agcccagtgagcccttcagatgactgctgccnnnaccaacatctcacagcannnnnnnnnnnnnnncgagcaagaactatctagatgaggccttccaaaattcttgacccatggagtccattagcataatgaaatagttttacaacactaagtttgcgnnnnnnnnnnnnnnngaacacctcactgttacaccatcacgtacgttacacggttgaatctnnnnnnnnnnnnaaacaccttgtggtggagctttcctgtcaatgttgttttaagggcaaggactttacatacattatcataccttatttaatcatcacagcccacctaagaagtagatacaattattatttccgctttacagctcaggaatactgggcataacagcccaaggtcacactgctcttaattactgtgctttctattgtcagtgctggaacatgagaggcttcaggagtcagaattttagactttcatgacatatttgaactgacctcggtcatttccctcctatcgtggttacannnnnnnnnnnnnnnnnaaagaaactcagccatggtatgcattagtaattgacagagtaaggtagaaacatatttctctaagtgtgtgtgctagccactgtgctactctgcaacgtcaaaccgttttcaactccttaaaaaattctttggtataaactgttatttacnnnnnnnnnnnnnnnnnnnnnnnnagaggaaaagaatgaatctatatttaacatatacctaaacctatataaaagcataa

SEQ ID NO: 7787 - DNA, 728 bp, Macaca Fascicularis
  misc_feature (1)...(728): n = A,T,C or G
cataacaaggaaaaaaactgttaaaatatttgcataaggtagaggctgataagactctaaaaaccagggtgtgggccaaactcacnnnnnnnnnnnnnnnnnnnnnnnnnactggatttgacctaggtttcacctaggacctgattatacacttattaacatactaaatcacacacccaccagtgccatgacagtcccatatttggttaaaaaatggcaccacagttctgagaaatctctacattttnnnnnnnttctttatgaatattccattccttnnnnnnnnnnnnnnnnnnagataaaaacttcagatcgggctgtgtgactctcgagtatgttcacannnnnnnnnnnnnnnnnnnnnnttttctctttgcaataaacctccatacttttataaccgcccagtgggttcaccttgccctctgcctagacagagtcaatctatcaagacggnnnnnnnnnnnnnnnnagagtaattcacacagagccggctgtgtgggagaccagagttttattactactcaaatcagtctccctaagcattnnnnnnnnnnnnnnnnnnnnnnnnnnnncagtggctcacgcnnnnnnnnnnnnnncttcaggaggccgaggagggtagatcacgaggtcagaagtttgnnnnnnnnnnnnnnnnnnnnnnnnnnnnnnnnnnnnnnnnnnnnnnnnnnnnnnnnnnnnnnnnnnnnnnatgcacctataat

SEQ ID NO: 7788 - DNA, 2467 bp, Macaca Fascicularis
agtgcttctcttgctgggcaagttgtgtgaaagatgggagggcagcactgttgctattatggatactaacttatcaggacaataaggtcaaagtccctgttaaagctaattagattctacttgacaaaaattggaggtaaccacaaagaaaatcagtgctgtgaagtagattagaaaacaggctcggagaagttaaggaaggtcttgtaataaatggacaccatgatgatgactggtctctgttactccacatcatgtgctcttttcttgcatgagccagacagcccctgagagttcagcatgtttcagtaacaggatcttgacagccagccactcggcagcgaaccacctactccaagggaactgtacatgagtgatgggagcccatattatgggtaatagagaagaggaaacctaaccaatgactgtggaataatatggaagaagatggaaaaaacttgtttaatgggctgagagagtggcgacttctataagacatggatagatgcaaacatgtagggcggttacggctcgcccaggaccactccatcctgaaccctcagaagtggtgctgcttagagtgcgccaccaccgagtcggtgtgggcctgcctcaagtgctcccacgtggcttgcggccgctacattgaggaccacgccctgaaacactttgaagagactggacacccgctagccatggaagtccgggatctctacgtgttctgttacctgtgcaaggactacgtgctcaatgataacccagagggcgacctgaagctgctaagaagctccctcctggcggtccggggccagaagcaggacacgctggtgagacgcgggcggacgctgcggtccacggcttcgggtgaggacgtggtcccgccgcagcgcgctcctcagggacagccgcagatgctcaccgctctgtggtaccggcgccagcgcctgctggccaggacgctgcggctgtggttcgagaagagctcccggggccaggcgaagctggagcagcggcggcaggaggaggcgctggagcgcaagaaggaggaagcgcggaggcggcggcgcgaggtgaaacggcggctgctggaggagctggccagcgcccctccgcgtaagagtgcacggctgctcctgcacacgcctagcgacgcgggcccggccgcctcgcgccccaccaccctccctacctcacgcagagcgcccgccgccacgctcaagctgcgtcgccagcctgccgtggccccgggcgtcacgggcctgcgcaacctgggcaacacctgctacatgaactccatcctccaggtgctcagccacctccagaagttccgagaatgtttcctcaaccttgacccttccaaaacggaacatctgtttcccaaagccaccaacgggaagactcagctttctggcaagccaaccaacagctcagccacagagctgtccttgaggagtgacagggccgaggcatgcgagcgggagggcttctgctggaacggcggggcctccattagtcggagcctggagctcatccagaacaaggagccaagctcgaagcacatttccctctgccgtgaactgcacaccctcttccgagtcatgtggtccgggaagtgggccctagtgtcgcccttcgccatgctccactcagtgtggagcctaatccctgccttccgcggctacgaccaacaggacgcgcaggaatttctctgtgagctgctgcacaaggtgcagcaggaactcgagtctgagggcaccacacgccggatcctcatccctttctcccagaggaagctcaccaaacaggtgttaaaggtggtgaataccatatttcatgggcagctgctcagtcaggtcacatgtatatcatgcaattacaaatctaataccattgagcccttttgggacctatccctggaattccctgaacgctatcactgcatagaaaaggggtttgtccctttgaatcagacagagtgcttgctcactgagatgctggccaagttcacagagacagaggccctggaaggaagaatctacgcttgtgaccagtgtaacagcaaacgacgaaaatccaatcccaaaccccttgttctgagtgaagctagaaagcagttaatgatctacagactacctcaggttctccggctgcaccttaaaagattcaggtggtctggccgtaaccatcgagagaagattggggtccatgtcgtctttgaccaggtttttgggtccactgcaatgactcaaagctgaatgtatgcagtgtcgaggaagtgtgcaaaacccaggcctacatcctttttttacactcaaagaacagtgcagggcaatgcaagaatctcagaaacccatctccaagctcaggtgcagtccagcaacaatgatgaaggcagaccacagacattttcctgaatgggaggcatgtatcaaagactggcttttgtgtaaaaaaaaaaaaaaaaaaa

SEQ ID NO: 7789 - DNA, 721 bp, Macaca Fascicularis
  misc_feature (1)...(721): n = A,T,C or G
agnnnnnnnnnnnnnnnnnnnnnnnnnnnnnnnnnnnnnnnnnnnnnnnnnnnnnnnnnnnnnnnnnnnngctgactgcagcaggaatggctcgagactggccagatgctcgtggaatttggcacaacannnnnnnnnnnnnnnnnnnnnnnnnnnatgaggaggatcatacacggnnnnnnnnnnnnnnnnnnnnnnnnnnnnnnnagagagtgtttgaaagattctgccgaggcctcaaagaggtggagcgacttatccaagaacgtggctgggagttcatgtggaatgagcgtttgnnnnnnnnnnnnnnntgtccatcnnnnnnnnnnnnnnnnnnnnnnnnnnnnnnnnnnnnnnnnnnnnnnnngctaagcaaagatagccgcttcccaaagatcctggagaacctaaggctccaaaagcgtggtactggaggagnnnnnnnnnnnnnnnnnnnnnnngtctttgatatttctaattnnnnnnnnnnnnnnnnnnnngaggtggnnnnnnnnnnnnnnnnnnnnnnnnnnnnnnnntatttgattgattgnnnnnnnnnnctggagagaggccannnnnnnnnnnnnnnnnnnnntgtcatccacaccaagcattaactccccaccaccaactgatgtctcaagattcccaggagttctgctcattctaatgatggccctttctacttgctctggacctgcccccgcatcccctg

SEQ ID NO: 7790 - DNA, 860 bp, Macaca Fascicularis
  misc_feature (1)...(860): n = A,T,C or G
agtgctgnnnnnnnnnnnnnnnnnnnnnnnnnnnnnnnnnnnnnnnnnnnnnnntgcttcctggggagccctgannnnnnnnnnnnnnnnnnnnnnnnnnnnnnnnnnnnnncaggcattgagtccaggcattgcctggagctcaccagaaggtgctttatgatggccctcggtttgtctctcagagggcttggtcacctctgccgtgaggctggactgcagctgtggtggcaagtgaccagatgtcactgagcagcctgaccatggtctaggcagtgcttgaatgcatccacttggcttcctttggtcattgaatttcaagaagacagactccaggggtggcttggccaggnnnnnnnnnnnnnnnnnnnnnnnnnnnnnnnnnnnnnnnnnngacggcgcttgggaccgtcctggcgagggccatgtgcttgaatgcactgtgcttctgttttctcactgtactgcttgtgttttagcaggatcaggcaaaaatgatnnnnnnnnnnnnnnnnnnnnnnagctagaagctctctcggtgaaggaggagaccaaggaggatgctgaggagaagcaataaatcgtcttattttatttccttttcctctctttcctttcctttttttaaaaaattttaccctgcccctcttttttggtttgtttttattctttcatttttacaagggacgttatataaagaacnnnnnnnnnnnnnnnnnttgttttttttttgtttgtttctaagtttttgccctatnnnnnnnnnnnnnnnnnnnnnnnttccccagtcatgaaaatgtactgtgctaactttcttttccnnnagtggaaacacttatttnnnncctgaatgtgaattc

SEQ ID NO: 7791 - DNA, 1916 bp, Macaca Fascicularis
ttgtaagttattggaggtttcagttttttcccattgcggtgtttgaattttcttttaccctactctgtgtaaccctgttacctgagcatgaatacaagagtccctgtgtaatgtgaaaaaggatgggcagttgattctttaattagggtactgctttagcagttagaataaatcagggaagtttgagctgaagactatcttcgcactgtttatgagaagaggaaagcaccgtgtgtgctgtcagccagctgcatggtcctgagcaagtcacttagcaccgaagttcataagctcctcctctgggcaggaaggatggtctctgggcaccagacctgctagtacaagccactggggttcaataaaaacactacctatggcttaggctacttaattgcttaaggttcttaaaaatccatttgcttataagcaatttgtcatcatatgggattcatatctagtcattgaagtaatttgctagaaccttaacaatttgattagtttaagctcctgtgcatatctgaaagtaataaagcattcttacttacaactgaagctagaacttaggtcttgtctgtattttgtcaaataccgctgttttattccatgtatgtcctttaagtacaagcaagtgtaaaagcttacaggcatgtaataaataattgaagtgttgctatatgtacattaaatggtccttaataaaatacccaagccttgtatacagtaagaggagtgctaacgttggaagagtgaaaaagacaaggaaaaagtacatttacgtatttataaaagcaatgtaagagctttcccatcagtggtattcttggaatctgtggtctttactaacttactatagctgctgccactgctgggctcttccgtgtggaccatagctaggagtcaccccagcagttgcctagaaacatactcactcctgatgactgggagaatgacagtttcctgtttcaactgactttattcttctagaagaaactgcctgtgctgagaatacaactctaaaacttatcttttagattctaaaacaaacaaacaaaaaaacagggaatattatggcataaattaaaataataagtttccttttttaaatgtttgacaagtcatatttgtatgtatatgcatattcatgtaaactgttaatagatgatacctaagtactttctcatacttcacctttacagtaagtttttcttctctgcctcttgtctccattaaaactctggcctctgcaatggtaagtgtgcaggttaagttcctttacagtgaatagtgacctcccccacaagagcagctttatctcgcttagatgagaccagctgaaaagccaaaagggaaccatgattcttatgagataaggaaagcaggtttaaataacggaactggtgtttgtctcagaggttggaagaatatcctcaaagagtggaagcaaactgccgtcacgaggttgatactgggctggtaaattactggtctggttgctttcctcgaatttttttcctcagacaacagtacgtataaattcacgaacctgcttttcttcctggcagcgtgcatattaatggttcctaaaggcttctgtttttatgctgcagctggactcctcactactgatccacgtgtgagagaacggaagaagccaggccaagagggatcccgcagaaagtttacctggaagaagcgctaagggtttgtttgctcccaggaaagaagaggaagagctgtgtatgtgcgctggcacgtggcacacacagaggaaacagtgactgcccagcatgagggcagtactgtcagaaatttctttgagttgtgagatagatttatttttaaatgctactttgtaaaggtgacctttaaaaaataaaaggaaaaagaagaatgttaaaaaaaaaaaaaaaaaaaaa

SEQ ID NO: 7792 - DNA, 770 bp, Macaca Fascicularis
  misc_feature (1)...(770): n = A,T,C or G
cagtgagcaagctgtatgacgccacgtttgtgaagagctgaggtgtcaggagggccgacgctctgttggcatgcgcagtaggggacgagggttagccatagtattctttgcaaannnnnnnnnnngacattatatcttctcttgcttggtgtaactaatcactgttaatttcaggaaacagaactcattaaaactccttagtaaaccaggtctacatcctgttttgtttgctgagtgaggttcgtggnnnnnnnnnnnnnnnnnnnnnnngaggaagaaaaactgtccttccttctccaaaaaaggaaaaannnnnnnnnnnnnnnnnnnnnnnnnnnnnnnnnnnnnnnnnnnngaataagcatttcttattcctagttgtagggactcctatttttaccttccgttacagtgttgattcataagaaatattgttacatttgagataacttcatctgtatggggtatttatttgcaacgatgtctgagtactgtattttttctgtgcattaccttagtgtcaggatgttggtctttattttaaagtcatatgcatgttctcctgccaaggaacctttacacagacccaaacaaaaaaatagtaataattaaatgccttcaatttctgagaaaatgaggcagagcatggaaaaggaataggaaggagaaattaattgagattttcaggacacagacatgtgatgtgaatgcctacaaagccagtgcgcataggaacagtgggcctgggtaaagagtcacattggtaggac

SEQ ID NO: 7793 - DNA, 784 bp, Macaca Fascicularis
  misc_feature (1)...(784): n = A,T,C or G
gtnnnnnnnnnnnnnnnnnnnnnnnnnnnnnnnnntgtacagtttgaaatactattttttatcaagttttaaaaaaatgcagaattttgttttactttttttttttttttttttaaagctatgttgttagcacacagaacacttcattgttgtttttgggggaaggggcatatgtcactaatagaatgtctccaaagctggattaatgtggggaaaacacctttcccttctagttttgagagacttcctcttggttcccaggaggagggagtccctgactttgacacacatggccaccttggcacaaaagccttgtggtatggaaaaacaaatttgtttttatgtcctcttctccctttccatctttcagcatagacttaactcccttaagcccagacatctgttgggacctgacccgtagtcattggttaccagtgtgtcaggcaatctggacnnnnnnnnnnnnnnnnnnnnnnnnnnnnngtcaaaacagcattggttccatttctagattgtggatcttcagataaattctgccattttcatttcacttcctgaaagtcagggtcggcttgtgaaaagttgttaaacaacatgctaaatgtgaaatgtcaaccctcactctaaactttccctgttcagacgcatcagatgaagacttcattgggttttatagtggctttctgatttttggtagtccattgaaggagaaggtagtttgaaagttgttgtatactgtnnnnnattgtctgcccatgtcctgcctgaaataccatgattgttt

SEQ ID NO: 7794 - DNA, 766 bp, Macaca Fascicularis
  misc_feature (1)...(766): n = A,T,C or G
gagtgtgcaatagagagtcatgaggactgtggtgaaacagaaagcagaccccattgaaaggggacagccactactcagtatcagataatgattgctatgagggaacatgggttctttacttccagatccttccatttttagaggaaacctagaaatgcaaacatgtgaaatctcttgatttttagtgcctggcaatgaaaccaaattttaagattatactccgtgggccaactgaaaaagattatgccagtaggttgtggcatctgggctaaaggaaccacggagctgtgggagtcactggtgaggggaagaagataattagcagtctaagggagagggaaagagaaaactagaaaagcagggctgtcaaaaggccatcctgaatctctagctccctggtgaattctgaaatggatggaaatgtagggccagcatcttgagtaaaggactgcttaatgtgtatgtacttggccaactcaaaataaaatgtttggagcatgaatagccccatatgatatatgctgtttggttgacatatgcttgtattttaacaaccaacgttgtcccttttatttttggaaacaatatggtatgatctggtcctcactttaattttacatgaaaggtataatgcatctatgtaaataagagagcaaagaagttttctaaatgctttaattttttgtcacaaatatttctgcttctctcnnnncctccttgctggaaaaannnnngctagtgacannnnnnnnnnnnnnnnnnnaaa

SEQ ID NO: 7795 - DNA, 682 bp, Macaca Fascicularis
  misc_feature (1)...(682): n = A,T,C or G
cagtaccctttaaactcttttagttggtgggtgggaatccgggcggnnnnnnnnnnnnnnnnnnnnnnnnnnnnnnnnnnnnnctaannnnnnnnnnnnaggtaactccgctttcatctcggacgtggctcaagattacaggtgatcgcagtgcccggaggcgccaggaggcaactttcacagtggggaggcgccgggcgccagggggccaagcggccgggcccgggagcccacttcacttgggagccgccccaggccgggggtcgacaccgcgttccctcccttagcctagccgcgacccagctttagggcctaagggcaaatcaagcgcccggtcctcccggcgccatgtgcgcggcccgcccaggcccttggccaccgtcgccgcgggggcaggccgcgagccacagaggcctggtgcgcgtcccgcccctgagcccgcagtaggggcggcctcagaccgtgagccgggagtcgtccccttagtcctccctcgcactcggagggcctccggggcggggcaggccttcgggcccggcggcacccgggcggtcgaatccgtcagctcccgcgagtggcccggcgagggaaggagccggtgagtagccacgtcacgctcctcagggaggccccgccccgtgctctcnggccgcccctcctcgccgtctnnacgcctccgcgg

SEQ ID NO: 7796 - DNA, 477 bp, Macaca Fascicularis
agtgctctgtgcagattgtctctattgggaaactgttttaaatgtttcacgatgttttagttattttaacccatttcataatctccaaggtagcattcttaaaagtcatgcctgatgagtgcagtggatgagtagccaatgtgtggaaaacatcgagagtgtctaaaactgtgcacatctcccatgatcttagactctgcaagatccttcaaccccctcctctggttccgtaattaccttaagacaatgagtgccactttttacataaagtgatgtgtatttcaagcgaccttttactctctgttacatgttagaatggatctcactggaggattccctccttcagagactgcagagagtggcttagccagtgtgtatcctgcgatgccctgtgacgcattaggagtgcaggggagtgccagagccttggttatttccgaagacattttttcatttcttctcctattcacttccttt

SEQ ID NO: 7797 - DNA, 771 bp, Macaca Fascicularis
  misc_feature (1)...(771): n = A,T,C or G
aatacgaaaatctttatatgagtttggcttattggtatttgtacttaatcaggggaaacagtctttcgattacttatgcctctaaagagttaatttctnnngaaattcaacagtcccatcaccagcataattttatcttaaggaataactaacaggaaaagtcaacttaattatttaagaccctagtttctatgtataatatattcaatagtaatgaaaatctgccatggaattaactaataagtagtaacaataaacttcatatttagaatacaaagtctataaagaacaattttacatgatcttcaatatcaactccagtttaaaaggtgttatttttaaaacatttgaaaccaagtactgcttaatttcagtcagaagatgcaaataaatactttgatctatgtctgattttgctaataatatttgaaggagattgcctaccaaggacaaattaaacaatacatttaaaaatcaaacaacaaacgatttctccatacactcatagtcacatatggaattttgagaaaataaagcatgctgtctctaggaatttttatacttctttttcttcctaaatatttgcttctagctgctcttggcaatgatgaattgttacgtatgcattaatgttttgcagcccaaaagttgttcacatttttcctatataagatctgtggagtgtgtgtttcaaagagagaagtacagaaatgttaaagcaggaaaacctgaatgtgatgtgcacattttcatcccacatggacaatgtat

SEQ ID NO: 7798 - DNA, 2484 bp, Macaca Fascicularis
cggacaatatgcttatttctaatgagggtcatattaaactgacggatttcggcctttcaaaagttactttgaatagagatattaatatgatggatatccttacaacaccatcaatggcgaaacctagacaagattattcaagaaccccaggacaagtgttatcgctcatcagctcgttgggatttaacacaccaattgcagaaaaaaatcacgactctgcaaacatcctttcagcctgtctatctgaaacatcacagctttctgaaggactcgtatgccctatgtctatagatcaaaaggacactacttcttattctagcaagttactaaaatcatgtcttgaaacagttgcctccaacccaggaatgcctgtgaagtgtctgacttctaatctactccagtctaggaaaaggctggccacatccagtgccagtagtcaatcccacaccttcatatccagtgtggaatcagaatgccacagcagtcccaaatgggaaaaagattgccaggaaaatgacgaagcattgggcccaacaatgatgagttggaatacagttgaaaagttatgcgcaaaatctccaaatgccattgagacaaagggtttcaataaaaaggatcttgagttagctctttctcccattcataacagcagtgcccttcccaccactggacgctcttgtgtaaaccttgctaaaaattgcttatctggggaagtttcttgggaagcagtagaactggatgtaaataatataaatatggacactgacacaagacagtcaggtttccatcagtcacgtcagtgggctgtggattctggtgggatatctgaagagcaccttgggaaaagaagtttgaaaagaaactttgatttggttgactccagtccttgtaaaaaaaatcatacagaataaaaaaacttgtgtagagtataagcataacgaaatgatagattgttatacaaatcaaaatacaggcttaacagttgaagttcaggacctgaagctatcagtgcacaaaagtcaacaaaatgactgtgctaataaggagaacattgtcaattcttttactgataaacaacaaacaccagaaaaattaccaataccaatgatagcaaaaaaccttatgtgtgaactggatgaagattgtgaaaagaatagtaagagggactacttaagttctagttttctatgttctgatgatgatagagcttccaaaaatatttctatgaactctgattcatcttttcctggaatttctataatggaaagtccattagaaagtcagcccttagatccagatagaagcatgaaagaatcctcttttgaagaatcaaatattgaagatccacttattgtatcaccaaattgccaagaaaagacctcaccaaaaggtgacgagaaccctgctgtacaagagagtaaccaaaaaaatgttagctcctcctttggaggtgctgaaaacgttagcctctaaaagaaatgctgtagcttttcgaagttttaacagtcatattaatgcatccaataactcagaaccatccaaaatgaacatgacttctttagatgcaatggacatttcgtgtgcctacagtggttcatatcccatggctgtaacccctactcaaaaaagaagatcctgtatgccgtatcagcagaccccaaatcagatcaagtcgggaactccgtaccgaactccgaagagtgtgagaagaggggcagcccccgttgatgatgggcgaattctaggaaccccagactaccttgcacccgagctgttactaggcagggcccatggtcctgcggtagactggtgggcacttggagtttgcttgtttgaatttctaacaggaattccccctttcaatgatgaaacaccgcaacaagtatttcagaatattctgaaaagagatatcccttggccagaaggtgaagaaaagttatctgataacgctcaaagtgcagtagaaatacttttaaccattgatgatacaaagagagctggaatgaaagaactaaaacgtcatcctctcttcagtgatgtggactgggaaaatttgcagcatcaaactatgcctttcatcccccagccagatgacgaaacagatacctcctattttgaagccaggaatactgctcagcacctgaccgtatctggatttagtctgtagcacaaacattttccttttagtctagccttgtgttatagaataagcttgcataattatatactccttaatactagattgatctaagggggaaagatcattatttaacctaatttagtgcgcttttaatgtacgttacagctttcacagtgttaacgtaatgaaaggcatatagtcagtaatttatcttaatctcaaaactgtatataaatcttcaaagcttttttcatctatttattttgtttattgcactttatgaaaactgaagcatcaataaaattagaagacactaaaaaaaaaaaaaaaaaaaaaaaaaaaaa

SEQ ID NO: 7799 - DNA, 700 bp, Macaca Fascicularis
  misc_feature (1)...(700): n = A,T,C or G
acacctgttgcactgtcagtgtctgccttggcattgagnnnnnnnnnnggaatagcctgcattcctccttcactgtgctgttgtctcctggcattcaccataaacaccttgggaccagttgcaccgagttagtttgggaggaattcagtaaggaccactaagctggacctggggatgacagaacacaagannnnnnnnnnnnnnnatcctcccaaaaaaactggaaatctgcatgtgtgagagttacagcagagcttcctaatcattgttatggcttagcacacataccacatgattatatctgcatgacaccctgaggcacataagaggannnnnnnnnnnnnnnnnnnnnnnnnnnnnnnnnnnnnnnnnnnnnnnnnnnnnnnnnnnnnnnnnnggtcaggctgccccaagagttagaagatcagcgcttgccgcacccagagggccacggcacacagtgtggggagctgtatgaaagatcttccagtgggnnnnnnnnnnnnnnnntccttacacaatcaagcacagagtgtgtggtgtgtgtggcaggggtgggggaggagatttgggagggctgaagacactggtagctgtggccctagaagctgcagcctactaggtacagggtctttaggcagcctctgttctcaccatgagcagggagagnnnnnnnnnnnnnnnnntctgtggtgctgaa

SEQ ID NO: 7800 - DNA, 678 bp, Macaca Fascicularis
  misc_feature (1)...(678): n = A,T,C or G
acatnnnnnnnnnnnnnnnnnnnnnnnnnnnnnnngtggcctatgtctcctttggacctcatgccggaaaattggtcgcgattgtagatgttattgatcagaacagggctttggtcgatggaccttgcactcaagtgaggagacaggccatgcctttcaagtgcatgcagctcactgatttcatcctcaagtttccacacagtgcccgccagaagtatgtccgacaagcgtggcagaaggcagacatcaatacaaaatgggcagccacacgatgggccaagaagattgaagccagagaaaggaaagccaagatgacagattttgatcgttttaaagttatgaaggcaaagaaaatgaggaacagaaaaatgaagttaagaagcttcaaaaggcagctctcttgaaagtttttcccaaaaaagcacctggtactaaggnnnnnnnnnnnnnnnnnnnnnnnnnnnnnnnnnnnnnnnnnnnnnnnncagcaaaaaagatgaccaccgcgagtaaaaaggctccagcccagaaggttcctgcccagaaagccacagnnnnnnnnnnnnnnnnnnnnnnnnnnnntcagaaggnnnnnnnnnnnnnnnnnnnnnnnnnnacctgctccaaaggcatnggcaagaaagcataagtgcaatcaaaaaaagtaataaaggtctt

SEQ ID NO: 7801 - DNA, 724 bp, Macaca Fascicularis
  misc_feature (1)...(724): n = A,T,C or G
tcacctccccattcacaactactttcttgctcccagaaggctgatcagatattctacaatcacagagtagcaaagacctnnnnnnnnnnnnnnnnnnnnnnagggcacaagaactgactctggagaccaaagcagttgttaaaaattctctttgctgggagcgaggtgtgnnnnnnnnnnnnnnnnnnnnnnnnnnnnnnnnnnnnnnnnnnnnnnnnnnnnnnnnnnnnnnnnnnnnnnnnnnnnnnnnnnnnnnnnnnnnnnnnnnnnnnnnnnnnnnnnnnnnnnnnnnnnnnnnnnnnnnnnnnnnnnnnnnnnnnnnnncagctcgtttaaacaaatgagctcatttctgtgggtaggttcacctctaccagaggtgnnnnnnnnnnnnnnnnnnnnnnnnnnnnnnnnnnnnnnnnnnnnnnnnnnnnnnnnnnnnnnnnnnnnnnnnnnnnnnnnnnnnnnnnnnnnnnagagtgatactctgtatcaaaaaaaataaaaataaaaataaataaataagtaaataaataaataaatctcttcgttgggatatttgaagagcttgggatggatttttgactaaatctcccccgaggagggtgaacaagatgatctgagagatcactactgctcttggagctccttttcctaaagctaaggccagcctccgtcacaaatgcccataaaatctggttcatcttcgatgaacaataaatat

SEQ ID NO: 7802 - DNA, 704 bp, Macaca Fascicularis
  misc_feature (1)...(704): n = A,T,C or G
tctcacagcnnnnagaatgaacancnnnnnaggcagtttgctgctcgcccagagcaccagtcctcggacagcacattcctggtgttcatgtcacatggcatcnngaatggaatnnnnnnnnnnnnnnnnnnnnnnnnnnnnnnnnnnnnnnnnnannnnnnnnnnnnnnncgaaattttcaacaaccgtaactgccggagtctgagagacaaacccaaggtnnnnnnnnnnnnnnnctgccgaggcagtggtgctgggattgtttggttnnnnnnnnnnnnnnnnnnnnnnnnnnnnnnnnnnnnnnnnnnnnnnnnnnnnnnnnnnnnnnnnnnnnnnnnnnnnnnnnnnnnnnnnnnnnnnnnnnnnnnnnnnnnnttcaaatcttccacaccacataatgtttcttggaggcatgaaataagtggctctgtcttcatttcccaaattatctactacttcaaagagtattcttggagtcatcatctagaagaaatttttcgaaaggttcaacgttcatttgagacaccnnnnnnnnnnnnnnnnnnnnnnnnnnntgaaagactatccnnnnnnnnnnnnnnnnnnnnnnnnnnnnnnnaattaaaactcataaaaagcaactcaggaaaatgaaggcattatggtatctatgaatctgctgtatgaaaaggtcaatttttgattaagaatatttttgtatc

SEQ ID NO: 7803 - DNA, 600 bp, Macaca Fascicularis
ccagagaatgtactttaaggtggagggctagtgtgggggagggaggcttccccagctttaagagaccctctcagcccagtgactgtccccaaacccaagtctcctggcaggaactaaaacctctgccccactctttcacaccatgtggaatctcacgggggtcggggatccccttaagaagtggtaatggggtcaagatgcggccctggtgctgtaggcgacatcctgatacctataagttcacccccaccccacagctgctggagagaaatcccaagaggcagccctccctcaccatcccacaaaagacctggctggttaacatccagctcagggagaagggcactggtgcctaacctcactagtccctctcccggaggcccttgtagagggccacgtccataaattttcttatggaactctcccacatcctcttctccaacttcatttgcttctctcaacaacctcatctgcactttctatttctatatgatacagactctatattgctatatctctgtatatactttccccagccctgtctgtctccaccccatcccctcttgtctctgagaaccattctcccaccccaagttccac

SEQ ID NO: 7804 - DNA, 1156 bp, Macaca Fascicularis
aattgcttcttccagctccaaagttttggaccctgtcagttttgcaactacattatacattattataatattatttttttctagaaactgggggcagcctcaaaatcatcttaaagagggagttttgttagaggcatctttatgaacatgagtgtgagatctctctaaattcttagcgtctcactggatgtaaaatctatcagttaatagttttaaaaatgcctctttttttaaacagagagttaaatttaggcttcaatcattataatcctgtaagtagcttgacatatcaattgtttataagattcatcacataaatttctggagaacaaacaggttttgcctggaaataacctttaaatgttgtttctgttgccaagaccaatgatcatgatgaagagttttatgatcacagcctatcttacttaaggtttgagagggaacctgtcacctctgcaattgtcactctagtttttaatgttataattctgctacatggttagtgaatgtctggcatgattatacacatgtattggaaatatatagtttttaaattatttatttatttatttatagtttactgtgtgttcccagctaactctaatttttttcacttgctcataaacttctgaaaaaaaaaataagcatgaatcaaatggtaatgcccaatatccactgaccctgctttttcttgaatgaacagccaaattaaactttggccatctatatattcatttacagattatccatacattcattttaataacattgagtactgatggatgtttttaaagtgagcattcatttaaggataataaaaataaagtactcataaagaataaagtactttactaaaatattgtgtggctattttcatgtttgaagctatagcttactcattatcatgagacagttttgattttgggactctttcaagtgtatctgagcatgactatattttaaaatacttaaaagtgcttgatataaatagttttgccttcagaaccgcaactctatgtaatataaaaaaaatagctttgattttctcattggtgtttcattaacttggttttaaatgttgataatatttacaagtggaaataaaatttgtaaagatgcctttccttgtaaaaaaaaaaaaaaaaaaaaaaaaaaa

SEQ ID NO: 7805 - DNA, 754 bp, Macaca Fascicularis
  misc_feature (1)...(754): n = A,T,C or G
gaggcatgaaattccatggcaataggtaaactggaaagtgttgaggagaagccggtggaggcagccttgtgccttgtagactctttttcttcaagaagggtgaccagcgagagtctctcctaattctgatgaacgtcttcttgaactctcctcaacagcaagtgatagcttgatgacaggggatattgggagacatgcaaaggactttggaaacaaatccctaggtagtggtgagccactggtcctactccaagtgaaacaacgtgatgaaactgatattttggtacaggaacactgaaagtagtatggatcagaaaggagatagattttggggtggtctgaaggattaggagacttctaaatatcctccatgaaagaaagggtttatgtaaagcattgcggacgatatacacttgaggctctggattatgttatctcttggaaagagtgttgggttttattctgggagggttaaatgtaggacttgttagggtctatttcagcttcgccctccctcttagggagccccagcacgtggtcatcattgctagtgcatggccttcccagggtcttagtgggaatcacagtgtattcaccacatcactccactgtaactgggtctgaatgccctggctcttctgaaatctctgcccttgtcttcagccttccagaacttgttctcttctcagccttcnngtctgccaccctctgcatacacaatttnnnatnnnttgtntttatttattatgtcagc

SEQ ID NO: 7806 - DNA, 721 bp, Macaca Fascicularis
  misc_feature (1)...(721): n = A,T,C or G
tcaggannnnnnnnnnnncttggccagannnnnnnnnnnnnnnnnnnnnnnnnnnnnnnnnnnnnnnnnnnnnnnnnnnnnnnnnnnnnnnnnnnnnnnnngagagcagcctgaccaacaagttgaaactatgtctctactgaaaatatgaaaatannnnnnnnnnnnnnnnnnnnnnnnnnnnnnnnnnnnnnnnnnnnnnnnnnnnnnnnnnnnnnnctnnnnnnnnnnnnnnnnnnnnnnnnnnnnnnnnnnnnnnnnnnnnnnnnnnnnnnnnnnnnnnnnnnnnnnnnnnnnnnnnncaaaaaaacagaaggaaagggaaggggaatggctaggctgactcatagggaagaggccccacagcagccgtaggaccttggccacttgggtggaaaagaaggaaggaagagcttcacnnnnnnnnnnnnnnnnnnnnnnnnnnnnnnnnnnnnnnnnnnnnnntcctggagcctggccaccccatttgcttctcttcttgggtagagggcgcggggagctttctagcccggaggctgagcagcgcagcttctaaccaggataggcgtttgtctgtccctgggaatacagacagcattctcataagcagcccaaatcctcctgaacagctttttgtagggtgcggcggggcggggcagagggtcattttgactcgtaggtaccttttccactttcactgctgataactgtgtacagataa

SEQ ID NO: 7807 - DNA, 615 bp, Macaca Fascicularis
  misc_feature (1)...(615): n = A,T,C or G
cagtattgggccgcatggacntnnncagggaggggtgggggtgggcanntccggtagctattggggtggggggcctctgagaagggagactcttaggccccctcatccctccctctccccagggccccatgttctgcagccttaaggttgaacgtgaacgcacgtccatgtcagtgctgtgggactcctgtgcgtgcctcggactgcgtgtgtcggcgggatgccggcacacgtgggtgtgtgtgcatgtgtgttgtgtgtgagggcagcgtgtcctccagtgtgcgtggtgtgtgggcttgggccccatccctggcccgagcatttcatcttgtgggggaggggtgctgacctagtgggaggagccccgccctgatccatgagatgccctgcccacgcctcccctccctacagcaacacctctgggtgtttggagttcagcttttgtgggtttgctctccctaccccatctcctgtacnnnnnnnnnnnnnnnagggtggggagggtggggttggttcgggtgggtgagggtctttttcctctgtgtgcgatgtcgttatctgacagttctcctccgtccctactggcctttctcctcgtgttcatatttgtac

SEQ ID NO: 7808 - DNA, 2488 bp, Macaca Fascicularis
agctgccttgccagctagggctgagaacctagggaaaggggatggatcccagaggcgcccttggtgcagtctgagtcttcccgtgctcttatttgagcaatccctgcgactcctgggcttctgtgtttgctcatgtgaaatattaaaaatacttctgtagtgcagtcatcccttgttctccatgacatactgcaaagttgctgttctacagatgaagatcttgaaatggaatggctctaaaatagctcctttgaaggccctcagattttctttgttgtgttaagccattttgatctgcttcttctgaaaatcaatgcctagatcaggccagcatttctgattaacaaggtggattgttttcttacctctcatccctctgctatggtgtcagccaacctgcttgcctcactggccttacctcctgtttgctatggacagcagccatcaaagtaattacaaactcagtaaaactgagaagaagttcttaaggaaacagattaaagccaggcatactttgctgagacatgaaggcattgagacagtatcctatgccactcagagcctggttgttgccaatggtggtttgggtaatggtgtgagtaggaaccagctgctcccggttttagagaaatgtggactggtggatgctctcttaatgccacctaacaaaccctactcatttgcaaggtacaaaactacggaagaatctaagagagcctatgtcaccctcaatggaaaagaagtagtggatgatttaggacaaaagatcattctgtatttgaattttgtggaaaaagcacaatggaaggagttgaggcctcaagccttaccaccaggactcatggtagtagaagaaataatttcttctgaggaggagaaaatgcttttggaaagtgtggactggaccgaagatacagacaatcaaaactctcaaaaatccttaaaacacagaagagtaaagcattttggttatgagttccactatgagaacaacaatgtagataaagataaaccattacctggaggtcttcctgacatttgtgatagctttttggagaaatggttgagggaaggttacattaaacataaacctgatcaaatgaccataaatcagtatgaacctgggcaaggaattcccgctcatattgacacacattctgcttttgaggatgagatcgtttctctcagtttggggtcagagattgtcatggattttaagcacccagatggtactgcagtgccagttatgttgcctcgtcggagtttgctggtgatgacaggagaatctagatacctttggacccatggaataacatgcagaaaatttgatactgttcaagcatctgagaatcataaaagtggaattatcaccagtgatgttggagacttaactttaagcaagaggggactacgaacatcatttacatttaggaaagtgaggcaaacaccctgtaactgtagttaccctttggtctgtgatagccagaggaaagagactcctccctcatttccagagagtgatgaagaagcctcacggctggagcaagagtacgtccatcaagtttatgaagagattgctggacacttcagcagcacgagacataccccttggccgcacattgtggagtttttgaaggctttgccaagtggttcgatagtggccgatattggatgtggtaatggaaagtatcttggcgtcaataaggagttatatatggttggttgtgatcgtagccaaaaccttgtggacatttgtagagagaggcaatttcaggcttttgtctgtgatgcattggcagtaccagtccgcagtgggtcttgtgatgcctgcatctccattgctgttattcatcactttgcaacagcagaacgtagagtggcagctctccaagaaattgttcgactcctgagaccaggtgggaaggcactcatttatgtctgggcaatggaacaagaatataataagcagaagtccaagtatcttaaaggaaatagaaatagccaaggaaagaaagaggagatgaacagcgatacctcagtgcagaggtcacttgtggagcaaatgcctgacatgggcagtcgagactcagcatcttctgtcccccgcattaatgactctcaggaaggaggatgtaattcaaggcaagtttctaattccaagctgcctattcatgttaacaggacttctttttattctcaagatatgctggttccctggcaccttaagggaaatcctgataaaggcaaacctgttgagccatttggtcccataggatcccaggacccaagtcctgtgtttcatcgttactaccatgtgttccgtgagggagaattggaagctctctgccggactgtgagtgatgtcagaattctgcaaagctactacgatcagggaaactggtgtgtgattcttcaaaaggcctgattatttacctgaacacatcatatagaaagaagaaatgctcacttaaaaaaaaaaaaaaaaaaa

SEQ ID NO: 7809 - DNA, 3072 bp, Macaca Fascicularis
ttttcttttctaaacagtgatttttcatctgaatcattggaagtaaaacttctaacttgcaggaaccaatgaattggtcatcagcagaaaaaatagttaacatattaagctccttttaagaattattgtaggaaatgacaacaattatggcagttgaatgagtttgtaagcacttttggtcataaaggataaagtttatttaaatagaatacaattaataaaatcttcacataaacctaaatggtatgaagatatgcttttaattatatgatagaaatcaccattgatattgaagacacggaaatggaatacatttacagacagagggcttcattttctagaacagtacctttcttagctcattttagaagagctatgtatttggaaggtcggtttgttgtcccagagactgggactcaataaggtctccagccagcagcaccatctctgtcccggcagcctctttctctctcagtgcacaatgagattaatctcaacatgatagagcacttgaccttgcttgtatcacaaagatcttgttagattatgcagctgggccattattagctcagctttctccagctggtacttgatacaagaggcgtgacaaggtcagatgggggagctagcaaagcgctttggtttcatttgagctaacagataatcatctcctaaacggcgcttctttttaattatgcattttgcacatgaaccttgcattcaggtaaaagaaggtttcagtatggaatgaaataggcttctctatcaagcttctttgcagctcatctgactgagtaatcaccatcctttgaatttggatacaaatacttgccttgaagatcaaagtgtcaggcttatgttaacaagggcttggcatttgggtgtatttagcagatcaccacattttgcttatgactcttaactttttctctaggttttgatttgaagtttttaggtcaggtatgatataatttttatgggatgacaaacattgcatataaatgatgttagttatccatgttatcccacttaggcaaaggagcatttgtttttaattaatgatattgcagaaaaatgataactatacagtattttctaatatcttttgtgctttcaattaatttctccgccagaagttggactcctctaataaccagataagaatcctgacaggcatgttttctctgttttcttaagtattgctatcaaaagtattctttacctaattgtaactgatgtcaactgagttttcattattttgttcagtctacataaaaacatgaatacgactttggatatttaatttcttctttgcacaaatgaacaaatggaggcagatagaagcaaaatgccttttctgataccacacactcagttcatttagtgagatattatagtaatctgagttttttctgtccacagatcaaagctatttccctccaaaactgtgatatctgcctatctcagatacacaggtattgtctcttaactctaggtatggaacaatgttcctaactctctatttatgttagaattacctggggagctttaaaacataatttccttggccttgttctagaggaattctaatttaattggttgagattaaagtctggacattcatgtttacaaaaacaggcaactctaatgttcagccagaggtgagaactgggcatctagaacaaaattaaccccactttcatggatagggtctgtaatgtgtgtacgtttcagacagagtagaagataacttgttcttagatgcatctggaaagagctgttgatttatcttgcttctattgctctcctgaaaatgtctcagaaaacatcacctggcgatggggggcaactaccctgggcctcccaggtggctctgtcgccactgccgtgcaagaacattgatgtccttctcaaggctgagatattccttgttgacgctgatcgcctctgggagcttgaactcttcagcagctggaataccctctacgcgtgccaccagcctcactcacacaatagagttttggtagaactctcaacctctagttttcagaggctcagctcaagcgggattgtgtcttgatgtataggtgggaaaatgtgtggggcagagtttgaaaggtcactaaagtcattgtggtgccaagtgatcaatgcttctctaagtcttgtaatgtatttatctgcagacatgcatttccctgaaaaatgacctgggtcccctgatgattggctgtgtttatgttcagtgaatcagtatcatgggagtgtagccactgagggcagaacgtttggaattagatctgggtttgaatctctattctgccctccctccttctgtgatctttggctgtacatctgtctgtaagtctgtcccctccagagactagggctgatgacagccatcttagaggcacctgattaaggcttccgtaagtgtctcacgtgtagtaggttttgaatcatcagtagctgtcgttagaagatacgtctccccgctcagcaaactgtggcctgcgggccaaatctgactccagggattttggtaaataaagttttcctgcaacacagccacactcagtcgttagtgtgctgtctgtggcccgctttcaaacctcagcagcactgttgggtagtgtgacagagaccgtatggctgacaaaacccaaatatttattatctggccttgtaaagaatttgttgaatcgattacattctaaatcgctgctgccacaactagcacataaccaatttagcatcatagtttgtttaaaaaatatataatgggcctggtgcagtggcccatgccactttgggaggctgaggcaggcggatcacttgaggtcaggggttcgagaccagcctggccaacatggtgaaaccccatctctactaaaatacaaaaattagctggacatggtgatgcacgcctataatcccacctactcaggaggctgaggtgggagattgcttgaacctgagagacagaggtttcagtgagctgagatcacaccactctgctccagcctgggcaacagagcaagactctgtctcaaacaaaaaaaaaaaaaaaaa

SEQ ID NO: 7810 - DNA, 761 bp, Macaca Fascicularis
  misc_feature (1)...(761): n = A,T,C or G
cagggaaggcacatnntgaagatgccacaaacagctggagacatnngcannnnnnnnnnnnnnnnnnnnnnnnnnnnnnnnnnnnnntcttgcaatcttcccacatccagaacctttccatcctctgtctaaaaatagcagttgtactctccacataacccctctctcgnnnnnnnnnnnnnnnnnnnnnnnncgatgnnnnnnnnnnnnnnnnnnnnnnnnnnnnnctcagccagctatgtgcagtttcacatctgggagaaatagtgtttctgtgttnnnnnnnnnnnnnnnnnnnnnnnnngagtcctcaaaagtaaacagcttaatatcagtgatgttcaaaagaaacataaatgtccacagcagaagggcttgtccttggcaaactctgatatgcaggagtagccataacccacgtggctattctgtgccaccgaggccccttctttctcagcagcccatggtgctgtaggctcactggtctctccctttccactccaagagcagatatattcccccttgggccaaactaattttgactgccagtggtccaccaggctcaaactcttgtctgttatttgctacctaagaaaggcatcttagaagcagaactcagttcttgaatatcagccccagagcataaattcagctcattttcacattttgtatatcacgtatggttccttccctggtacctttggttaatatgtatcttttgtcagttggacattgcactgcctttcctttggcatactcta

SEQ ID NO: 7811 - DNA, 748 bp, Macaca Fascicularis
  misc_feature (1)...(748): n = A,T,C or G
ttttttttaaacactttttgaagtagnnngagtgtgnnnnnnnnnnncagacanctgcatgtggnnnctgaaaagtaggcattgaaacagacttctttgtagtcagtgttagtaaaacggatcctgtgtgggcctcattgtnnnnnnnnnnnnnnnnnnnnnnnnnnnnnnnnnnnnnnnnnnnnnnnngtgtgacacaggcactggggtgtgcatgtttctctaactgtccacacatgcacataggcagactttctcatagaatattcttgaaaggtgnnnnnnnnnnnnnnnnnnnnnnnnnnnnnnnnnnnnattaaaacagcccaacacagtccgacctctcagtacccacgaccgtcgaaaatggatccttagtaccagacaatcccagtaatgaaggttgagtttcctcgaaggaaactacagaaaaggaaagaagcagaattagaaaggagtggtacttacacgtttggtgtgctgctcacgtgaagtcggcccacaccagccagaccctcgtggaagatctgctgcaaccattatctttgttcttgattcatcatgcatttaaaatgagatgcaagagcatttagcatacaatgtaaatatggaccttttaaaannnnnnnnnnnnnnnnnnnnnnnnnnnnnnnnnnnnnnnncatcttagctattagtttcttcgtgttgtcttatcaaagtttaatggatacagttccacagttgttgatgtgtttgtgtgtatatt

SEQ ID NO: 7812 - DNA, 738 bp, Macaca Fascicularis
  misc_feature (1)...(738): n = A,T,C or G
agccatgggnnnacaacagctactagaccactgtccaggtgacagtgctattgtgttctgccnntctaaggagcagcctgtcgtgcaataaacatctatcaagccttcttgtgtgcccagcagataccccagggcatctgccttgtgaaaagaccaaagattgcaaaaaggtgggctgtgcaattgtgaaaccgtctgaagacttctcaggccttccacgtcttcttccacaactgtttggtgagggaggtggttacctaattatcgttctctgtggaccctttgagcagcccactgttggacttgacagcagaacttagtcctgaggtaccgccatctatttgttgcagttacagagaccaggccacactgcatggaatagaaaaaccttattcagtccaacagacgtttgttgagctccctactaaagaaaggaaagatcatgagaggaggagaagataaagagagattgattgatgggaacaaatgcagtttgatagaagaaatacagccaagcgtttgatagatcagtagtgtgacagtagttcacaattacctattgtatatttccaactagctagaagaaaataattcaaatgtttctagcctgaagaaagacaaatatttaaggtgatggatatttcaattacactggcttgatctttacaaattaagtgaatgtattaagttatcacatgtaccctgaaaatatgtatagctattttgtatcaataaaac

SEQ ID NO: 7813 - DNA, 729 bp, Macaca Fascicularis
gtaagcccatggagtatattgtgccatgcaccacatatacgtaatatttgggagggggatagggaggggaagtttcaaggttcagatatttttaaccaatctatatttgaaatcatgccattagctttaacaatgttaaaattgtgtggtgtaaatatatcagaaaataagcatatgggaggcagtaaatactattttaagctattaattgtatgctaaaagcttctaaagcacaagtgcatatttttatactgctcttttcacaactctgtgatctacataaagtcagacttgagattttcttttctcttttaccagccgatccttcctatgtattatattagaccccgtaaacaaacttcgtttttctttctctgtacttcatgctgcatttttaaaaagtataaacagagactgaattaattgaatcagtaattacttttttccaatacaaattggaatgcagaatacttggaacttgtacatggggaaaaaatgacttatcactacataatgtgccaatgtttttttctatgttttgtaccaaaaatggaaaaatatgacaattccatgcaaagaaatgtatctaaattatttttgttagatgataagagaacttgcttggtcaggacagcagccagctttgtattgtaatgctgtatgatgtaaatgtgatgaaaatgtttttgtgcagtacttgtaagggacattcctacagccatttttcat

SEQ ID NO: 7814 - DNA, 725 bp, Macaca Fascicularis
  misc_feature (1)...(725): n = A,T,C or G
ttcagtctgtannnnnnnnnnnnnnnngcagtaacttgtacataaagtgctagaaaatcatgttccttgtcctgaataagagttgatcagagtaaatgcatttctggagttgtttctgtgatgtaaattatgatcgttatttaagaagtcaaatcctggccttgaagtgctttttatacagctctctaataattataaatatcctaaagtcatttcttggaacacaagcggagtatgccaaattttatatgaatttttcagattatctaagcttccaggttttataattagaagataatgagagaattaatggggtttatatttacattatctctcaactatgtagcccatattactcaccctatgagtgaatctgaaattgcttttcatgtgaaatcattgtggtctgtgagtttacaatattgcaaactgtgttatttcatctaatcaattgcttaatgagtgtgtttttccatgaatgaatataccgtggttcatatgttagcatggcagtattttcagatagcttttgtttgttgggaagttggggttttggggggagggggtgtattagtacgttgcatgaaatagcttactttatgatgatggaattgctttttcttttgtcttgtgatttttttttttgaagtgaaatttaactttttgtgcaagtagtactattatacccatcttcagtgtcatacttgtattctatcacattccat

SEQ ID NO: 7815 - DNA, 579 bp, Macaca Fascicularis
  misc_feature (1)...(579): n = A,T,C or G
catgtgtagatattgtgtatagaaaataaaataaattannnnnnnnnnnnnnnnnnnnnnnnnnntcttgttatttttcggcgttatcataatgtgtttattgagagcattttaccttccagacttctcatggcnnnnnnnnnnnnnnnnttttgctccttagannnnnnnnnnnnnnnnnnnnnnnnnnnnnnnnnnnnnntgactgcatttctatcatttctcagtttgttagtatatgtggatagtattctactgtataaatgattgcaaagtttatcaaaaacaaattattctatgtagcttttctacagtgcnnnnnnnnnnnnnnnnnnnnnnnnnnnnnnnnnnnnnnnnnnaaagatacactcttataggggacagttcctgtttactcccaggaaatttttttaaaagatgacactgaatgtttattgcactttagtgcagtgaagtggcaataaaaactaacatgaatcaaaggttgtttatggcagatgcatgtgttgctttacggagtttagcaaaagctcttaattttatgtcatactgtattctnnnnnnnnnnnnnagctaaca

SEQ ID NO: 7816 - DNA, 739 bp, Macaca Fascicularis
  misc_feature (1)...(739): n = A,T,C or G
accagcccacaacagcctctccttcccctccacatactgcagcctccctccatgtatcccacatacaagcactcccctactccccagcgtggcctcactgtcttctggtcttggtgctactgaaattgtcacccagaacttgaatcctgaccctccccactgcaagcccagggagccccagcccaagannnnnnnnnnnnnnnnnttggccagggctcctcttgaggccgcgtacccagggctggctggcctgccatttgcttctctctgagacagccgttcttctgcaaccacgccccatgccgagccacaaccccaggctgcagctgctcagaaggtccgggcgttttgtttctggtgaccggatatcgnnnnnnnnnnnnnnnnncttcctgtcagggcttgtctgggnnnnnnnnnnnnnnnnnnnnnnnncttaannnnnnnnnnnnnnnnnnnnnnnnnnnnnnnnnnnnnnnctagctgggctactttctaacgctttgccatagctcggaccacttctcatcgttcagggatcgagtgcaaccttcagtaacttgccggagtgtacattctagtgtggtgtatactggtggctgtttgttgatgatgatactatcttttttttttcctggtttttttgtttgtttgttttttacaattctctgtagactaggagaagaagaatgcttgtgttttttggaagtgtgatgcttctctttgactgccaaactct

SEQ ID NO: 7817 - DNA, 1568 bp, Macaca Fascicularis
attatcctaggtcaagatgacttcctcatcaagacctcattctgttttcacagccctgcagtggagagatttattgcgtttcttttatgcaatcaaggcagactttgatacgaacgcggggagagacagagtgcacctgaagctggcccacaaggaacagtcggccccgggcacttgaaggagaagagaggcttccctactcaagtcgctgtctcctgatagctgaacattccagaagcaacctctaaggagagaatgaattctaaaagaatgctgttattggttttatttgctttttcactgatgttggttgagcgttatttcaggaatcaccaagtagaagaacttcggctctccgactggtttcatcctagaaaacgccctgatgttataacgaaaacagactggcttgctcccatcgtatgggaagggactttcgacaggcaggtcctggaaaaacattacagaaggcggaatatcaccgtgggcctggcgttctttgctactggcaggtttgcagaggagtacctgaggctgttcctacactccgcgaataagcacttcatgacaggctaccgagtgatcttctacatcatggtggatgccttcctccagctgcctgacatacagcccagtcctcttcgaacgttcaaagcatttgaagtggacgctgagaggtggtggctcgagggctccctggtgtacatgaagagcctgggtgaacatatcaccagtcacatccaagatgaggtggatttcctcttcagcatggcggtcaaccaggtcttccagaatgagttcggggtggagacgctgggcccgttggtggcccagctccatgcctggtggtatttcagaaacaccaagaacttcccttatgagaggaggccgacctcagcagctagcaccccgtttggacagggggatttctattatggcagcttgatggttggtggcacgccccgtaatattttagacttcatcgaggaatatctgaacggagttattcatgacatcaaaaatggactcaatagcacctatgaaaagcacctgaacaagtatttttacctcaataaacccaccaagctgttatcaccagaatacagctgggatcttgcattttctcctcctccgcagatccaatacgtcaaggttgcacatgattcccacaggaaattatgaattacgccattaggtttatgtcgaataaacgaatcacggcaatttcttataaatgagggaagtcttaaaaccctccattttttagagacatacaaatgtacatccttcccaaataaatgtttcttcttgccattttgagccatcttatttggctaacataggataaagaataaaaggataattacttcacatgaatacacagtaatgttattatctatgtattgtagataatgtgaaaatgcgtttgacatagaatgaattttttttaatggagaaagactctagttgagaaaagacatttgtaaaatggaaaagtagctcatgcaaaggaaaaaataaatgccagctactcattaaaaaaaaaaaaaaaaaaaaaaaaaaaaaaa

SEQ ID NO: 7818 - DNA, 724 bp, Macaca Fascicularis
  misc_feature (1)...(724): n = A,T,C or G
gccccaggtgcccattcagttccaccagcagagactgggccatggactcatcanctcctgtcccggggcccggccagagcatgccgtggcctgggacaaagaccgccagcacctctaccgcacacagtacctgaagggtgtcaacaggtccatgagggtgttcattgaccacggcaaccagctccacatccgcttcacccagctggatgaccggggcatctactattgctggaggcagggtgtgcgagttgctggcttccggctgggnnnnnnnnntcgtgggcgctacccagcctcattgtcggatcccgagactcgctcggctgtggagctcaccnnnnnnnnnnnnnnnttcatcacggcagtcttcgtcgccattcacctctgtcgttgctgctgttacttatttcagtgttgtcccaacttctccccttaggttctctctttccccagctctgaagaccagttgtccttcaatgtgtttgttaaatgacaccagatgtctctgggtgggtaccttggggtgggacgtgtggtaggaacatgtggacaaatctgttagttatagcctgctccccattttcatgggcaggtctggggcctgatctgagaagtggagaggcttgaggctggtgggagattggggactgaggtcaggatggaagtagttagggtacacgtgtttcctgacttcacacttaggtcagagaaggaaggcgtgaac

SEQ ID NO: 7819 - DNA, 1763 bp, Macaca Fascicularis
actgcttttccaggcctgggcagagagagggctctcccatctctccaccgtcctgggagtgccaagagtcaatcgcctcattgctgaccctgtccaactggccatgcctgcaaccccctaggcccctccacccatagaccatctcgctgctgagagattgaggacctgcccccacctggccaccctcccccttccccaacatccagaccccagggctggtgtgtggcacccctgagaccacattgacctccatactgtccactaaccataaagactccaagacgcccaggccaactgtctgggcaggactgatgcctgatcacccacttataccaggtactcgtccccaagattgttaaacaaggccagacactcctggcctcaagaggatgggactgaaaaacaaaaagaacactgaagacccagaggatcccctggtcgcctcccagagcacggaacctaagatgggtcacctgtctccctctaacaaggagaccatcacggtcaccctccatggagccaccaacctgcctgcctgcaaggatggttccgagccatggccctatgtggtggtgaaaagcacatctgaggaaaagaacaaccagagctccaaggcagtcacatctgtgacctcagagcccaccagagcccctatctggggggacacggtgaacgtggagatccaagctgaggatgcagggcaagaagatgtgatcctcaaggtggtggacaacagaaagaaacaggagttgttgtcctacaaaatccccatcaagtacctgcgtgtcctccacccctaccactttgagctggtgaagcccacccagtctgggaaagctgatgaagccactgccaagacccagttgtatgccacagtcgttcggaagagcagcttcatcccccacgacatcggctgcaaccacacagctctggagatctttctccggggagtcaacgagcccctggccaacaaccccaaccccatggtggtgattgcccgggtggttcccaactacaaggaatttaaggtcagccaggccaacagggacctggcctctgtgggactgcccatcaccccactctccttccctatcccatctgtgatgaactttgacgagcctcgcatcagccagaacggatgccctcagctgtccaagcctgggggacccccagagcagcccctatggaatcagtccttcctcttccaaggccgagatggagctaccaacttctcagaagacacagccctggtgctggagtactactcctcaacttcaatgaaaggcagccagccgtggaccctcgaccagcccctgggcatctctgtgttgccgctaaagagccgtttgtaccagaagatgctgacagggaaaggcttggatgggcttcacgtggagcggctccccatcatggacaccagcctgaaaactatcaatggtgaggcccccacagtggatctctccttccagctgctttcctccgagtgtcgttcacccaggtttctgacaaacgtgctgaactcatcagggatgaggacagggctcctgggggaggggagatggtagagccctgtgaacccatcactcggcactcgcccctcatgacagctgctccaccagcttcacatccataaagacatcaggaggccttgtcaagtgctgaagataaacatcgccagcaccacatttggtctcgctgcaattttccgagaataaagaaatgggaaaagtgaaaaaaaaaaaaaaaaaaaaaaaaaaaaaaaa

SEQ ID NO: 7820 - DNA, 480 bp, Macaca Fascicularis
gggctatgccaccttgcccgactccgttgaggtgaattctcatgaacctccttccccgtcccctgcatcgggttggccaccacgtgttgtggcttccatcgcagaaacgccgccttgcctcccttggcattcccgctgctcatgccaatcgtcacgctctcgcccgctcgctatggagccgtctctggtatgccggcctcttgtcctctttctcccatgccctcacctggaacattcctcaaaaccacctctgaccacccacgcccatcctctgcttaaccagccccagctcatcttaagcataagatcctccattacctaactgacttccttccctggccttggcttttgcttctccccttactctcccacaccagttttggaaagtccagtgttccctccgataacaattcctccccagcaaggcttaacaaaatgaaacttctgggcatcccaggtcagacgtccctgcttctgtgc

SEQ ID NO: 7821 - DNA, 2512 bp, Macaca Fascicularis
  misc_feature (1)...(2512): n = A,T,C or G
gtgaatgcagtagtagagcagtgtctatattcaacaaggaagggtgtttggagattgtgttaaagtatttaagtaggtttcctaccaatgttgacctggctatttcagtagcatattgtttgcagacagtgactgaggataacccagagctgctgaagtctttcagtgctacagcattgaacgtgctggaatcagcactgctttctcctgttagttccatggaatcccttctattgaagacattggtagcaggcacaatttggaatctaaaggacattattccatgcaagagtcaagcagaaatcataaatgccttactaaagatcttatctgaagttttgggaatggatgctggtgaaacagttattcaaatgaaagagactgaaacgcaaaggttaaaaactgctgcagaggctgaggaaatattagagaacactaatggggatgatttgattgaagatgatgaaatggaaggaatttctcataagagaaaagtcagaaggaaaactttcgtttcagatttacttccgcccactgacaaggagctgagagagactatagcattgctgacagctcaacagactgctctggaaattatcgtcaacatgtgctgcaatgaaggtttgttaacagtttacatttagacattttccccctgggccaagagggaaactcccgtggagattttcttaactattccagttctgcgtggtttgcccgcttcccagatccctctgatgacgaatgggaagaactttctagcagtgatgaaagtgatgcatttatggagaattccttcagtgagtgcgggggacagctgttctctcccctctgcctctcccatgaggttcacactgctctcaccaactacctcatcccaaagaaggtaatccgttttcattctaggcttaccgtggagcgtgggaaaggcttaagcaaggtattcattctgtgtacaaaagaagcaagctcacactttcaggttgtagattgtggtaagatctgagacaaagctgagctaatagtactggaagtaggtgaaaaggtcattctatatgaagcctaaccatttcacttaggagtaatattttggaattatataagggaatcatgtgttaaatgactactctttaacttttgctttactgcctcttttaaatctagatttttgagaaaactgcctttccaaacagcattgcagttgacctatgttctaggaaccctacttggaaacctttgattagaaaaatgaacactattcagtgcagagccctcttctgtctccagagtcttgtgtccctcctggatgtggagcacctgggaggagccgcagcccttcagacacttgcacagcatctgtcacagctgcttttttctcaaccagattttgctaaacacgctgactttctagaagccataagtagtgctttgagggcccttttgcaaacaatggcctccaagaacatttcccagtgcatgactcctgatcagctaatgacattatgcaaagcaggcattcatagtagtaatgtcggggttagagtgaatgtcgttagcattttaggaatcactggcagcgtccttgccaaagaagatggtacacttgaaacccttaagaatattgggtgctttctgcttgaggttaccaccaaagatccttcccttgtggtagcaggagaagctttggatgccctctttgatgtttttgcagatggtaaagaagccgaaagagcctcgattcaaattaaattattatctgctctgaaagaattccagccggtctttaaaatgaagatacgtaaagaagggagaggtaactatagcacagatcagctgtgtgttcttgacaatgtgaaaatgaatttgagaagatttattgcttatcaagaaactgttgagaaaagactgacttcttaatcccaaaaagaaacagttcttccnnnnnnnnnnnnnnnnnnnnnnnnnnnnnnnntgtgcctggccagaaacttttttaagcattgagatctgtgtgccgtttctagcgctctctaaattatgtctctggcatattttaatcactggaaattcaaagagtggaagagtggaagtgcaaaggaatctcaggtagctcttaactaattcaccagcagtgaagaaacttcaaacaatcatgttttccttgaattttgcaaaacaagaaaatccaaagcattgcttggatggtcttttaaggcattttatatcagctgaaccttaaactgaaatatgaagacaagctttataaactagtttttttatatgaagtataccgcttatgtctgccttttgtgaagaagtgaatgagttgaatttgtatttcacttactagattatactaatgagctaatggggtcattgccatcctccctactcatgactttgatgatttattggtgtaatatcacttcttgatttaatttgatatggaatcagaattgggagaaggtatttttaaataaacaactttttgatggaaaaaaaaaaaaaaaaa

SEQ ID NO: 7822 - DNA, 719 bp, Macaca Fascicularis
  misc_feature (1)...(719): n = A,T,C or G
tgaacaagcgcttacgtgatatgactctgttttccttgcttgttttttttcaaacggagaaacatnnnnnnnnnnnnnnnnnnnnnnnnnnnnnnnnnnnnnnnnnnnnnnnnnnnnnnnnnngctctggggaagagtgcagccccggagaggtaactgaggacatgagcaaccggtgccagggagggtgggannnnnnnnnnnnnnnnntcaggggacgggtggtggtgtctgtcagacacacacaggtcgccagtgacttcacacacacctcatgtgagaaccatgccttttttagtgtgtcctatttcatacctgtacacacttcctcgttttgtaatgagatttacttacacccaaacagatcctgaaagaaagcttcaagttttctcagatgatggatatgttttcactgtattcaataactgaccgatgtaaggtgcacgtttcccgatnnnnnnnnnnnnattccagctggtgatcaagtctgggaatagccgtaacaggtcaaccttgtggagccatcgcgagttagagggtgaaagatggcagaaaaaaagtcttgtgtgtgagtgtgttttttgagtttgcatcaatcttaatgtctcttcataatacttttataatacattaagcctcttgtctacatatttggagagaatatgactttactagcagagaaatacaatatatcttgtctactggactgtaaaatatat

SEQ ID NO: 7823 - DNA, 1218 bp, Macaca Fascicularis
  misc_feature (1)...(1218): n = A,T,C or G
aacagacaagtgtacttcacantactagatgttaaaactatatgattgtttggcatatactgactgactgcaatgtttgtggtaaatagggaaaagaaatatttggttggagggataattcgatcgaatcacctgaatgttctatgtaatgtaaaatattcttttcttgctttcttgtgttaaggtatatattctatttgtatggaattcttattcaaatacagttctattaaagaatgtactcctattggatgaaaaaacctatttttgaatagtagttgcagcttgtttgtataaatactaaaaaatatcttaacagattttttcccccttaaaatgaattatctttccaaagattagactcagtagagtaggtgaggaacatagtgtgtataatataatctttatttgcttatctgaccactttttattaagctgttttgtttaaaagcttttggttttaggcatgaatattattttgatggttaacttcattgacttatctgcagttgtcattttatagtactttacagttgtcaaaaaaaaatctcatgttgacctagctgatctgtacaggaagcttgtgaagtaggtaggacaggttatgattcttcactgtatggacatggacccaggttggcttgcccaaggtcacctgctagctagtaaggtggggataaggctcaaagtaaaacttttggttcagaagcctgacttataaactatactatatcttcccaaaaatgtcagtattgacaacacagtctaactctttaataaaattacgctaattaaagcagttacattcaaaataatgtctataaacttacttgtctatactagtagaagtgatcagtgacatactataaataatcctaaatggttatatttgatggaattcataacacacaagagaaaatttcacattaaaggaaaggaaggtttaaaaatctattttcaggttataaaaggtgtctttactggttttcattccttttatctaccatgtccaatatttggtcttttttgaatgtaaacttgttacactcaaacatgtaaacttgttaaaaatcaaaatcttactgattatacagggggaaatgaagcannnnnnnnnnnnnnnnnnnnnnnnnnnnnnnnnntaagtttaaaaacaattcatgttcaaaggagcnnnnnnnnnnnnnnnnnnnnnnnnnnnnnnaactaatggacaga

SEQ ID NO: 7824 - DNA, 710 bp, Macaca Fascicularis
  misc_feature (1)...(710): n = A,T,C or G
gaggcaagattgatacaaagttaaaaattttatttcactgcttataaaatacttaatcagaacacttattttaaaaaataagatcttatttaaaaaactccaaatttgatgggatagttacaccatcatacaattttaaaggtagaattagctttctaatactttaaaatattttctgaaatgaacatttgacttggtttaggacagtgtctataagtaaaagacaccaatggtaacagatatgacttacaaaactgccacatatcgaaattgannnnnnnnnnnnnnnnnnnnnnnnnnnnnnngagaagagaggaagagaaaaaatatgaaaaaagtgtgacattgtaatatttattgtatttaataaatcttgaagaaagaattattgagcaatgaaccagtgacagatataaaagcctgttttatttgatgacatcattaactgagttttctgatctatatattcatacatcgagaaggaactgtcttaaaaaccagtgggttttttttttttttttaagttctagcatacatgtgcagaatgtgcaggtttgttacacaggtatacacgtgtcatggtgnnnnnnnnnnnnnnncaacctgtcatctacattaggtacttctaatgctatccctcccctgtgatatttgttaatatgcttttttaaaaaannngtctgcctcgaaacaggtagttaaaaaatatc

SEQ ID NO: 7825 - DNA, 755 bp, Macaca Fascicularis
  misc_feature (1)...(755): n = A,T,C or G
agtgagggtgacatgcagaagtgtgtgtttggtggttaaggcggaggtncccnacgtgttgnnntgcgccacatggagcgctgctatgccaagtatgagagccagacatcctttgggtccatgtaccccacacgcattgaaggggccacacgactcttctgtgatgtgtataatcctcagagcaaaacatactgtaagcggctccaggtgctgtgccccgagcactcacgggaccccaaagtgnnnnnnnnnnnnnnnnnnnngtgcccccttgtacgtgatgtctttgagctcacggnnnnnnnnnnnnnnnnnnnnnnnnnnnnnnnnnnnnnnnnnnnnnnnnnnnnnnnnnnnnnncgtgcggaagtggacttggagcgcgtgcgtgtgtgnnnnnnnnnnnnnnnnnnnnnnnnnnnnnnnnnnnnnnnnnnnnnnnnnnnnnnnnnnnnngcggnnnnnnnnnnnnnnnnnnnnnnnnnnnnnnnnnnnnnnnnnnnnnnnnnnnnnnnnnnnnnnnnnnnnnncgaccgctgagccttctggccnnnnnnnnnnnnnnnnnnnnnnnnnnnnnnnnnnnnnnnccggtgcccatgtgtccgttcctccactcatctgtttctctggttctccctgtgcccatccaccggttgaccgcccgtctgcctttatcagagggtctgtccccgtcgacatgttcagtgcctggtggggctgcggagtccactcatccttgcctcctctccctg

SEQ ID NO: 7826 - DNA, 625 bp, Macaca Fascicularis
cgagtgaattgctttctgcggttggggagatctactcttctagagctccagccagcggggcgaccctgcagtggcaggactcggcaccgcgccttccaccgccggttggtggcctgcgtgaccctttcctctcgtcgacatcggaaggaagccagacgtgggcgggcagagaggtcggctcgctgaggggtccggcttcatcccagtaggaatggcagcgccatctatgaaggaaagacaggtctgctggggggcccgggatgagtactggaagtgtttagatgagaacttagaggatgcttctcaatgcaagaagttaagaagctctttcgaatcaagttgtccccaacagtggataaaatatttcgataaaagaagagactacttaaaattcaaagaaaaatttgaagcaggacaatttgagccttcaactgcaaaatcctaggctattcataaagattgaaagtattctttctggacattaaaaaaagctccactgactatgggacagtagtagtttaaatgatagtgaacatcaattcttgttccttgtatccgacacttgataattaagatgatcaagaaccagatctgtgaagaattgaaataaaatggtatttagtaa

SEQ ID NO: 7827 - DNA, 711 bp, Macaca Fascicularis
  misc_feature (1)...(711): n = A,T,C or G
ctnnntagttgtgatttgttttcattntnnnaaaaggtttgactttggaattcatggcagcaaatgtcgtgacatcaaggtgtagtatacaatttaggggctactttcttctctgccttcctgaggctggaggtgtggtcggaagcttacttgggtctctggtcaatatctgcctctctcgttcttttcccaagaccttggttccnnnnnnnnnnnnnnnnnnnnnnnngggatagaatattttagcctcatggaaaatatggaggcccaggctgagtctgcattctccacgcttaccaaacccccaagaagcctccctcaggtgcagcacactctgccaggcaggttcgcgttcccnnnnnnnnnnnnnnngagggtctagagaagcagcaatatataaaagcagcagcaatatataaaatctttagcaggaacaagaaaatgtgatttgattcttggcttaatgnnnnnnnnnnnnnnnttttctgagctcctcctttggcctcagcttgctcatctacaggatgagggagtaggtgtcagtgattctccaggccacttccaaccctccctctcaattctcattactattacttgttaatatttcttcggattcagtctggaactaggtagagatttggttttcttttctgctttgctgcttttctgctcctctctgagcttttaatcctctttttatcaaattgcctt

SEQ ID NO: 7828 - DNA, 831 bp, Macaca Fascicularis
  misc_feature (1)...(831): n = A,T,C or G
caataggatctttagcancnnnnncacatcatagaaggtgcaatcactcactttggaacactacnnnnnnnnnnnnnnnnnntaaaattgagtagcaaatgaaaaattaaaagaaaatttgaacttgattattaatatcaattaaaatgctttatttattttattaaaagctcggtattttctgtgaattcaaaaatagttcaaagccaaagccaacttcaaataccatgaccaaatttacatgattcatattcattatgcattacttggtatacagacttattttcataatgcaaattaatataaaatgacatttttactgcactatagaaatattcgtgtatgttaaacttttctgattgaggctaattggaaaaagctggggtctttttctaagcactaaagaaggctgcttctactctatagaacccagggctctgaaatagctctagctgcctaatgaacttcacaggtaactccccaaggtaaaattagactcttcttggtttgcaaagaaaaattaggacttaacacttttttctaaaattttataattgaattccaaacgtctaccctattttatactgtttctacaaaatattccttataaaaacaaagaacaaaaatggtatatttaatgaattgacattttataaccaannntgtttttatctgcagtgggaatctttgatgccagaaattataaagaggttctgtaccttcacactttgaataagcataataccataaaaaatgacacttgacatgtcaatgtgtttgtcatttcattttaaactcgtatttgtggtttttcccagataaaaatgaaat

SEQ ID NO: 7829 - DNA, 179 bp, Macaca Fascicularis
tgcacaggccccggtgtgtgttttcacacacaagaaaagcacagcgagagagagtgtgtgtgagagtgagagtgtgtgtgtgtgtgtgtgtgcgcgcacataaatatccgcacatgatatgtgagtctctctccacacacaagaggaaaaagacctctccacacccatatgggggacac

SEQ ID NO: 7830 - DNA, 749 bp, Macaca Fascicularis
  misc_feature (1)...(749): n = A,T,C or G
gaggtnnnanntgnnnaacatgaggatccaagtgcnnnnnnnnnnnnnnnnnnnggggttttatacattggcatggttccagggtttgtgtttttcctcccttgattttccccttggggcaggctgtctgtgtgcacagggacctgccagcacttgggagggactgtatgtgcagtgtgtttactgaagttgtgtgtatgctcatttgaggcatttttctcttaccagtcgaacattcccagaggaaggtcatataccagttcaactcccattttgcctcttagtgcacatgtgtgaaccgattcgcccnnnnnnnnnnnnnnnnnnnnnnnnnnnnnnatcactagctctaggtattttctatctactgggagactgcgggtccctgnnnnnnnnnnnnnnnnnnnnnnnnnnnnnnnnnnnnnnnnnnnnnnnnnnnnnnnnnnnnnnnnnnnnnnnntgacgacctggtaggggccctctcctgccctgcccagttctgcctaactaccactctaacgtattgatttatatcttgacctgcaacttctgtctccctaaatgtgtgaaaccaagctgtaannnnnnnnactttctcaggacctcttnnnnnnnnnnnnnnnnnnnnnnnnnnnnnnnctggctcagaatgaacctctttaaatatcttacagggtttggttttgttcatcaacatggttgtgaatatggattatgtttattggttaagagacagttaacttgaaaag

SEQ ID NO: 7831 - DNA, 533 bp, Macaca Fascicularis
ctgccccccaaaaaaagaaattttcaaaacacatggctggcgtgattgtatctgaaagggtaaaggaggaggaaagctgggacgcctgtgtgggagcagagctgggtgtgggagtgtccacagacaccgctgtcctgcagggtggggagtgggcacctgtggccccaggcaggttccttcccacagctgctgggcttctgggcctgccctggtgcctggaatcaaacatggcaaggtggggagggcaggggcagtaatgctgtttgcctgtctgcattctcgtgtcctgagaacggccaggtcccctgtcagcagctggctggttggctcatgttggccaggcagcttccaggctcggcctcgggctctggctcctcggcgaagtagacttgccagtccaaactgctgacccagtcctcgtaggcagggagcgcggtgaagaccgccggcctggcggggccttggcaagcatctcctaagctgtgcagcccggtcaggaaccacgtgcccctcacctcatgcaccagtggtgc

SEQ ID NO: 7832 - DNA, 782 bp, Macaca Fascicularis
  misc_feature (1)...(782): n = A,T,C or G
ttcattttggnnncagatcatattatattttctttatcaggtggtacatctgaccattatttcaaaaatacaattaaaaannnnnnnnnnnnnnnnnnnnnnntacttacaaggatcacagaaatcttttatactaagggttttaatagtaaaacttggtgagggttctagaagttttaaatttcaaaaccaatcaccaattttttaaaatgtaggcatgcctaaacaaaagtgtcaataaattagaataaatataacttcaagtaaacgagagcacaaaaacagaaacaaacttacggtcaaatgttcatgaagatattttggttttggcctcttaatcctagatataatgcgtttttttcctttgacttcactatggaaaggtacacatatttattctatcatctgatgttaacagtactgtcagggatttaactgtggcatgtggggactaattatttaaaatttcatttgaaggattagtttgctataattttttgtctgcatatgtgcagatgcctagaagtttagacttcactttcacctttaatcaggtaaaaatcacaactataatttagagacatagtttaatttggacttctggtcctgatcagannnnnnnnnnnnnnnngagattttacttttatcctaacccagttaacatctatatttcagaagtgtgaggctccttcctaaggcatctccttaaattttgccacctcccctaatctactacagtcttatttctattccccacagnnnncatcacttctctaactcat

SEQ ID NO: 7833 - DNA, 592 bp, Macaca Fascicularis
  misc_feature (1)...(592): n = A,T,C or G
gattgcggtgctgctgagaagagnnnnngtgaggtatgaaatggcaaaatgattaatttatttaaggtacttactgagcacttaaaatatgccgggtgttaccataggctggagattcagtggtgaaggtgaacacagcctacccctcatggattttagagtatgtaacaatacaaactcaaagctgcaattgtgtccaaaagaccatgtagagtttgagctggtctgggggtcaggaaaggctttccaagcaaggaattaactaggcaaggaagtggacacagtttcaaagcagagagcacgtgtaggttccccgtggtgggaggaaataaggtgccatcaaggaactaaagggcctggagtgtaggggaggataagatgaacaggagcgagattgtgcagtaccttacaggctctgtttacgactttggactttggttcttagagtaatggaaactcactgaagggttttaatcaagagcgttttttattaaatttgtgttttgaaaagatatttctaggccgcgcgcgnnnnnnnnnnnnnnnnnnnnnnnnnnnnnnnnnnnnnnnnnnnnnnnnnncacgaggtcaa

SEQ ID NO: 7834 - DNA, 561 bp, Macaca Fascicularis
aaccctccatctcctaaggagtctcccgcgtatttcctctctgctctaacagtgggtttttggcgtctgacctcttgggtagtagctgacccaggaattcttggaaattccagaagagaatatctctccgttgtcacccgcctgtgccaggaggaggtgcggaggctgcacccactgcagggtgctctgtctctggtcccccagggcccgctttgcttgtcgtctccatattaagacaaaaagtaccccgtaatgggttttatctggggggacagggaggagggggaaagaattgactcgcttggtttttagaaaagtcgcaatttattgtgtaaggacttatatgataccctgggtttactttttaaaaaataatcagaatgtttcaatatatctctgctttttggttatgaagaatatttcactgtacttttgctttttaccacatataataatttgcaatatatctttggctataattctccagtacccacaatagaattttgaggggggggagtgttcactcttcttcatcagatgaatcttaaaggggaaaaggag

SEQ ID NO: 7835 - DNA, 712 bp, Macaca Fascicularis
  misc_feature (1)...(712): n = A,T,C or G
cagttcctgtttatangggngagagcatgtnnccacacttaagagcagtatgaggggactggacgtagtggttcacacctgtaatccgagcacttagggaggttgaggcaggtggatcactgaggtcaggtgttggagaccagcctggccaacatggcaaaaccccagctctactaaaaatacaaaaattannnnnnnnnnnnnnnnnnnnnnnnnnnnnnnnnnnnnnnnnnnnnnnnnnnnnnnnnnnnnnnnnnnnnnnnnnnnnnnnnnnnnnnnnnnnnnnnnnnnnnnnnnnnnnnnnnnnnnnnnaaccgtctcaaaaaaaagaaaagcagtgtgagggaaccagccnnnnnnnnnnnnnnnnnnnnnntaaataaatcatggtctgtttctacagtggaacactacacagccgtgcaaacaagaatgcattacttcgctacctaataatatgaattaatatggccataacattgggcaaaaaaaagccagacacaaaagaataaactactgtgtgattccctttatttgaagtgcaaaatcagcaaaaactaatctatggtggcaaatattagaataatggttacctttggagaagagtattaactgggaggaggcatgaaggagcctgctggtgaattgaaaatgccctacctcttgatctgggtggtggttatggttacatggaggtaatacatgttttaaa

SEQ ID NO: 7836 - DNA, 1684 bp, Macaca Fascicularis
tatacagtcaaatcttagaacctttttccctaccagtatgtagctttggaatgtctgtagtctgtacgacttttggaaggcgagaattaattgttcattcgttcattcattcattcattcattctttctttctttcatgaacattccttgagtattggtatgtaccaagcactagatttttcacactgaattggacctaacttatctctcctttggtctaaagaccaccaagcctcagctggacctctagaaccgttctagacaagagcaaataaatcacttgggctctttctcattactctggacttctccctattccttctgcttttcaacatctctttttctggttcagtttgacctactagaatttcatctgttaggatgtttacaaccgagtatcttgagcacatccactggattcaagataattcaagaaatctctgcacccacagaagtggatattatattgttaatggtggcatattaatactttgactttagatgctataattttatagaaataactgaatttatatgagctcttggatattctcataacttaagttatagcgtaattgctttaacatgggcttgggagtgagaatagacttagattgaatctcagcaatgacaattatgaattctgtgatcttggaatacttacttagccttgtgggatcttagtctccttcctcattttctcctcttttaaaaattgagaaagtaatacctacttcatagacttgttgttaatagtaaatgaaataattaaaaatacttaacatagtcttaacacatagttaacaataaatggtataatacaacagcaatgtaagcaaggcctaacaaaattataaaagtagctcatcactaggtttagatttgtgacatcccaggggactgaggaaattgcacttatcacagaaaagtcacagctgaaatgtttaagaaaacaatgtaagagaggttgtcaaaattcccaaacatataaagggtagaagatgagctctatagactggaaagcttgacttcaatgcacagcaaaattctggaacaaaaaattaagcagatggtttgtggtcatttagtaaagactgtagtggttgctaggagctaacatgggtttactaagaacaaatcttcccaaacatcccatttcccttttaaatagtatttaaataggtttaaatggtttaaaaaggtttcaggtctaaaattccgtggtctcatgttgtcgtcccctttttctcagtgtaaatctccatgaaacaagcacagatgttagaaatccagttgttgggtttgctagcaaagtctgtttcctgagatggtatttctaaaaccgatctcatctctttgaatccttggaggtttatgaataatgcatgttggtgatgatgctggcgcggcagtcccaatgaatgtgcgaaatttgatgtttcccacgaggaagaaggggagtggctgggattattgaaaggctctctggttctgggtttgaaggaggcatttagaattctgctggatccccttttgctacatccagatgattaattttacatcttaaatccttgcttgtgatcgcttgcacccaggaattacagtgagctacgatggcacctcttcactccagcctgggtgacagagtgagaccctgtctcaaaaaaaaaaaaaaaaaaaaaaa

SEQ ID NO: 7837 - DNA, 1001 bp, Macaca Fascicularis
  misc_feature (1)...(1001): n = A,T,C or G
ggcattgggannntatccaggaatcggnnnnngcnnnnnnnnnnnnnnnntgctgtacagtgatctaaagttggtaagatgtcataatggaccagtccatgtgatttcagtatatacaactccaccagacccctccaacccatgtaacaccccacccccgttcgcttcnnnnnnnnnnnnnnnntatgtaacatttactcctgtttctgccgattgtttttttaatgttttggtttgtttttgacatcaactgtaatcattcctgtgctgtgttttttattacccttggtaggtgttagacttgcactttttttaaaagaggtttctgcatcgtggaagcatttgacccggagcggaacgcgtggcctatgcaggtggattccttcaggtctttccttgggttctttgagcatctttgctttcattcgtctcccgtctttggttctccggttcaaannnnnnnnnnnnnnnnnnnnnnnnnntaggttcggtctgaaaggtgtggcctttatagtcgatccacacacgttggtcttnnnnnnnnngtgagtagaaaacaaaacaggttaggaagagcctggtggcagctgagagaggaagccgctcaaataccttcacagtaaataatggcaatatatatatagtttaagaaggctctccatttggcatcgtttaatttatatgttatgttctaagcacagctcttttctcttattttcatcttgctagcaactcaaaatatttaaaataaagtttacattgtagttattttcaaatctttgcttgataagtattaagaaatattggacttgctgccgtaatttaaagctctgttgattttgttttcgtttggagttttgggggaggggagcactgtctttctgctggaatatgaagtctgagaccttccggtgctgggaacacacaagagttgttggaagttgacaagcagactgcgcatgtctctgatgctttgtatcattcttgagcaatcgtctcgg

SEQ ID NO: 7838 - DNA, 704 bp, Macaca Fascicularis
  misc_feature (1)...(704): n = A,T,C or G
ggaagccaaggacaagagctgttgccctggctgggactctgtcttttggggtagcccgtgtatctctttggtatcctgtaagggggcaggaggggctggggtcccagtnnnnnnnnnnnnnnnnnnnnnnnnnnnnnnnntcagttttcccacctgtccaatgggaccccttctgtcctcaccctacaaggggcacaaagggatgacaccaaacctggcaggaacttttcacgaagtcaagggaaggaaaggcattcctggcagagggaacagcatgnnnnnnnnnnnnnnnnnnngagtaaggaggttaagagtccaggtattggagcctagggttttgccccttctacgctgtgtgacggtgggcaagttcctttccctctctgggtctcagttccnnnnnnnnnnnnnnnngcagagcttaccccttggctgtgcagnnnnnnnnnnnnnnnnnnnnnnnnnnnnnnnnnnnnnnnnnnnnnnnnnnnnnnnnnnnnnnnnnnnnnnnnnnntggaaaactcttatccatctctctaaactctagctaccacatccttgcagccttccctcatatacccccaccactcttgcacccctgtccttccctccagccccactgtgaccctggagttggggaagtgtctgtctccagctgtctcccctgacctcagggttccttgaggcctcaacgcagaggggg

SEQ ID NO: 7839 - DNA, 3282 bp, Macaca Fascicularis
aatttacctccagaccatcttgtggaagtcagagaaatgatgtctcatgctgaaggacaacaaagagatttaattagacgaattgaatgccttcctacttctggccatcttagttccttggaccaggatctcttaatgctcaaagctacttccatggcaactatgaactgcttaaatgactgctttcatattctccagttacagcatgcatcacatcagaagggctcattgccttcaggaacaacaatcgagtggttagaaccaaagatatctttatcaaaccactataaaaatggagctgaccagccctttgcaactgagcagagtaagccggtggcagtcccagaagagcggcctgttgcagaatctggactattagcaagggagcctgaagaaataaatgcagatgatgagatagaggatacatgtgacaacaaagaagatgacctgggagctgtagaagaacaacgtagtgtcatcctacatctcttgtcacagcttaagctgggcatggatttaacgagagtggtgcttcctacatttatcctagagaagcgttccttgctggaaatgtatgcagactttatgtctcatccagacctatttatagccatcactaatggagccacagctgaggacagaatgattcgctttgttgagtactaccttacctcatttcatgaaggccgtaagggagccattgctaaaaaaccatacaatcctatcattggagaaacatttcactgttcctggaggatgccaaaaagcgaggtagcatccagtgtttttagcagttcttccacccagggagtcacaaatcatgctcctttatcggaggagtctttgaaccaggtgggagcagactgttatacagtcagatttgttgctgagcaggtttctcatcatcctccagtctcaggattttatgcagaatgtacagaaaggaagatgtgtgtaaacgcgcatgtctggactaagagcaagttcttaggcatgtcaataggcgtgacaatggttggagaaggtatccttagtctgttggagcatggagaagagtacacattttctctaccttgtgcatatgctcggtcaattttgactgttccttgggtagaactgggtggcaaagtcagtgtcaactgtgcaaaaactggatattcagccagcatcacttttcataccaagccattttatggtggcaaactgcatcgggttacagctgaagtaaagcacaacatcaccaacactgtggtatgcaaagtgcaaggggaatggaatagtgttcttgagttcacatatagcaatggagaaacaaagtatgtggacttgactaaattgacagtgacgaagaaaagagtgagacctctggagaagcaggatccgtttgaatcccggcgattgtggaaaaatgtgacagactctctgagagaatctgaaattgataaggccacagagcataagcataccctggaagaacgtcagaggactgaagaaaggcatcgtacggaaacaggcacaccttggaaaacaaaatattttactaaagagggagatggctgggtttatcataaaccactttggaaaataattccaacaacacaaccagcagagtgacacgtactgtctaaaactcgaccaaatgaggttcttctctgtttaccctaaatcctcccagaatggagtcattgcactgagtgacctgcttcctgattgggcagactgaaactagctaaacctgaatgtacctactagggcaccgaaataccaaaagcaagaccaaagtggtaaagaaacgcagtggacctcttaccaacctgttcatgtgatgtgagcaataccatcttaaaacttgttacctgaatcagtagatcaatcttttatccagttcttgctcctacaattaagtttgaatcccctatttttgcataggggcagcagatacacacaacaatgagaactcagtgactttgatttctttgtagtgaaaagtgaagtctctgtttcagagtttgtgtctttctttctgtccataactgaagtattcactactcttgtaaaccaaccaagaggagaagaaagatgacccagaagtggattcagccattgtgcctgaaatcagtgttaaaaaaaaaaatcaaccaggttgtggtaacaaggcattctatttcttcaaaaagactgtatgcctgtgtctgaggaacttatccattatccacctctgttggaactctcttttaaaaagtacatttatagattgatcagaattataaccatggagaattttttcttctgaacattttaatatacttgaaaacaacattgacttgaaaaatttcagaacatttttcagtacctagttttattaaatattacagttgagagacaatttttaaaaatgtgttcatgtcaatatgatgagattttagcctttctccagaactaaggcattaaagaaaatagcaaatattaaaaaataaaactgttacttttttccttcttttttttcacctctaggttaatatccagtattacgtgttatccctttggataagtatgctttattttacctctgttaaaaattaaaataaatgattctattcatacttgtcagtaattcagaacttatatgtgtaactgaatgcacatgtaaggtatggttttgttttttattttttgaggaaacttaaatgctaaagaaacagtatgaaattaaaaggtatcaggaaaaaaagatcaggaagttgtattcaggtacaaatctgtttttaaataagtcttttgtggaggttgaagaattgctggcaattaaaagaatagagctaattatggctttcatcattcattcatgtatttattgagcacctacttattacggtgctcaacacttgttactgcaagctaccttaatttcccaagagtggtgccttactctgtttttttggatatggtcttccaatcagtgtgtgtaacatacctgttgtttatcagccattgtaggaggctgtgtctgttgcatcatcataaaaagtttaagctttgtgctctgataaattgtgttctgttaaagaggttagtaggatgaaaacagcaaaacaataattttttcaacaaattgtaaattataagaaaaagttggtttgtgtacaacaattttaatgattcccttgttcatttttgctgtgaaatgcactgaaaaaatctcagaatgagttatagttcctgtgttgggaaaattgacaaataataaaactagagaacaaaaaaaaaaaaaaaaaaaaaaaa

SEQ ID NO: 7840 - DNA, 691 bp, Macaca Fascicularis
  misc_feature (1)...(691): n = A,T,C or G
aaggtgagctcttaaaaacatttaaataacnnnnctaaaaaaataaaaaataatatcacataatttaatagaaggaaagaaagagcaagacagcaagaaagaaaaggcaccataaaaaaaaaaaacaattttgaccactcctcatttgtagtctaagctgcctctgcttcctcgcgttgaaaagccacgggcttccgagggatggaggtcaaagtcagagtaaagaaagttcccgggggaggccactccccagctgnnnnnnnnnnnnnnnnagttagtgacagagtcccagttcctctccttaaccaccggtcaaaagtctctggagtctctccaatgagcaagaaagcaagtcgggggtaggggaggggcctcacacctggtggtgggtgcagtccctcctccagctnnnnnnnnnnnnnnnnnncccgcgggtcccccggcgcgaacgcgggnnnnnnnnnnnnnnnnnnnnnnnntgnnnnnnnnnnnnnnnnnnnnnnnnnnnnnnnnnnnggtgttggcgcaagggttactcgtagaccctgtnnnnnnnnnnnnnnnnnnnggttgcgcagcagccgtgtcttgcagtctagaggcgcaggagaggaagccaccgcctgaccccggctctctagacctcggctctctcgggagcggaaacagcggcagccacangtgcgcgagc

SEQ ID NO: 7841 - DNA, 708 bp, Macaca Fascicularis
  misc_feature (1)...(708): n = A,T,C or G
aaggaaaccgccagtttactgtttttaaatcaatgcaagagtgattgcagctttatgttcgtttgtttgtttgtttgtctgtttgtttcaagaacctggaaaaattccagaagaagagaagctgnngaccaattgtgctgccatttcatttttctaaccttgaatgctgccagtgtggagtgggtaatccaggcacagctgagttatgatgtaatctctctgcagctgccgggcctgatttggtacttttgagtannnnnnnnnnnnnnnnnnnnnnnnnnnnnnnnnnnnnnnnnnnnnnnnnnnttctgtgatctcttaaagtgttactttttgtaaacggcaagaacgattcagttttaaagactcaaggtgatcgataaataacaggcatttgttcactgaaggtgatccaccaaaatggtcttctcaaattagacagttaaccctagaaagttaaccccatgtcctcagcatttcttttctggccaaaagcagtaaatttgctagcagtaaaaggtgaagttttatacacacagcaaaaaggagaaaaaaattctagtatattttaagagatgtgcatgcattctatttagtcttcaaaacgctgaatttacttgttgtaagtctattttaacctgtatgatatcatgctttatcatttcttttggaaaataccctgtaagctttttnnncttgccatagatt

SEQ ID NO: 7842 - DNA, 759 bp, Macaca Fascicularis
  misc_feature (1)...(759): n = A,T,C or G
atgagccactantgnnnntntgagaattactgttttaatatgtctctccatttannnnnnnnnnnnncccatttttgctctcatttgccttcacagaggccagtccacctgtccagnnnnnnnngactggtcatggtntggtttatttattttgtcctttaggggctgttttgccctaagaatgaggggacttccccgggtctgcagttctcaactttatcctttgctggccatgcaagcccagccctcgtgcatcatgggatgagggnnnnnnnnnnnnnnngatcttctagaggaaggtggccatggatggatgggctgtaactgtgttttccctctgggagtctcatgggtccagcatcaggnnnnnnnnnnnnnncagggaaagagggtgggcatggggagggcctggccccgcctatctagaggctcaccttgggcccctccttggggaaggtttgcatgcagagctgcaggggagagggttccagaagcattgccttttgcctcatctaataggatccttagaacactgtgggctttaggaatgactatagatgctcacannnnnnnnnnnnnnnnnnnnnnnnnnntctcagtnnnnnnnnnnnnnnnnngaagcctccaggaagccactttgcctcttctcccttcaagcacaagctttactgcaaaagggccagtnnnnnnnntatttctctcgatcccaggnnnnnnnnnnnnnnnnnacttttaaatgttgttctggtaaatatctga

SEQ ID NO: 7843 - DNA, 728 bp, Macaca Fascicularis
  misc_feature (1)...(728): n = A,T,C or G
gtgatannnngtagaatgaagtcttacagaagagtcaaataagataaaggaccaaaaaaatgtctacaaatgaccatttgtgtctatggcttcagtgccgtgaaaggcatataagccagattgaagtgaggggctttcatggttgtacataaaattgagttagagttggcttatgtatgtccatgacatggtccactgaggacactagaatatttgaatatctgaggtttaggttggatagnnnnnnnnnnnnnnnnnttagcatagaatgagggcacagagagttagaggtttgtaatgagtgtttttattaagctgtgttagcccaataaattatttttttctgccattgaggaatctgaggctttatatgttgctggagaaattctaaccagcttcctttttcatgtatttatactatgcattagaatgttgtttttcaagcctttaaacagctgtggaatcctgtgttcactgaagttttacatcaagtcctnnnnnnnnnnnnnnnnnaaagagctggtctggttgcagtgatggatgatactcaacacatgcactcccaaacccttggccccccaggactccgtggggccccannnnnnnnnnnnnnnnnnnnnnnnnnnngtnnnnnnnnnnnnnnnnctgggcacagtggtgcacacctgtagtcccagctacttgggaggctgaggtgggaggatcactgagcccaggagttgaatcnc

SEQ ID NO: 7844 - DNA, 699 bp, Macaca Fascicularis
  misc_feature (1)...(699): n = A,T,C or G
ccaaagataatagggctgaggccaaggagaccactccagtccccctggccacnnnntgggtcatccagggacctcctcatggcagtttgcctctctgggtccaagggcaaggtgacagtggtctctgaggtcctggagccacagctggggaaggtgttgatggccagggcggattctgagggcttccctctggagaggaagcatgtggtgagaggtgtagacagggtcaggctggggcagaaggaaggaaaggggcagagctggggggagggggaggaagcgatgatgataaggggagtgtctggcaagagtagactggccaatctagggagtgcagggggagacggggaaagggagaaagtacggaagacagacgaaggagaggaggtaagcgagaaaagatggaaaggggagccggaaatggaggagagaggacaagaaatgaagagacagaaatgaagacatgaggaaaagctgggggaagcaggagaggaagggacaggatgtaggagggggaagaaaaatcggagatgagacaaaggaaatgcctaggagatgggtagagaagaaacggaaggggcgtggctttggtttttctcttaagacctggagacatcgacccccttcgccttctgaaggggcagggggcactggggattgggagagtctccagcaggggaagggaattgttcggactat

SEQ ID NO: 7845 - DNA, 691 bp, Macaca Fascicularis
  misc_feature (1)...(691): n = A,T,C or G
gatgagtatgaaatggaatcgccnnnnattaccgataccatgaagttctttctttatgtacttgagcctcttccatctcctacactaacttgtgcattgactaatggaagcattgaagtccagtgcatgataccggagcattacaacactcatccacaacttaacacgtactcatgggattgtcctttggagcaatgtaaacacaactcaacccatatatattttaagatggaaaatgatcttccacaaaaagtacagtgtactgctagcaatccattatttaaaagaacatcatcaatcattccggaaacctgtatcccaagcagtggtcattcaagacagagatatggacttatacctgtagcattagcactaactgtaacatgtgttgtactgtgtgtgcgtggtactcggaaatgtggcagaaaaccagacagaagcaactccaattgattggtaacagaagatgaagacaacagcataactaaattattttgaaaactaaaaagccatctgatttctcatttgaagagaaatttttgaaaaatttcaattttcgaagaactgttggaaatgtaacttgaagcagcttttttttttaagaagaaatacttacaaacaaagaacatgcattagtttcaagtgtcatcaacctattatatgacggggtgcttgcttttttgtctactaa

SEQ ID NO: 7846 - DNA, 709 bp, Macaca Fascicularis
  misc_feature (1)...(709): n = A,T,C or G
aaacatgatggcacnnnanctnnnnnagtaannnnnnnnnnnnnnnnnnnnnnnntattgaagtaaaagtcacaaaaaactttnnncttcacagatgcaataaatgtggaaaagcatttgccaaaaagacttatcttgaacatcataagaaaactcataaggcaaatgcttccaattcacctgaaggaaacaaaaccaaaggccgaagtacaagatctaaggctcttgtctggtgaggaacagttacagagttttgcttttttccccccatcgaactaaaaaaaaaaatcatttgaccataatttatagctggttcnnnnnnnnnnnnnnnnnntccatatatctcatggcaatgggaactgcaagagtaatgtgcatattgcannnnnnnnnnnnnnnnnnnnnnnnnnnnnnnnnnnnnnacaaaagttaacttcagaacttatcttccacaggacaatgcaattagttataggtagatnnnnnnnnnnnnnnnctttccttttaatgttgtaaaatatatacatttatattggcttatgtttacaatagaagtcttctgtttaactaactttgcacaggtttaatttgattcagtgacttagtctactaattaatgaattgtaggaaagttaaatatattagaatgaacttgtgaaggcgataattataggaaaaaatattttgaggcacnntaattatgtaaaaa

SEQ ID NO: 7847 - DNA, 727 bp, Macaca Fascicularis
agtggcaaacatgtggcctacgtggaaggcagcaggagccctcacgagggggaccttgagttcattagcatggacctgcacaagggatgcgggccctcccgccgcagcgacctccagagcctgggctactgcatgctgaagtggctctacgggtttctgccgtggacaaactgccttcctaacactgaggacatcatgaagcaaaaacagaagtttactgataagccggggccctttgtgggaccctgcggtcattggatcagaccctcagagaccctgcagaattacctgaaggtggtgatggccctcaagtacgaggagaagccgccctacgccgtgctgaggaacaacctagaagctctgctgcaggatctgcgtgtgtccccatatgaccccattggcctcccgatggtgccctaggtggaatccagaattttccatttgcagtgtgcaacagaaagaaaaaaaaaatgaagcaatgtgactcaaggcctgctgtttaatcacagataagcttctagaacaagccctggaatgtgcattcctgccactggtttcgggatactcatcagtcctgattagcctcagggagaccccccgtttccctccagtgaatgtgaagttccccgtctgggtggcctgcccttcagccagtgtcctagcaaagctggatggggttgggccggcccccaggggggacccctgctacccttgacacctctgtgct

SEQ ID NO: 7848 - DNA, 2099 bp, Macaca Fascicularis
tcgagcactagcatcgagtcggccttgttggtcctcctcttcagctgccgacaaacccctggcatttagtggctgggccagtggctgcccatcagggacgctatccgactctggccgaaactcactgtccagcctgcccacctacagcaccggaggtgccgagccagccaccagctccccaggcgggcacctgccttcccatggctctgggcgaggggcactgcctgggccagcccgaggggtccctactgggccctcccactcagacagtggccggtcctcctccagcaagagcacaggctccctggggggccgtgtggctgccgggcttttgggcagtggtacccgggcctcccctgacagcagctcctgtggggagcgctcaccaccacccccgcctccacctccttccgacgaggccctgctgcactgtgtcctggaaggaaagctccgagagcgggaggcagagcttcagcagctgcgggacagtctggacgagaatgaggctaccatgtgccaggcatacgaggagcggcagcggcactggcagcgagagcgcgaggccctgcgagaggactgtgcagcccaggcacagcgggcacagcgggcccaacagctgctgcagctgcaggtgttccagctgcagcaggagaagcggcaattgcaggatgactttgcacagctgctgcaggagcgtgaacagctggagcggcgctgcgccaccttggagcgggagcagcgggagctcgggccaaggcttgaggagaccaagtgggaggtgtgccagaaatcaggcgagatctccctgctgaagcagcagctgaaggagtctcaggcagagctggtgcagaagggcagcgagctggtggccctgcgggtggcactgcgggaggcccgtgctaccctgcgggtcagtgagggccgtgcgcggggtctacaggaggccgcccgagctcgggagctggagctggaagcctgttcccaggagctgcagcgacaccgccaggaagccgagcggctgcgggagaaagctgggcagttggatgctgaggcggctggactccgggagccggctgtgccacctgccaccgctgacccattcctcctggcagagagtgatgaggccaaagtgcagcgggcagcagccggggttgggggcagcttgcgggcccaggtggagcgattgcgggtggagctgcagcgggagcggcggcggggtgaggagcagcgggacagctttgaaggggagcggctggcctggcaggcagagaaggagcaggtgatccgctaccagaagcagctgcagcacaactatatccagatgtaccggcgcaaccggcagctagagcaggagctgcagcagctcagcctggagctggaggcccgggagcttgcggagctgggcctggctgagcaggccccctgcatctgcctggaggagatcactgctactgagatctagggccctcggcacccagctctgcagggagctctcccagaggggcagcagctgcagatccacttaggccccagggcccacggatgaccccaaaagctgagggccccaaagccacttgtctcctaggatccaggcctctgggattctgccaggaacttgggatggtcctttgacttggaggagcaagatcagaccgcttgaaggtccccgtgttcactgtcacccagaggctcctgtcactacccacttcattccccaccgctgccagtgccactgccaaccctgttcacaggcgcttccaggcccactccagccaggggagctgggaggaagaaggggctccctcctctccacattccccctgaccccaaagccagagaaagccagatggcaccagctgctccagatgtgcctgcccatattgggggacagggccaggcctgggctcagttcccaggttcgagctctgcagcctctctcctggagggagggggctgaagtcagaccaaaggaagaactcagaaatgtcttgtttatttgtgtttgtgaccaagcagcctctcccttcacccaggtttatggcctcgttttcacttgtatatttttcacactgtaaatttcttgacaaacccaaagaaaa

SEQ ID NO: 7849 - DNA, 1226 bp, Macaca Fascicularis
  misc_feature (1)...(1226): n = A,T,C or G
ttcacgttcaggccttcacttgattccagattctcctgcctaaagtgagaggagggatggattgctttnnnnnnnnnnnnnnnnnnnnnnnnnnnnnnnnnnnnnnnnnnnnnnnnnnnnnnnnnnnnnnnnnnnnnnnnnnnnnnnnnnnnnnnnnnnnnnnnnnnnnnnnnnnnnnnnnnnnnnnnnnnnnnnnnnnnnnnnnnnnnnnnnnnnnnnnnnnnnnnnnnnnnnnnnnnnnnnnnnnnnnnnnnnnnnnnnnnnnnnnnnnnnnnnnnnncgcctcagggaggatcacccgagcctgggaggtcgaggccnnnnnnnnnnnnnnnnnnnnnnnnnnnnnnnnnnnnnnnnnnnnnnnnnnnnnnnnnnnnctggagaaaaagtatgccccccttgagtttgtgcaaagcatttgccaactcctcaccctgcccggaaacatcacgagtcgttctctgcagtttgcagacggcgtgtacctggttctgctcatgggcnnnnnnnnnnnntattttgttcctctccacaacttctacctgactccggaaagcttcgatcagaaggtccataatgtgtcctttgcctttgnnnnnnnnnnnnnnnnnggcctcaagaaacccaaggctcgtcctgaagatgtggtgaacttggacctcaaatccaccctgagggttctttacaacctgttcaccaagtacaagaacgtggagtgacggaggacctgtnnnnnnnnnnnnnnnnnnnccagcaagaaaggcgacatctgtctgtgccctgtgcctttgcagggagccaggtgccatgggcttctggtccaaactgtgttgactgtcatccccaccccacccctacctcacgcccgcaccaacccctgcctcttttggtggtggttcttaatcttctttccatgtaattcccannnnnnnnnnnnnnnnnnnnnnnnnngattctaaacacccgtgcttgcgtttgaggcctcgcatcactcagttgcgtgggatggagtccgttattgtctgccttggctgaaagatggaaaaaagcctgaagcccaacccacagctagttgagagcaccctgcattccacctgatggtgcaattagcggtcacaggccttcagaagtacaacatcagctcagcaggaatgccagctccccgaggacccgggcttgatgattcaccaggggatctcctgggctgggctctccttcgaagt

SEQ ID NO: 7850 - DNA, 711 bp, Macaca Fascicularis
  misc_feature (1)...(711): n = A,T,C or G
gnnnnnngagagacaaggtatggcggggcgcnntgnnnnnnnnnnnnnnnnnnnnnnnnnnnnnnnnnnncttccgaggatgcacggcgctggagctcggggccggnnnnnnnnnngctagcatcatcgcagccactgcggcannnnnnnnnnnnnnnnnnnnnnnnnnnnnnnnnnnnnnnnnnnnnnnnnnnngaaacattgccctcaacagccacctggctgccgctggaggtggtgtagttaaggtcaaagaactnnnnnnnnnnnnnnnnnnnnnnnnnnnnnnnnnnnnnnnnnncttcagttggtcacaagaggaaatttctgacttgtacaatcacaccaccatcctgtttgcagccgaagtgtnnnnnnnnnnnnncttgacggatgctgtatttaaaaccctctcccgactcgcccacagattgaaaaatgcctgcacgnnnnnnnnnnnnnnnnnnnnnnnnnnnnnnnnnnnnnnnnnnnnnnnnnnnnnnnnttcggggtcacatgcaaccgaccggggtttgtgcagtgatcttcctcggagaaatttaggaggtccacagccttgtgatacccacattacagcagagaagactgaggtccaaaaaggaaaaagtctccatgaggtcagggaccttgttgtttgtcttaaatatcattacnnnnnnnnnnnnnnnnnnnnnnnnnnnnnnnncaaca

SEQ ID NO: 7851 - DNA, 3860 bp, Macaca Fascicularis
aagaagatgctactctcaaaagatagtctgggactaaaaggtgaactgaaagatgaagacagagaaaaggttgcagtgcaggagggaattaactcaggaacagccatgtcaagaggattgtatcaaccagcaacaatctttatgggccgccaaatgtcagccgtctcaagcatgggagatttcaatacagagcacaaatctccccaacccacaaagaacttttcaattcctgacccacattcacaccgacagacagcccagagaagtaatgtgacagacagctgtgtagtacaaactagtaatgacacacagtgcttaaataagtctgacaacatagatggaaaggcatctcttcagattggtgagaaaacgccagtcacagccagtgtattgtctgaggaggaacaaactcattgcttggagataggaagtaacacacgtcatggcaagagtaatttatctgaaggcaaaaagtctgctgaactcaattccccgttacaggaaagattaagtccagagaagagaaccactggtttaaagtgtgacagttccagcagatcagagggatcagagggagaaatactgacacgggaacatattgaagttaaggaaaaaagagccagcccgccagtctctccgatatcagtttcggaatactgtgaatctgaaaataagtggtctcaagagaagcattctccttggcaaggtgtttcagatcatcttgctcacggggactcaaagtcacaaaagcccttcagaaaaaagcaggaagaggaggaggaggaaagttggagcaccagcagtgacctcactgtttcaataagtgaagatgacctgtttttaaagagcccagaaccacagccaaatccaggtggcaaggtggagggagaagatggaatagaggccttaaaattaatccatgctgagcaagaaagagatgccctgtccactgaaaaaaataattgtattttgcaaaccctaagctctcctgattcagaaaaggaatcctccactcacgcactaactagagaacctggacaagcaccagactcaggcgtaccgagggcactggtgggtcagcatgttgccaccttgaaagaacatgataattctctcaaagaagaggcaacagcattattgagaaaagcccctacagaagagtgtggccataggtcagctattcacagtagtgaatcatcttgcagcttgcctctattctgaatgacaatagtggaataaaggaagccaaatctgctgtatggctcaacaacgttcctacaagggaacaagaaacagaagcctaccagttgctgaagaaggctacccttcaggataatacaaatcaaactgaaaacaggtttcaaaaggcagatgcttctgtgtcacacttgtcaggtccgaatattggcagcggtgcattcgagacaaagacagctaacaaaattgcgtcggaagctagtttttcatctagtgaaggaagtcctttgtcaaggcatgaaaacaaaaagaaacccatgatcaagttaaaatctaatggtaagagagataatcggacaacagattttctttttgtgttttaaccaaaaaactctgtgacatgcatttgttgtttacaccctcatgtgagtcctgaagtgggcatgctcacagggactgccattgcagttctccctggagtggagcctgagggcttctggaggctccgttcttcacagacaggaccacacaggtgccatggacctcaggggcagagcattgtaatttgcaagtatgaatttgcagggcatcctggcctccatgtctaattaattatcggcaccatgtattttaccaataaaatgtttcttgactctccccatcctcggaagcacccattgctcatgactggacaggctcttggagtaactctaactggtttcctcataccgagttcctcccagctcttgactgtccttcacctggccaccagcctccagaccctggcttcccccgaccttcccctgtaaggactgccgatgcctccccgtgcctgcagcttagtctgagctttctccattcctgggaggcctcagctctgctctccagcttattcctcccaaggtcccctgtttgggtcaagccacagtcagcttttttcagctgtaccacacctgtgcctctgtacctttgcccgtgttgttccttctctagggagttccttttccttctcctcagcccagtgagctcctattcatccttcaacccccagctcacaggaaaaatctagcctgccttctaccctaacactgtggcatatcccctgcccagcttgggctctctcagctcctgtcttcttaaactgcttataccttaaattaaaggtataattcgattaatagttttactgccaataacaaaaatacctactatttatttagcacccactttgctaacgcagcgtggaaactaatttagagcggctgtagaacctaggcctaggaatctgcatttttagcaagcaccccagtgtgaatcactcttctagaaggacagctacctactgtgggggagacaagtacccagggggttgtgatggagagtacaggcttgagtcagatgacttgggtaggactcccagcttggctactcacaggcagtgattgtggccaatttcttaaccccctcagcgcccatttgtttgctcagtgaaatggaaacattaatacttaccttgccagactggtgtgaggatgagatcgggtcgcatatgagaagtcagcacagagctggcaggtgttgccatgcgggtgtccgcagagttaggggattgttgatgcggtagacgcagtgcactccaccaccacatcctgccagaccacccacagggcacctcagctccaattcacaacgcccacagcttcctgcaccaagcagcggtgtctctctgcctgagggctttctctgactgcaggagcatgctcagccctcacaaggcagcccagagtaccacggagttgatgccctgggttgagagcaaccctcaaccaacagaggcaagttggtggatcagtaaccccgctcccttgctcttcactgggacaaccttggggagagttctgcagtctctcagggggccccagcaggctgagccctgcctgtccactcactgccaggcacccactcatcatcatacccttcattggcttcctgtcttccttgttacactgtctccatggttcctgggttcacctctcaagtaaacgatgtgaaccaaagccctgtctcaggctaaccatctctgcttattcctctgtcacgtctttcccttctcctctctgctctcataaagaagaatgggagataaaagtggagggacagctgcagtggggtggcatcaggctgatacagcacaccagggaaccctgcttccatgtaaccctgactttaaatccctatcctgtaataaagagttgggcgcaacagaagggaaaaggaagtattctgcaaattgttttccataacagtgcataggacacactttgtgtaatttgtgcagtgtgacatgcatttgggtgtgtctggtcaggtacatcacgtggtgtccctgttaggcattttgcagaccgacactccgcttaaccagtccttccatgctctgctgttttgtaagctcttaaccagagtgcagaaatgttaaatgactgtctggttttattttccagccctctgggatgagtctgacgacagtaacccagaaattgaggctgctttacgccctagaaaccataacaccgatgattctgatgatttttatgactaacatgctgtgacatctgttgtaaataaagtctttaaacacactgaaaaaaaaaaaaaaaaaa

SEQ ID NO: 7852 - DNA, 776 bp, Macaca Fascicularis
  misc_feature (1)...(776): n = A,T,C or G
cagatgacagtattttcttnnnnnnnnnnngtgagtttaaagttttattaaatatatgtgaagctccagttaaannnnnnnnnnnagaggcccacggtctcctgggtcccgnnnnnnnnnnnnnnnnnnnnnnnnnnnnnnnnnnnnnnnnnnnnnnnnnnnnnnnnnnnnnnnnnnnnnnnnnnnnnnnnnnnnnnnnnnnnnnnnnnnnnnnnnnnnnaaggacccaggagaggccccgaggggggattctgtaaatacagactnnnnnnnnnnnnnnnnnnnnnnnnccatggtagttccttgggacnnnnnnnnnnnngacaacttgtgctgtcagaggatttgttagaactctgcccttttgtctgaagctcaaggccaaggagacttagcatagagctgacccctgcaccaggctgggaggnnnnnnnnnnnnnnnnnnnnnnttactataagtggccagaataccagagatgtgggttccatggtcagctgcacactaagtgtttacctttacatttggatcaccttgtagtctttaattattggtccctgaggccaagtccacagcttgccttctagtcacttgcctgcccatcagtggtggtggatgtgttagctggtagatttggaatcagtnnnnnnnntttctgtactgtcttggttaggtctgtataagtagnnnnnnnnnnnnnnnnngacccagagagctgctatcctttttctccttgcgggaggaaataaaactggggaacacaatgtccttccatagc

SEQ ID NO: 7853 - DNA, 3108 bp, Macaca Fascicularis
  misc_feature (1)...(3108): n = A,T,C or G
cttgggtttgccacagtctcttcacttacctccttgttccgtttatctccttcaccagcagcacatctccatgaatgctgccagggtcatctttatgccctattttatcatgactattaactctgactaatatttctttaaagttggttgtagatgtttactacaaatatttctctgtgacattaacagatgtggtaaggtcgttgtcgacattgtattcccagtaatttaggatttttttctatctctgataatgaagaaataatgatagagtaggtaaattccaacattaacaacaacaagaaaataatgaactagattttgatatactaacacagaatgttcttccagctatattgttaagccaacaaagtatacataacgtacaagtatatgaatgtaaatgcactaaaagaaaatatttgaaagtgtatacaccaaataaacagactttacctctcggaagaaaatagtgtggtaggcgaaagcataaagagggaactttagtttttactttccatagtttagtattatttactttttaaaaaaaccacaggcacgtatttgtattttattctttaatttaagaaacctaaagggtttccttggcgaagaatgtgaaacacacacacacacacacacaagatgggcacggagtagtcttgaaagacatgacaatatcaccagacctgagaagaagctaaagagccagagggaaaaagtcagaagtcgactacctgggaggagggatagacaagagaccaaactaaaggaaactaagtgtggatccagcttgtccccaaagcttgccttgcttcaaagcatcagatggtaaagaatcttcacctgtgcctgtgatttgtgggcctgaagaaaactatccatccttgcaaatgtcttctactgagatgcctcacacggagactgtctctcctcttccttcctccatggatctgcttattcaggacagccccgattcttccaccagtcccaaaggcagacaacctactgctgcagagaatagtgccacaaaaaaggaagacaaggtcccggtcaagaaacagaaggccagaactgtgttctcttccgcccagctgtgtgtactcaatgatagatttcagagacagagatacctcagcctccagcagatgcaagaactttccaacatcctgaacctccgctacaaacaggtgaagacctggttccagaaccagagaatgaaatccaagaggtggctgaaaaacaactggccaaagaataccaatggtgtgactcagaaggcttcagcgcctacctaccccagccactactcttcctactaccagggatgcctggtgaacccgactgggaatcttccgatgtggaggaaccagacctggaacaattcatcctggagcaaccagagccagaacgtcccaccctggagcagccactcctggaacgctcagacctggtgcacccagttctggaacaatcaggcctggaacagtcccttctatgactatgaaggggaatctctacagtcctgcttgcagttccagccaaattctcctgccagtgacttggaggctgccttggaagctgctggggaaggccttaatgtaatacagcagacgactaggtattttagtactccacaaaccatggatttattcctaaactactccacgaacgtgcaacctgaagatatgtaaagatgagtaaaattgatattactcaatttcagtctgggcactggctgaaccttcctctcccctcctcccctccctataggatttttcttgtttggaaaccacgtgttctggtttccattatgtctatccagtcaatttgatggagggtggagtatggttggagcctaatcagagaggtttctttttttcctattggatcttcctggagaaaagacattttaataactttggctgctaaggacaacatgataaaagctgtctctggctatagataagtagatctaatactagtttggatatctttagtgtttagaatctaacctcaagaataagaaatacaagtacaaattggtgttatgaagatactcctattgtttgggattttgaggctttgcttattttttaaaaactattgaggtaaacggttaattgatttcctcaccctttttggctcagttttactatatcccctaatttgttggttatgctaatctttgtagaaagaggtcttatatttgctgcatcataatgatgttagtactactttagtcaatttaagtacaaatgaatcaaacaactatttttcctttagttgattttacccttattttacctagtgtttcaaatatacagcttaaacattaaaaaaaaaaaaaaaaaaaagaaagaaagaaagaaacctaaaggaagtttgcttttttgagattaaaatgtatttaggcatgtaggtttttgcagaatagcaagtcaccaaccaagggccctttatttccacatagaaaggtaagaacatcaagctatgtgaagagtgaacaatatcaatcattgcaacttctaatattaagggtagatttgcatgtaaatttggttacttctaatgatataggttgtcaaacacttaataaaaatgaactattttgttaatggcataaattccctcatcgttggatataagctttatcttaaatattatgtagaaacttacaaatgctagtcagtttcttagcctttttttgaaaaaaatttaaagtggtttagtaaatggtaaatgcaggttggcattaatgatgtaataattcttaaagtgactgtcttaaaaaatgtaaaagtagaccgggcatggtggctcatgtctgtaatcccagcagtttgggaggctgaggtgggcacgtcacctgaggtcaggagtttgnnnnnnnnnnnnnnnnnnnnnnnnnnnnnnnnnnnnnnnnnnnnnnnnnnnnnnnnnnnnnnnnnnnnnnnnnnnnnnnnnnnnnnnnnnnnnnnnnnnnnnnnnnnnnnnnnnnnnnnnnnnnnnnnnnnnnnnnnnnnnnnnnnnnnnnnnnnnnnnnnnnnnnnnnnnnnnnnnnnnnnnnnnnnnnnnnnnagcttaaaaaaaaaaaaaaaaaaaaaa

SEQ ID NO: 7854 - DNA, 1377 bp, Macaca Fascicularis
atgaaccggggaatcccttttaggcacttgcttctggtgctgcaactggcgctactcccagcagtcacccagggaaagaaagtggtgctgggcaagaaaggggatacagtggaactgacctgtaatgcttcgcagaagaagaacacacaattccactggaaaaactccaaccagataaagattctgggaattcagggctccttcttaactaaaggtccatccaagctgagcgatcgtgctgactcaagaaaaagcctttgggaccaaggatgcttttccatgatcatcaagaatcttaagatagaagactcagatacttacatctgtgaagtggagaacaagaaggaggaggtggaattgctggtgttcggattgactgccaactctgacacccacctgcttgaggggcaaagcctgaccctgaccttggagagcccccctggtagtagcccctcagtgaaatgtaggagtccagggggtaaaaacatacagggggggaggaccctctctgtgcctcagctggagcgccaggatagtggcacctggacatgcaccgtctcgcaggaccagaagacggtggagttcaaaatagacatcgtggtgctagctttccagaaggcctccagcacagtctataagaaagagggggaacaggtggagttctccttcccacccgcctttacacttgaaaagctgacgggcagtggcgagctgtggtggcaggcggagagggcctcctcctccaagtcttggattaccttcgacctgaagaacaaggaagtgtctgtaaaacgggttacccaggaccccaagctccagatgggcaagaagctcccgctccacctcaccctgccccaggccttgcctcagtatgctggctctggaaacctcacgctggcccttgaagcgaaaacaggaaagttgcatcaggaggtgaacctcgtggtgatgagagccactcagttccaggaaaatttgacctgtgaagtgtggggacccacctcccctaagctgacgctgagcttgaaactggagaacaaggggacaacggtctcgaagcaggcgaaggcggtgtgggtgctgaaccctgaggcggggatgtggcagtgtctgctgagtgactcgggacaggtcctgctagaatccaacatcaaggttgtgcccacatggcccaccccggtgcagccaatggccctgattgtgctggggggcgttgcgggcctcctgcttttcactgggctaggcatcttcttctgtgtcaggtgccggcatcgaaggcgtcaagcagagcggatgtctcagatcaagagactcctcagtgaaaagaagacctgccagtgccctcaccggtttcagaagacatgtagccccatttga

SEQ ID NO: 7855 - DNA, 777 bp, Macaca Fascicularis
  misc_feature (1)...(777): n = A,T,C or G
gctgtgtagtctgtgtgtgaattcgggcattctgctttnntctactaatctgaaagtgctcagtgatttgtgtatttgtgtctttctaacttctaataaactcactccgactgacctgtgtcttggtgtctgtctgcttggtagaacttctcnnnnnnnnnnnnnnnnnnnnnnnnnnnnnnnnnnnnnntnnnnnnnnggggtgatagttcatctcaccaaggaattccttccaagaagaagtgctgctgtctgcacattttcttcactgtgttttttattttcnnnnnnnnnnnnnnncaagtatttcacttattaatacctgaatcaattaagatgagagctgggcactctcctccctacaaggttgtctgaggatttttagttatttgtatagaatgagcattttatttaattttccagccacctttatagttaacatttaaggaaactgttctgtaannnnnnnnnnnnnnnnnnnnnnnnnnnnnnnnnnnnnnnngacgaaactgttaaaaggaagagcctctgtcagannnnnnnnnnnnnnnnnnnnnnnnnngttacttggaccagatgcttacatgtctgttaaatgtggaagtcgattttgataatattcctagaagctgctttaattttcttgagactgtgtgtcggcttttgtctcggaatagcagtaggattcatattgcttttgggatgcgatcacttttgtttgaatgagcttccttatgtctaaaggttttcatgatcattggattatcttaagaaata

SEQ ID NO: 7856 - DNA, 751 bp, Macaca Fascicularis
  misc_feature (1)...(751): n = A,T,C or G
tgactgctgggtttggggggcactcagatgtagaggccccagtctcgcctggcccactcccagcctggggatgaaggctcaccccccacattccaccccatccccacagggtccctgataacctggccccatgggtgggcctgtcctggggcagtggtgccgttctgggggcatctcttgctgtgccacctctgcctccccctggtaagagctctgtcttcctcttcctataggaaaaggcggcaagccaccaacatcaggaagccctaaggagggagctagaggtgagtggagggggtgaagttccctcctgtcctctggagaaggtttctttgcttctctttcagcacttgcttgtcttttctcccaaagacccaggatcatactatacgaatccttacgagtcagaagaatgaactggagacagggctctacttcagccaggaggctgccaggaaatgtganngtgggaatctgggcacccggtaatccttcaacctggcactttcacaggcctttagggcgagtcctttgtgccacatctcaacctctctcattccaggagagtccaaggnnnnnnncggtcgccnnnnnnnnnnnnnnnnnnnnnnnnnnnnnnnnnnnnnnnnnnnnnntgctgtgtccacacagcacaagaaggcggacagggtgagtccaccacctgctcggtccctgggagccagttcacaatnnagatgnnctanngtccctctgcacatgcatgtctgtc

SEQ ID NO: 7857 - DNA, 4017 bp, Macaca Fascicularis
agacgtttcgggcagagtgcggccgctgcggagacaaggaactctccctctaccgccagtctgacttctaccaaaatgagcggcctggatgggggcaacaagctccctctcgcccaaaccggcgacctggctgctcccgaccatgcctcaggagatccggacctagaccagtgccaagtgctccatgaagaaaccgaggcgacacaggtgatggcgaacacaggtgggggcagcctggagaccgctgcggagggaggtgcatcccgggatcctgttgactgcggccccgcgctgcgcgtcccagttgccgggagtcgcggctgtgtggcgaccaaagccgggcaggaggatgctccaccttctacgaaaggtctggaagcagcctctgcctccgaggctgctgataacagccagaaaaatggctgtcagcttggagagccccgtggccctgctgggcagaaggctctagaagcctgtggcgcaggggggttggggtctcagatgatagccaggaagaaggccaaggaagtgacgactaaaaagtgcgccatgtcagcagcggtggaaaaggagggagaagcaggggcggtgatggaggaaaagaaggtagtgcagaaggaaaaaaaggtggcaggaggggtgaaagaggagacacggcccagggccccgaagatcaataactgcatggactcgctggaggccatcgatcaagagttgtcaaacgtaaatgcccaggctgacagggccttccttcagcttgagcgcaagtttggccgcatgcgaagactccacatgcagcgcagaagtttcattatccaaaatatcccaggtttctgggtcactgcctttcgaaaccacccccagctgtcacctatgatcagtggccaagatgaagacatgctgaggtacatgatcaatttggaggtggaggagcttaaacaccccagagcaggctgcaaattcaagttcatctttcagggcaacccctacttccgaaatgaggggctcgtcaaggaatatgagcgcagatcctccgggcgagtggtgtctctttccactccaatccgctggcaccgaggccaagatccccaggctcatatccacagaaaccgggaagggaacactatccctagtttcttcaactggttttcagaccacagccttctagaattcgacagaattgcagagattatcaaaggagaactgtggcccaatcccctacaatactacctgatgggtgaagggccccgtagaggaattcgaggcccaccaaggcagccagtggagagcgccagatccttcaggttccagtctggctaatctctgtcctgtgagaagcttctgcacaagtttccttaccacctcctcttggacctatgcttggccaacagcatgcagtcttctgtctgttttctcttcatactgcggattatcttttcctttggttcttctaaatcttcagtaatcagttgcaagattattggcttacctgcccatgccattcttcctctggaccttcatgcttttctgcattgtgttaacatgtttcaagtgcatggccttctacggcttctatgccaaacatgatactatagatgtactgtaccatactgcctttctttgcatggcttggaccctgtctgtgaccgtggtcttctcccagtttaggtggttctgtaccacaaagaatcttgatacatcttcacaaataactactgggcttcatactttatgctggctgtgtacctgatacccatgtacttatggtaagctctttaggtattaccactgcaagacaaaactgatatcttaacccagccgtcaacccaaattggacattccagactaccaccaactggatcccagctgccttcctgggcttgtgccatccaccctactggttatctggtagaacaagctggtggctggtgggtgactgctaggcatgaatgaggtaatagatgaaaagtgttctatgatatcacattggtgttcctgtacctttggttactctacatcatgaccagctactggtaagtatgaagcctgtgctgtagcccagccctacttgctctcaccttctggttgaactttgcttaggccaccattgtctgccttcaggaactatctgtagacgtagctcccagggagctcacaggaacaccccctaccaccaggatgggcagtcatatgtgacagtgcccaaagcaaggctggaacgcagtcccttccagcttagtctttctgattgctagccaacaaaccatccttaatctgagcaacttctttaggcatttcctcttttccccgcctgctcccactctgaacatgacaaagttgccagagttggggcattgaggaagagatatttctggaatgtgagacttcttatgcctctgtctctgtgtctctttctttctctccctcccccttcccctctccctcccatcccttcttttcttccctttcactctgaagcagttttagcttatgaacagaaaacaaaactggcaaagcagactttttgtttaatttgctctttccttgattgtgttcagagaggaaaggtatgattaaatgggttccagatctcttattgcccttattcctccaccccacttcctttagcaaggtctgacaatttcaaagggagacctataggttgtttagttagaggcagtgttcttttaggcaggttttgacatctttatcttttaccctatccattctaccaaaacctgtgtatttcttgagcttttagtttgagaagctggaaagagagagaagggccttacagtgatgggttcaggacaggtcctgaacaggatgtgagcgaaggcaaccaaaacttagcttcactccacttttctaaagatggaaatgcttttttaggccttggactgcttggaaatgacccaagggtagcattttgtaggtcattgttctcctttgtactactttgttcctgccctgatgtcccatgtgtcttcatcctactgcctggctttcttggccctcatttttcagcttctgcatttccttccctgctcctaacaaatgaagaagcaggctgcagcctgcattctggaagatctccaacctccttgtaggggataaggggaatttttccctttcgattttgaaggctttgacctaagcccctttagggttgaggaggtctgaacacacacagtggagaggttagtctaggttgggaaactgagtaagtccagagcagaaatgagcctgctgtggagtgggtttggaaaggcctacaggaaagaccctgcagggtcaggggtgggagggtaggcccctgaggtgcgccccagggaagaggagctggtatttaaatcgtatgcttggaggaagattttccttcaatttttcctaagtccttgaattcaccagtagatttttgtaaacaaaactgtaagggtgtttcctctcgattatcctaggagtgacctttatatgtgtggaagattaatggtgtatgctccttatgtcactgtttttgagtaaaatctatttcctttctccgtttcagcctatgacaaaattgatgtttacaggcctgctttttgcttataattgacaacatgtgcaaaaataccaaatttgtgtcctgtgcagtatgaagacttcagtgaatattcattaatgtattagcttgttctgctctctgttcatatatggctctattcttagaaatataatttgaatgtgatctttcagtagtctgaatattttacaaattgttgctatgtcttgtgaaaataacctcaaaaagaaaaatatgactctgttgtcttacttgatacttcttgccctagtaatgtacttgacatttatgttcctaagcagtgtaagtactagtagaatttctctgtcaaactcaatgatgattattagtacttttgtcttctcccatgtgcttgaaggaaaaacaaagtgtcactactgtatttcttgttttcatcaaaaaataaaaataaataaaaaagaaaaaaaaaa

SEQ ID NO: 7858 - DNA, 2830 bp, Macaca Fascicularis
aaatgtattcatccagacattcaaataagcacaaacatctgtgcagtctttaaatctgccatgttaaacaggcctagcactctgtttatatgccccaaagagcctgaaccaagacagatgtaagtaggagcagccggatttgaccctaactcttgaaaatcctgccctgcttcagagatgaggcatatcttcagctttgcaagcacactattgtgtgtgtgtgtgtgtgagtgagggagagagagaaaatggttaaaattaacgtgaatttggtttccccctcctcgtatttctttgtctatattaatatgctttttaattgttaatattatcattagaaaggtgatggtttcatgaatgaattatgagggagaaaagaattttgatatttaaaattattggcctgtaattgaccattttctgcctgagtcatgtatgtgcactgagaggttgaagtgtactgtatgtgcttcttcaggcatttcctatttatctgagacacttttgagacagagaggtgactggagaaaatgaagggttctcatttatttttatgaacaattctctatgactcattactcccacaatttttgaatatctacaatcttctctctcagttgtcttaacctccacgctgatggtcctgattcagagctacttcatttgctacccaaacacagtttggggaagggaagggggatgtaaggcagtagaggctcaattccccttgttattatacatggctattgctgtttaccctagggaagagggttagtttggccctactagataaagagcatgttaagaaggcctcccaaatttacaagtaaaaaacaaacattttgtgagtaaaaaacaagcaaacatatcttttgcccattaaacattttttaaaaatgagcaagggatatgaacagatacttttcttttcttaattctttattcatttatttatttttatcagcttttattttaagttctgggatacatgtacccctgaacttaaaagttatttttaaaaaggcctcctttggtcttggagatttgtatacaaacacaggccattttccattggtcctcagataaagggaccccgcagttgtttaaccctgacttcacataccaaaggaagtctaattatttggtgtgtgctaaatatcctcagtgtggtgctgctgttcagccacattaaactcacaggacaagtctgcaccctatgcaaattttcaaaaaaaacctggaggccaaatcacttctggtcataagcatttcagataagggatactcgaacctatcaatttgttaaactttttgatgcctcctaaacacagccacagctgttatgtatttgtcacagaaaccagaattttctttaatgtagagatttctttaatttagatagtttgcaaagatgtaagcataagaatgttccctgaaacattgttttgtcattttaaaagtctagaaaaaacataaaactatattactagcatctagttaaatcaatgatggcaaaactgtccaagggaaaactgcatcctttgaaaagaatgaggtggatatgcatgacatggtatagcatgatttctaaaatgaaaaaacaaaaaacaaaaaaaaccaaggtgtaaaccagtatgtacaacacatacaggtatccactttgtaaattaaaaaatacacacatactaggttgttctcattctgttccataaagtcactgtaaatactgaattagcaaatactgactcattgctcctagtggaaatacagggttaggtcctgtgagcctttggttataacattttcatcaatggatcaatacataaccttgttttatgtgtgtttctgtttgaagatacattagttaatatatattgttgattcattaacactgaactcacagtctgtaatgcatacctgaatgtcgtttatcttacatgtattctctccataaggcacatcacagccttcctgtgcttaggaacgctagatcgcctttcagcctggttcagtgttagctgggaacatatgtgagaggagactcaaatttttggctggtcagcacatgtctgcaaatgacctcaaaagtaccgtattaacttagaggttacaaatcaattttgagtagacaaattctcaaatatgaaatccacaaataatgaggatcagcaatacatagacagcatgtatgcatgtatataaatggaaagtttctggaaggattaaactacgcgatgaaagttatctttgacgaacaggcctgtggggcaggaatgagacaaggtgcaccttttatcgtaaccctctttgccctacttgacttttttactgtgtgcatcccatagtccttcttattctgtgtctcctccttttctcccaccatcactatcatcaccattctctcagcaagcccgtgcattttctgaagaactgtagggacaaggttttatttgagccaaattgctcctagtgaatattctctgaatcagtctcctggaaaagttggtctacatgattttgcaaattgcgagtattttacagattctaagtatgatacttagaacatgagttctcaggataatttgtgtcacacaatattaccccatatcccagcatgctgagatgacctggactttgggtagtttttatctgtcaaatactcttgtttaggggtcatgcagagtggttcgtgcctgtaatctcagcactgtgagaggctgaggtgagtatattgtgttggagcctggagttcaagttcaatctgaactacgtagtgagaccttgtcaacaacaacaacaataaccaaaaaaaaaaaaaaaaaaaaaaaaa

SEQ ID NO: 7859 - DNA, 315 bp, Macaca Fascicularis
gtgatatgccccccttggcctctcaaagtgttgggataacagacgtgaaccaccacgcctggcgggaatacttactcttgttgggagagcgcacccctaaaatgtcagagcggaattctttatgtgataggtgtgtcgtctgagaacacatacaattcactgttctctttggggctttagtatgtgtcaaacataggactggaagtttgcccctcttttttcttttgaaagaacatctctttcttttgaaaaaacactcagagattgtgcatttttgaatagttttccctaatgtggatacactcccagagtttt

SEQ ID NO: 7860 - DNA, 1583 bp, Macaca Fascicularis
ttattagaaagggtcttgctttggatctggatgtgggtctggggtttctcccccttgatgctaagctcctttaggacaggaaccatgttgtagtcacctcacagtttccccatggggcctgacactttgtttggacagaatactatacataaatattaccatattaaaccaaatggtatttactctctatagtctctgaatccttggacgccaccccaacacaactaacccccaactctcaggccatgatagtaaaaagagagtcatagaacaggaaccgtaaaaaaaattcttcattttccgacagttggtggtgactttgaaggtagaggctgacagtgagtagagtcacccacaacctgatgaagagggattctgagatagggactcggctatgcacacagtcacccacagaggaggagcagggaagggggaaagtagcctctctcagcacatgataaaaagacctcgatggggaggtagagcagagaccttcactccatcattttttaaatacatccttcaaaatttttcagaggaagggaaaccagacaggccaaaccacagccttcagtgtggcttgactttagttctactgacctcactagccattccagcagctgaatgtctgccaattggtgcccacacgctataagactccacaactgtgtgagaagctgggaacatttacaaggaaaaagcagaaatggagggagtgaaacccctatttagtttctgctgatcctctctggtagagaaactgagaccctttccacagaagctgggaactcatacaccatttggtttagaaagaaggaagcacaggcctctgtaatagagccacataagggtcataggaccaaaaaccctggacattcagcaaggggaaaggtcaatgaacagctccatatcagaggaggcagtgattcgcaatgtttacagactcatctttcctattgcccagggcaggaaccacttgggatccacatcatagtcaggacttcaggggtatccagtctgtagggtccaagctatgggcatgatggactcagcaatcaagatggggagagggtctgtttgcagctaaaccctaaaggaatctttagtcattagaagaggcaaataagctagtcctccttattctccatttttctgattttgattttcataattagaataatcttctggagttctttggtctctacattagtcaaggaaggagccccattgggacaaataaatagatgtactgagaaagacagaacaagttattgaaaaggcctggcaggaaccagggaggccagaaagggactgaagctgaaatagacaaagttgccctctaaccactgcatttgaatcccagcaaaccctgctttgggaatggcaagcatcttggcaacagaacctcttacctccttctcaaactccaacatggtggtgatggaatctattatttgtgagagcaatcttatctccatggcaacccagtatgatgtcaccactttcaaatatgtattgctatggcaacacagatgctgtcacaggcagcaagttttaacaaaaaaaaaaaaaaaaaggccaca

SEQ ID NO: 7861 - DNA, 576 bp, Macaca Fascicularis
gacagcagcgggcagctgaataagggaagaatgtgggattcagtcatcaaacccagttctgagtcctggttccacagcctggttactgatggcaatcttggcaaagttgcctctctgcgctgaactttgtctgtactgtgggcttctgaggactaagtggtatcatgtggtcacagagaaaagctttgtaaaatgtaaaaccaatatacaaatgtgacctttggttgtgtatgacagcagtccccaacctttttgccaccagggattggtttcatgaaagacagtttttccacagctgggggtggggtgggggtgtgcctggggatggttatggaactgttccacctgagatcatgaggcactagatggactccacaacctggatccctcacatgcacagttcgccatagggttcaagctcctatgagaatctaatgccgccgctgatctgacaggcagagctcaggcggtaatgcttggtcagcacctgttcatctcctgctgtacagccgggttcctagcaggccatggactggtatccactctgcagcccaagggttagggacccctggtgta

SEQ ID NO: 7862 - DNA, 688 bp, Macaca Fascicularis
  misc_feature (1)...(688): n = A,T,C or G
acccacaccaggacccccagatgatacccaagaaactggggccttccnnntatcctaggcccaggacccatcatggggacaggagctgaagggctcccagggccccaggggcggnnnnnnnnnnnnnnnnnnnnnnnnnnattcagaggtaggcagccaaagggcacagaaccctgcgcccnnnnnnnnnnnnnnnnnnnnnnggggccgggggcctgaccaggaaggcagatgggctnnnnnnnnnnnnnnnnnacccgcggggtctttgtggactagccaaggctatgagggccagaataaaaaactgctcaatgaggggtatttctgtgatgagagccaggnnnnnnnnnnnnnnnnnnnnnnnnnnnnnnnnnnnnnnnnnnnnnnnnnnnnnnnnnnnnnnnnnnnnnnnnnctaggnnnnnnnnnnnnnnnngcttacttttaaacagaatgttggatttgatacttaaacttgaggaggcaaagataagtctgggaattgcaccagctgggcgcgggggtggagaacactgggcagagttggcccctccgtggccagccttgccctcacaaccaaggaaggggccatcctgtggtgctgttcagctgttacaaaggcaggnnnnnnnnnnnnnnnnnnncaggaggggatnnnnnnnnnnnagggtccacagggtgccagc

SEQ ID NO: 7863 - DNA, 2300 bp, Macaca Fascicularis
gagcgggacggaagcaaagctggggcgccggggaggtggaagacgagccccactccggttaccaccaaagaacatgagtttggtctaggggctccagtttctgaagctgaaaactaccagaatactctccagctagaacgagaagtgagaaaccaagacagattcatctcaacactgaaattacagattgaagatctcaaacagacaaatcatggcttggaagaatatgttaggaaactcttggatagtaaggaggtggtaagcagtcaagtagacgatttaaccagccacaatgagcatctttgtaaagaattgattaaaattgaccagctagcagagcaactagaaaaagagaaaaattttgtggtggattccgccaacaaagaacttgaagaagccaagatcgaactcatttgccagcaaaataatattgtagtattggaagatacgataaaaaggcttaaatctataattttagatactgaaaaagcacaaaataaatctccttctagacttgattcctttgtcaagactttggaagcagacagagattactataagagtgaagctcaacatttgagaaagatgatgagaagtaggtctaaaagtccaagacgcccatcaccaactgcccggggtgcaaactgtgatgtagaacttttgaagacaacaacaagagatcgtaaagaaaaggaatgcctgcaagcatgtttggataaaaaatctgagaacattgcatcccttggagagagtttggcaatgaaagaaaagaccatttcaggcatgaagaatatcattgctgagatggaacaggcatcaagacagtctaccgaggccctcatcatgtgtgaacaagacatttccagaatgcgccggcagctggacgagacaaacgatgagctggcccagatcgccagggagagagatatcctggctcatgacaatgacaatctccaagaacagtttgctaaagcgaagcaagaaaaccaggcactgtccaaaaaattgaatgacacgcataatgaacttaatgacataaagcagaaggttcaagatacgaatctggaggttaacaagctgaagaacatattaaagtctgaagaatctgagaaccggcaaatgatggaacaacttcgaaaagccaatgaagatgctgaaaactgggaaaataaagcccgtcaatcagaggcagataacaataccctcaaactggaacttatcactgccgaggcagagggtaacagattaaaagaaaaagtagattccctcaacagggaggttgaacaacacttaaatgcagaaaggtcttacaagtcccagatttctaccttacataagtctgttgtaaaaatggaagaggagcttcagaaggttcagtttgaaaaagtgtccgctcttgcagatttgtcttctactagggaactctgtattaaacttgactcaagcaaagaacttcttaatcgacagctggttgctaaagatcaagaaatagaaatgatggagaatgagttagattctgctcgttctgaaattgaactcctgaggagtcagatgacaaatgagagaatctccatgcagaatctagaagctttgctggtggccaatcgagacaaagaatatcagtctcagatagcacttcaagaaaaagaatctgaaattcagcttcttaaagaacacctttgtttggcagaaaataaaatggccatccaaagtagagatgtggcccagttcagaaatgttgtcacacaattggaagctgatttagacatcaccaaaagacaactaggaacagagcgctttgaaagggagagggccgtacaagaacttcgccgccaaaattattcaagtaatgcttatcatgtgagttctacgatgaagccaaatacaaaatgtcattcaccagaacgtgctcaccatcgatctcctgaccgaggcctagatcgatcattagaagagaatctttgctacagagatttctgacacctgaaatgattcttcacatccctgagaaaggtcaaagttacaaactgattcttttttttttttttgcgacatgagtgcatttatcttttaaatgcttggcaatgttaaatgtatttattaactttgtgtctctgaatctctgttctaatgtgccatgttgcagtgatctgagatgacttctaaaaacaaaaatgcatatggctctttctatccatgcagtgatagtgagtgtaaaatctgcttacgtcactattgaacactgttatgttcactatccggagtaaataaagaaacttattaaaaaaaaaaaaaaaaaa

SEQ ID NO: 7864 - DNA, 1497 bp, Macaca Fascicularis
aacataatcctgtcccactggacccatcatagttcctgtcacctgacagggggtgggtaaacagacaggtatatagcccctacctctccagccagggcaggcacagacgccaaggacagagacgctgactaggtaagataaagaggcaagaggtgtgagcagcatccaaagaggcttgggcttcagttgtggagagggagagagccaggttgaaatgggcagcaggtagggagatctctggggaggagctgaagcccatttggcttcagtgtccccccaaacccccaccaccctcttcctaggccgctttccccactgtcaccaacatgaagctgctcgcagcaactgtgctgctcctcaccatctgcagccttgaaggtgggtgtgatatggagagggggccaaaagggagaatgtgctggtggttatagctacctatctgcctatgctcttatatccaggtctggcaactagagggctcaaaaggaagatcattccctatctaaagcccagaaagcccatccaaagatctgactggacacctttttggggagggggcggagagctggggtgggtactggcagaggtatggcaagaggccaagattcattgctgtggacccagctgaaaagagtgtgtgtgtgtgtgcaggagctttggttcggagacaggcagaggagccaagtgtggagagcctggtttctcagtacttccagacggtgactgactacggcaaggacctgatggagaaggtcaagagcccagagcttcaggcccaggccaagtaagtctaagggcaaggagttcaggggctgtggaactgtggaaaggaagaagggaagatgagaggccccacagaagactgaacccaggggtggggattagggcagattaggcttaaattggagagaaaaagtccttcgttgcccaaagatcccacacgtttcttagatagagaggaacagcaagaactgggccttgaatttcagtctctagggtctgttcctctaccagcaaaggtcttggctctattcccacctaggggctttgccatgcgatggaccaggcactagagtttggggacctgagtcagtctgctctgacctcccaccatgaccgaggcccctgccagtgcctagggtccctcaaattaaactctaatcccctcacctatccagggcttactttgaaaagtcaaaggagcagctgacacctctggtcaagaaggctggaacggatctggttaacttcttgagctatttcgtggaacttagaacacaacctgccacccagtgatgtgtccagaccattgtcttccaaccccagctggcctctagaacacccactggccaggcctggagctcctctccctacccactctttgctacaataaatgctgaatgaatccagctctgagcctggtatgtttgggggactgggaaaagtaggggagtaggagaggagaagaggaaggaaaaggaaaactctgcttctaga

SEQ ID NO: 7865 - DNA, 152 bp, Macaca Fascicularis
tatttgcgcagagtttcacccccatacacagagattggagagtgacacaagaggagaaaaaaaggggggtcacaagagaaggggggtaaaatgtggacacgcgcgtgtatatgtatagagggggaaacacgcggcgtaaaaggcgcaacacg

SEQ ID NO: 7866 - DNA, 996 bp, Macaca Fascicularis
atgctgggcatctggaccctcctacctctggttcttacctctgttgttagattattgtccaaatgtgttaatgcccaagtgactgatatcagctccaagggatttgaattgaggaagatcgttactacaattgagactcagaacttggaaggcctgcatcacgagggccaattctgccgtaacccctgtcctccaggtgaaaggaaagctagggactgcacagtcaatgaggatgaaccagactgcgtgccctgccaagaagggaaggagtacacagacaaaggccatttttcttccaaatgcagaagatgtagattgtgtgatgaaggacatggcttagaagtggaaataaactgcacccggacccagaataccaagtgcagatgtaaaccaaactttttttgtaactctgctgtatgtgaacactgtgacccttgcaccaagtgtgaacatggaatcatcgaggaatgcacactcaccagcaacaccaagtgcaaagaggaagattccagatctgatttgccgtggttatgtcttcttcttctcctaattccaccaattgtttatgtggtgataaagaaagcatgcagaaagcacagaaaggaaaaccaaggtcctcatgaatctacaaccttaaatcctgaaacagcaataaatttatctgatgttgacttgagtaaatatatcacaactatcgctggagccatgacactaagtcaagttaaagactttgttcgaaagaatggtgtcagtgaagccaaaatagatgagatcaagaatgacaatgtccaagacacagcagaacaaaaagttcaactgcttcgtaattggtatcaacttcatggaaagaaagatgcatgtgacacattgattaaaggtctaaaaacagccgatctttgtactcttgcagagaaaattcacgctgtcatcctcaaggacattactagtgacacagaaaattcgaacttcagaaatgaaatccaaagcttggtctag

SEQ ID NO: 7867 - DNA, 696 bp, Macaca Fascicularis
  misc_feature (1)...(696): n = A,T,C or G
aaanagaaaatagagtnnnnnnnnnnnnnnnnngaaaagaatcttctaagaccatctctccannngacatgaagtgtaccttttctaaagatggtttccagctgccacggctccactttgcaggctcacagnnnnnnnnnnnnnnnnttgggaactttctggagcccctgatgccttttccttgagaacaggagcgcttccgccttgccattagctcgtggagaacgtgcttctcattcctggcatgcttcaagagcagctgcagatgtgccgctaactgaccgcgtttgccgttggtgacctggactctgaactcaggtttattctaaacccagtgagagctgagggggagtgaggaaaggggatcacctgtatttttgtgcgtgtatgggcacctgacaaatctatgaaaccgagtgaaaggagaaatgttagagtctttattattttattatatttatatggaaagcttgactctccctttggtaagtccgaaacgtgttgtctgtttgaccgtgactgtcttcctcagtctgtgcctgtgattccagtcaccctgtagttactgacagaaattgactggactgtcattgtgtgaagtccaggaggaaaagtccattttaattgtacgatttggtcataagcaaggactatatttatgtcaccattattagatatatgtacttttgtaatgac

SEQ ID NO: 7868 - DNA, 3969 bp, Macaca Fascicularis
aatttatagctgatgtgactggagttgagccagctctctccatattcaccctcaaacaagacctcaccctggaaacgtttctgaaatgcttctgcactcctatggtttcaacacttcttataatcagaacactctctttctcaaaagggatattatgtatgctttatatcaatggaatccgagacaatcaatccaaagtctcttggaggataggacatttgagctcagattctaaacaaaagttcttttccatagcagttcactatctggatttatgtaattgtggtctcattccagcagagcagtttctaacggccctttactcccacccaagctctggacatgaagtaggaaaatgaaattacaagggaagcgtgtcaacagagctgcccctctccaaaaaagttaagtagatgctcctgcttgtgttgaagtccttttgtctgtgcaaactagccagatgagttcattggacaaggcctccatgactgtgctgcatagaatccacttggcctcacctgtctcttcagttgcatctagcttggtctttggcacaacaggaccatgagctacagcagtgatgtcaggaatgtcttagctactgctctaagggccagcacagtaccccttctggtcagctctggatgttgttcacaaaagtggcactctttgaatggtccctatttagtgaccccaagtctgtctggtttagtgggtctccaggtccacgcacatgtctttggatgacttttgaaatgtttccttagccaggagaaagcattttaatcttctttcaaagtgtaagttacaatgggctcaggaagaactagaacatattttattacataaaacatcacatgcatacataatctccagtttttctattcagatttttaacttccctatacctgtctttccacctgctatatattaaatctattatggaaaatcggtataccatgaaagcagggcatcagagtaaaaacacagccccttttcctacaatatagaaggggataataaaagcaccaatatcactactaaaagtgggatgtagtaacaggagcaggaggagagtcccatggagagggcaaaaattaaataatggaatgtgagcagtaatctaaatagatgagattttgagagatgaagacaagattccagagagagggaacagtatgaacaaaaatatggagattaaaaatagacagcacatttcaggttattatccatttggataaagtgtaatcaatgggagacacgtttgggaagatagatttagactacatcgaaagcttaaagggtcaggattcatttagtatagcagttctcaaaggcaaaccaaaatggtgctccttcacaaacagagcggctttctatcttctttccattagctgacaccttcagtccagctcagattttcctgtacttattttgagcaaacttaacttttcctttgtctcagaagtagagtacccactagaaattcacatcttcaagagtgtcagtttgaaccagtaagtactatgcatttagtgtgtcctaggtacccactagaaaggggatagataggtatggtaaagtcatggttttactatgagctcactatactgattctgaacaaattatttctatgcgttatcaaggcaatacttagtacaatgaaggtatttctaaaggagagcttttgatccaaattagtaccttttattgatctaactgaaatagtaaacagacctgaagaaaacatagtctagcatgtccttttttacaccctcagttgcatctgaaattacttctcccaacaaacatctctattcaaagcatgaaaatcaggtccacaaagaaaaaaggtatagagaggggaaaagaagtcaaatatgagtagaaaaaataaagacaaacatgtaattgactggtattaagtcattgctagtccaagcacagaaaaggaatagtttctttcacaaagctacatttcttaagcaaattctttagaacacgattgcctcaaatcttttttaaaactggtgtttatatatcaaatcatcagtttgctaaactcaactttttccacattagatgcatctgtacctcatctaaaagcataccatactcaacatgtcaatttagcctgaatggtatagaaaaggctaaaaaattgagttcccactaggtacttcagagcattttaaattcatattacttcatattctaatggttcaatcttccaatacttaagccattatattttcagcactaacaacagttaaaatggtatgagtaaattaaatcccgagggggtcccacctgcttattatattgaatggatatagataaaatacctactcaatgtgatccttgtgcttgttagacaaaaggttagtgcaatgtttaaaaaaagaaaaaacagcttgagttttactttcaattcaaaacaaacatagcagggacctcagtggcctccaagtatgtctgataaactggataaaacatgtcttcaactgctttggacttgaaatggacaaagtgaaccacaaagtgaccaatacaaaaacctaatactttttaagccctcttgatattccaagactgccaaagggtattccactctcattgtctagatcagcatcacagtagacctgttcattaaaaatcaccctatctagaattgatgcaagttactgcaatgaataatttgtagtgcatttagggtgaagagtgcttggtgcatgattagaatactcagtgaccgttaacttggcaagtgttcagacatacgatagtgcttctaaatcacaaatcacttggtccttgaacttctaccaccatattcagcttgtgggcccactgggagctgccaggttgacagtagccaacaaacaattgaataatctctttgagacacagagggggaatgtcactgaaatcttctctcagactatttcaaactagtgtcccttatggaaaatcaacatgagtggagtgattatagcaatgaaaagaacctggattttagtcctgccactacaataggctgagtgaccttgggtaaaggactaggctttagtttctctaaatacacaatatgaagagtagtatagtatctaaactccctcttagctctaagtgctctatgactctgtgtttaagctagtctacaggaaattcacacgaccaaaaatttaatgtcactttgatttctaaaccctccaaggtggatgtgtggatacgcatgcataaacacatggacccacacattattgcctttggaaaatttgcagatttcttttttctttgcccctcttggcgaacggtggtgaggaaaggacatgaatcattacaaagtcagaaatatcatcatgaattaagaatggaagcatattcaaggaaaagacattatcatcaacgtataatgtagtaaggatttaacaaattacatgaatttcatctttatggaaaaatcaaaccagataagctaagccaattactttaagtggctccaatgaacagggcaatactttcttaatttcctcttcagtttgagcacaggggatactatgctttgggattacagatgccaagtggtatggtggccaaaaaactgatttaggtacaatgaacggtttaccagttttcaaactctttgcttatccagaccacaccagtatttatacatggtgtgagaactggacactggcatagaggattggtgatttcaccctccaaaactacagctaattctaggagccaaatctaggaggtaccaattaagcagaccaaatttcttaattgatcttaattgagcttaattgattctcacttattagcttataatgtatctcattcatttcaagaatagtcaaaataaatggctgaactttgacaccctctagtcctttcaaacactgttagctaagactctaaggaatgaacaagaacaggcatgaacaaaaaaaaaaaaaaaaa

SEQ ID NO: 7869 - DNA, 667 bp, Macaca Fascicularis
  misc_feature (1)...(667): n = A,T,C or G
tacaagaggcttnnnnnnnnnnnnnnnttggaaggatgaatttgnnncactctannnactccaggtcacagatattaggaaactgtgcccactgggaatgcagtaattataaccaggtgtgtcttcagaggtcagtacccaacgtggttaatgggctggtcctccatggtggatatcagccctccttgcccacttctgggtccttaaacagccaacggtcccacattcctgcaatctcaggatctgggggagatgacggaggctggccgctgggatgaggtgaagcagtaacaatttccagagccagagcttggcagctgggggccaccagcagcctgccctgccctctcatctcccacatgcacgctgtgcaagttggccttttctaagtgggggcttgagatggcagagagggcaggacccagaggagcatcagctcagtccttccactctctattcacagggggactctggaggcccnnnnnnnnnnnnnnnnnnnnnnnnnnnnnnnnnnnnnnnnnnnnaaagaaatggcaagcctccacgagtctgcaccaaagtctcaagctttgtacgctggataaagaaaaccatgaaacgccactaactacagaaagcaaactaagcccccgctgtgatgaaccaccttctcagagccgagtccaga

SEQ ID NO: 7870 - DNA, 765 bp, Macaca Fascicularis
  misc_feature (1)...(765): n = A,T,C or G
gccagtgtaacacaggacgtgtgtgtgcatgtgcaagtgtggatgtatgtatgtgcgtgtgttttgctcatctcttagggaacttgggggtaggggttggaggtgctgggcaatgaactcaagagttcaatgttgcccagcagtgagggaaatcgggaggtgaggcctgtagggcaaccagttggtggagtctcagcgatggcccaggtgaggagtgggccacccagaggggcagggtgggggcctcgtccctcttggcccttctgtcctcaaatgtccaaaatattggaggacctctgttcatatcccacgcctgggctcttgccagcagtggagttactgtagagggatgtcccaagcttgttttccagtcagtgttaagccgtttgcaactctcctgtgtctgtgtttggtttgtgcgtgtgtgtgagagcacatcagtgtgtgcaggctgcgtttccccatttctctcctcccttcagacccgtcattcagaacaaatgtaagaaatcccttcccaccaccctccctgcctcccaggccctctgcgagagaaacaagatcacccagcatcctcccccaccccagctgtgtatttatatagatggaaatatacttatattttnnnnnnnnnnnnnnnnnnnnnnnnnnnnnnnnnnnnnnnnnnnnnnnnnnnnnnnnnnnnnnnnnnnnnnnnnnnnnnnnnnnngacgcgtccccactcctgtacagctgctttgtttctttgcgatgcattgtatggct

SEQ ID NO: 7871 - DNA, 725 bp, Macaca Fascicularis
  misc_feature (1)...(725): n = A,T,C or G
cgtgatctataacagtggggcgtctttttcacannnnntatctcatggcttgccttccagcccccatcgatcctatgcctcatgtgaggtgagccccagagaaacttaaattgcttgtactgaagttgccaaaaaccaaagttgcccactgtcttttaactgaaacacctctgcccgtgcatcatggagcacgtgttaggtgcccgccctgggtcaggcacttgattctcaaaacactgccaagaagctcttaccaacgtgacagttgaggctcagagaggttcatgagcttgcttaaggctacgggtagtaataagaggcatggccttggtgccaagcacctcccaaacaaacagcaggggccgtgatcctgcctaaactctcgcatccacggcacctctctggacccaggcaacagagataaggagagccctggctcttgggatggcgtcgtgccgattcacctgctgtgccgcagagccctnnnnnnnnnnnnnnatgtgcccctgtggcaggataattgagaaacaacctttttctgattcccagagaactaannnnnnnnnnnnnnnnattagacagggaagaattgcttttggggagaagccacttactcggctcgccttggtttttgctaacaacgtctccttaaactgctgtcaaatctttttctnnnntgtgtaggattcatcaatcttcatatgaaaaagaacaccactgcactg

SEQ ID NO: 7872 - DNA, 734 bp, Macaca Fascicularis
  misc_feature (1)...(734): n = A,T,C or G
tactaatnnntnagcatggtctacgtncnnnnnnnnntctttatttcaagtaagctggcatgtttgatcaacaccagatttgctgcctggaagttttttatcttgttgttctgaacaaggaccctaattcttcttaggaataagagaacctctctgttgggtatacagtattcagttggtctgagaaaacacaaaccccactcaagtctccagacttgtttacacagaaactgaacctgtggctggcctagagtctgagcctattctgggcattgtttattgcaatctgcccaggccctcctgcccccaccacnnnnnnnnnnnnnnnnnnnnnnnnnnnnnnnnnnnnnnnnnnnnnnnnnnnnnnnnnnnnnnnnnnnnnnnnnnnnnnnnnnnnnnnnnnnnnnnnnnnnnnnnnnnnnnnnnnnnnnnnnnnnnnnnnnnnnnnnnnnnnnnnnnnnnnnnnnnnnnnnnnnnnnnnnnnnnnnnnnnnnnnnnnnnnnnnnnnnnnnnnnngagaactccacgtggttgctgtggctgcagctctgatcattatacagcctaagcttaccctggacactggagttactcagcctgtgggttatgctgcccagaaaacaaaacaaaaaacaccaccaccaggcagcaaattcctccttgcatttctgtgtctgatgtattgggtgccttctaagccctaatgagcctcactttgtacagtaaattgctga

SEQ ID NO: 7873 - DNA, 720 bp, Macaca Fascicularis
  misc_feature (1)...(720): n = A,T,C or G
gactttaaggcaatgtagcatcatatatagagacatcaacctgtnnnnnncntnctatttaacggaactgtgcacctgggcacaagggtgtgcacaacaggatgtgtacagcagcactgttaaagtgtagcgcattatactacaggatcttatgcaactgttgaaaagaatgaagcgacgccgcactgtggtcgtgcagtggtctcagacatactaactagaaaagcaaaaggcttaacaatgcatagcagtcgcgcgcgnnnnnnnnnnnnnnnnnnnnnnnnnnnnnnnnnnnnnnnnnnnnnnnnnnnnnnnnnnnnnnnnnnnnnnnnnnnnnnnnnnnnnnnnnnnnnnnnnnnnnnnnnnnnnnnnnnnnnnnnnnnnnnnnnnnnnnnnnnnnnnnnnnnnnnnnnnnnnnnnnnnnnnnnnnnnnnnnnnnnnnnnnnnnnnnnnnnnnnnnnnnnnnnnnnnnnnnnnnnnnnnnnnnnnnnnnnnnnnnnnnnnnnnnnnnnnnnnnnnnnnnnnnnnctaaaaaacaaccaaaaaaacaaacacaagaaaacaatgcatagcaagctataatgttgtttgtgttttagaatagtagaggtctggaaagttgtttgcttttccccagttttttccactgtgttacctctgtaggaaattgaggtagaggggagagttagaaggaatatttggtttttctgttttatatcc

SEQ ID NO: 7874 - DNA, 731 bp, Macaca Fascicularis
  misc_feature (1)...(731): n = A,T,C or G
ttgagtttcatcgaatttttttcctcaccttacatgtgttacagctgtttcaacataaattccattatcatctatatacatttaaagaccatgtttatataatctcttctgggtagaaaatggaaatactgaacctttgctttagtccctttcagtcttgaacaacagtggctggatctgcatcgtggggttgctggtggtagaacactttggtgttaggaaagtttggaaaagaggnnnnnnnnnnnnnnngccattatgattagaggtaagcagcctgggagaaatgtacaagacctgtggctactggtagagaattggaataagcttccaacaatggaccgtagagattaatggagattgtttagtgggcccatggctaggtgaggtattaatacagttgaagttatgttgcccttggcacacatctttgagaatctcgtacatctatgcaaaagatagtgtgaaataaacagtaaaaaagagaagtatatgttgatggcagtnnnnnnnnnnnnnnnnnnnnnnnnnnnnnnnnnnnnnnnttagttttgctcttgatagctagatgtttcttttaacttttatttcctaagtaaatatacacaaaggcattcattcatcttcgttgcgtgtgttttgtagatttttcttgatgagcattgtttttttttctttgtgagcactggcttactatattttactttcatatttatgaactgtaaatatga

SEQ ID NO: 7875 - DNA, 216 bp, Macaca Fascicularis
gcgcgctcagagccccgcagggcgtggtcagaggcgcgtggagagtcaacacttttctgcacatattaaaaaagggggttatttttgtggaaggaaaagtggggggacccccgacatatgtcaggggtgcacacgcggtttttttttttagcgcacgtgttttgcctcacgtggggcagcagcaggacagagagagaatcacagagtgtgccccga

SEQ ID NO: 7876 - DNA, 1635 bp, Macaca Fascicularis
  misc_feature (1)...(1635): n = A,T,C or G
gtgttgaataatgtacttccgttttttaatcctttggtgattaaaaaaattacaaggaaaagatcagtctgggtctgctgcatttaactgtgtgtataggagatgtaatctccaaggcgggcggtgggggtagttggagggatcgctttgacctttctgccactgcagagactcctgctgccaatattgaaacattcataaatatcttattaggtttcctgggaacaaagccatgctgcaaagggtatgaaagcctgtttggcagggatgaatgtaggaaggattatatgaaaagagaggagactgtggggacacagcccgcttttctgtttgtttgcctgcttgtttgtttttatgaggggcaggctctgtggtatctgcatctatattttagaagcgctttgctgttgttctgagattcacagggccttcatctgtgtttaaaacactgaaaacataaggatagaaactgatttgaagcttctgacatttttgtaattgttttcaaacacagttaacagcatcttcccttttactgttttggacaccttctgtccgaatccttctagctgtgggcgaattcgactttgtaatttctttcttcgtagtgatgtcaacaaaatcacacagacctagggatctagcccggagctctgccctgtccttctagttccctggaggccctttgctggctaggagcccttgggtgacagcttggtttctctccacatctcttgcctctcaaatctgtttaagattctgcttcttaaactgtctgaattaggtgtctctgcagatttccctgtggccagctacctcccaaaccaaacgcctatgtgagcccaccttgggtgttgttcctgaggacgtcgaggacatttaggcaaacacaacaagaacaggaagtggacaacgttccagttataacctcctgctgctgcccttccagggtggggctgggcttcttccaacccactttaccacctgtctttgttcaggaaaggccagagtgtgacattgccttggaaatggcctgtgttagaggctgggaagggggttgaatgagtccgagaagcagtaggactggatctggaagggttgatgaggactggatgaggtgttgtggggttgtgagtctcgtgtggagaagagctggaaagcacagatggaggtggagggacccttccttaccttttctctgctctctcttcccacctatctggctttttggtttagtttttgctttttaagaaacaggnnnnnnnnnnnnnnnnnnnnnnnnnnnnnnnnnnnnnnnnnnnnnnnnnnnnnnnnnnnnnnnnnnnnnnnnnnnnnnnnnnnnnnnnnnnnnnnnnnnnnnnnnnnnnnnnnnnnnnnnnnnnnnnnnnnnnatgcctttctttctttcttttttgggaagagatggggtctcactgtgttgcccagtctggtctcaaactcctgacttcaggaaatcctcttgccttggcctctgaaagtgctgggattacagccatgagccactgctctagacccctgtctgtttttatagcttacagtcacttttgtacttcccatggctgtgttctgacagtttcatacggtgtatacctaaaaaaaaaaaaaaaaaaaaaa

SEQ ID NO: 7877 - DNA, 690 bp, Macaca Fascicularis
  misc_feature (1)...(690): n = A,T,C or G
tttttaaaagggctgtcctctgtagtccaggaagaaattgaactttcaatactgtcaatgcactagacttgaaaaagattcctccttcagaaaccaattcagaatccaagttctcataattaagataaatctctggcaaatgacactagtttaattatttgagtttaataaaaacagtataggacgggcgcggtggctcacgcctgtagtcccagcaaatttggagggccagggtgggaggatcccttgagcctggnnnnnnnnnnnnnnnnnnnnnnnnnnnnnnnnnnnnnnnnnnnnnnnnnnnnnnnnnnnnnnnnnnnnnnnnnnnnnnnnnnnnnnnnnnnnnnnnnnnnnnnnnnnnnnnnnnnnnnnnnnnnnnnnnnnnnnnnnnnnnnnnnnnnnnnnnnnnnnnnnnnnnnnnnnnnnnnnnnnnnnnnnnnnnnnnnnnnnnnnnnnnnnncaaaaacaaaacaaaacaacaacaaaaaacaatattatgctattattatgtaattatcctgtaattattatggatgttttctctttgatttgttagtgttaaggataatacaagtgtgcatttatctgtttaagtttgtgttttcctaaattgatgaaggtttactgatcaagtaagctaccacttctacataatgttgaagattacaaaaaaacgtatccttgcat

SEQ ID NO: 7878 - DNA, 718 bp, Macaca Fascicularis
  misc_feature (1)...(718): n = A,T,C or G
ctgcatcaatgccaaagctgatgtccttttcattgctccccgggagccaggagctgtgtcatactgaggaggaccccagcttttcctgccagctcagcagttcacttcctagagcatctgtcccactgggacacaaccactaatttgtcactggaacctccctgnnnnnnnnnnnnnnnnnnnnnnnnnnnnnnnnnnnnnnnnnnnnnnnnnnnnacagggagagataaataagttgcctcccttcttccactccactttcccatctccccttccccatttcctcctccttctctactcatgccagattttgggaatacaaatagaagcttcttgctcctgtttaactccctagttacccaccctaatttgcccttcagtatccttctactttttccgtcctgccctgtacctctctctgctcctcacccccacccctgtacccagttaccttcctgactgggaaggacataaaaggtggaatgtcagggtcaaactacattgaacccctgaggaggacaggggcatctctgggctgagcctcctgtatccttcccaccgtcctttcttcaggccctcagacggcacattacggtgggcgtgctgcgggtgggtatcccacctccagcccacagtgctcagtgtactttttattaagctgtaatatctatttttgtttttgtctttttcctttattctttttgtaaatatatatata

SEQ ID NO: 7879 - DNA, 691 bp, Macaca Fascicularis
  misc_feature (1)...(691): n = A,T,C or G
acacactcacacnnnnnnnncnnnnnntgnnnnnnnnnnnnnnnnnnnnnnnnnnnncctgatttcttacactcccttccccccgacgctcctctcctttgactactcccttcccccttcttatgcccctctcagaccacccagcggacgcctcttcccgcccacccatccctctcctgcgtctccttgtaaagttccatgagatgctcgaggagcacctgctggtggggcacccagcacnnnnnnnnnnnnnnnnctccacacccctggcatttctctccacctccagaggcttggaaaggaacagggcaggtgaggcccttcacccaccatctacgccatatacccatcaccatcccgtgaggaaaaaaaaaaaagtaaaacaaaaacaaaaaaaatcttttgtacagagatatatttttattatacaaagtttgtacagtaccaaaaaagaaaaaaaaaaggtgtaaattttttttcattattgtaggtaaacagtagtggaagccttttttgtaaatgtaataaaatgtataaatatggttttcagaaaacatccagtgctgtaaatatgtaatctacacaccttcttggcttgtctgcagtatatacatttaatttatctgtctctgtatatgaggcttccccctggggtcctgcattatggtactttcctgaatttgaaagcaat

SEQ ID NO: 7880 - DNA, 722 bp, Macaca Fascicularis
  misc_feature (1)...(722): n = A,T,C or G
gcctcccctgagtgcccagaccgcattccacagctctgggcttcctcggagacccctggggatggggatcttcagggaaggaaccctggccacccaaacaggacaaaagcagcctggggccaagcagactggcaagtggagccacctctttcctccctcctcgaatgannnnnnnnnnnnnnncagccacatttcagccgaggtccagggaaggaggccatttacttgagagagattctctcctttttcctgtcccccatcttatctgggtccctctaacgtctcccatggctctccccgcttctcctggtcactggagtctcctccccacatacccaaggaagacggagttcccccaccccacacgcaccgccgttgtcttctggttgccatggtcaccaaacaggaagtggacattctaagggaggagtactgaagagtgacagattcctgaggctgtttcctgctgctcctctgactcggggcagcttgggtcttctggggcacctctctgggaaaacccagggtgaggctcagcctgtgagggctgggatgggttttgtgggcccaagggcagacccttctttgggactgtgtggaccgagaagcttccctctagtgacaagtaaccccccagccgtcctctcttgccttcccctgtggccactttccagggtgggctctgtcttgttcactgcagtatcccaactacaggcacagtg

SEQ ID NO: 7881 - DNA, 757 bp, Macaca Fascicularis
  misc_feature (1)...(757): n = A,T,C or G
tgcaggctatacaggaagcataatgctgacatctgcttggcttctcggaggcctcaggaaaagttacagtcacggtggaaggcaaagcgggatcagcacttcaaatggccagagaaggagcaagagagagagtggggaggtgccacacacttttaaacaatcagatctcgtgagaactctatcacgtgaacagcattggagggggaaatctgcccctgtaatccagtcacctcctaccaggccctactccaacactggggattacaattcaacatgaggtttgggcggggacacagatccaaaccatatcactgagattgattcagtaggtctgggatagagcttagagaactgtatttttgcaaagtgttgtaggtgattctggtagagttggtcatcatgaatttgagaattacaggtaaaataatttgagaattactggtaaaataataagcaatatgaagactgacatttctatggttttatgcaaatagggaagatttgtcagtatggaattcaacttgtcaggagagtacaatgtagattaagaatagcaaatgcctggcatacaggccaccataccccttctcctcctcacacattttggcttcagaaacttttccttcattctctagatagtcattactaataggttagaattgatgtgtggaatatatgggaaacaacctatttgacaatcctgattaagctgtagtgaaagagcagagaggaagagactgagcanaatccttgcagt

SEQ ID NO: 7882 - DNA, 702 bp, Macaca Fascicularis
  misc_feature (1)...(702): n = A,T,C or G
tcacctannnttaannngagccccagtctcatttctcagattctgttcacactagactacataaagcccctgaatacactgttctgtttcacatacctaaattcaacattctctgaagctcttcctaacctatccaaacagaaatgagtgctgactcccaggagttaagctactgctgttgcattcacttattgtctgtatcctttaggaacttgtgaaaaatgtgggagcaaggacaatgtcatgttcccccagtgtgaagcagagcacctagagatagtaggcattcagtaactactggacggatggaggcattatgaagtttgccaagtttgttaacactactaaagatttcaatgaatgtcaaaagagtggcagataggtggttttatcaactgtgcgaaaggtaaaatagtataaagtactagcaagcataaacacaggcatacctcattttattgcattttgctttactgtactttgcagatactgcattttttacaaattaaaggtttatggcaaccctccatcaaacaagtccgttaacgccatcccaaagtcatgtgctcattttgtgtccctgtgtcacattttggtaattcctgcaatatttcaaatttttattattattatttctgttatagtgatctgtggtcagtgatcttcgatgttactattttgaccatttgtgggcaccacaaa

SEQ ID NO: 7883 - DNA, 746 bp, Macaca Fascicularis
  misc_feature (1)...(746): n = A,T,C or G
aagaagcagtgcttgcctctgcagggcaggcttgttnnnnnnnnnnntgcnnnnnnnnnnnnnnntttaatcccatggaggctgtccagannnnnnnnnnnnnnnnnnnnnnnnnnnnnnnnnnnnnnnnnnnnnnnnnnnagctgggaagaacctgccgaagggaacgcctgcaaccccagctggcaaccccatccannnnnnnnnnnnnnnnnnnnnnnnnnnncacagggcggcaggagtccttccnnnnnnnnnnnngcaccggagctgccccaccctctcctagccatctgcaactactggcccccaaggagaacagtaagaagaattcagaggagctaaaatcaccaagattgagctaaagcccccgggacacgccagaggagcctccattagctctgtcccaaatccatnnnnnnnaaacagatcagaggcaagaggcaaagggccaagatgaggccccaacaccttcttcttgaatgtatgggggccaggagacaatagtcacaccctcaccccagcctggtctgcagggtctgtcctccctgctcggttcttccctaaagcaactcacaaagccgctgcagacagcaggactgcagtttttgaggcaaaagttgagacacaggttttgacaaatttaaaaaagatttttctcattagtaaatgtatttgagatgttagaaaagaggtttcacaaatcatattaacttatatgtgaattaatatattttgttaaataa

SEQ ID NO: 7884 - DNA, 651 bp, Macaca Fascicularis
  misc_feature (1)...(651): n = A,T,C or G
tccacccgcgcggacnnngcagaggccgcccgcggtcaggccaggccgggtccacttggggggctcacggtctgacccgctttacaccccgaggaggccaggcccctgtgtccaatccggaagtcgcagggaagtggggaggtcaggatggtggcgcccgcggctcgggtcctcctccgggcagtgcgcgcggctctcgcttccacggtcccggacctgctctgcctcccggcccaaggctccccgcgtggcctcgcgtctggtcgcctacccctcgcggcccgctcctcgcagcatggacctggatccggggcgccttggtttcgaattgccaggagggccctgagcagccaaggaatttagaacgagtccacgtggacacgcaagtctcagcgagtggggatttcctgcgaggccgagcgcgaggacgagccggcctcggaggcttgggctcgggctcggggtctccccgggaacgcggccggccgagaaggtcggggcgctcgccgggctcggcacagtcctgcgtgtcgctgggacgaaggagccgacgcaggccaggagtggtgcgcgcgggcggcgagggggcgctgtggcccgtgtctgccggcctgagtcctggcaacggtgggcgcgacccacctcctcgca

SEQ ID NO: 7885 - DNA, 694 bp, Macaca Fascicularis
  misc_feature (1)...(694): n = A,T,C or G
aaannnnnnnnnnnnnnnnnnnnnnnnnnnnnnnnnnnnnnnnnnnnnnnttgccatttttgattctgattgtcacagccaagtactttgttttctttctccctaattaataactacattccctgaggcctcttccaactacagaggccttttcttccagaagagtcctgcagaagatgctggtatgatgggcaccattggctaagtaaactagatgcaggaagcagtctttggggccagtctgccagctgagtcctgcttttggatgaagagttgatgagatactgggccaggctcaatgctgtagttttaatgctaagaggttangnnnanttcacagagtacacctcttagtaacctctgacttaggcagctgcttaaagcaaattgcaaaactggcttgatttggaatgtttttattagaggaaaaaagaaagccgtattatctggaaaaaacttcattttaaatatccattattcaacaaattatgtccagaaagtggtcagaacttcagcaagaaaagtgaagtaataatgcagaattgtggagcaacgcttcaggaaatattcctacccgagcgcttgtacttttgaagtcataacaacataatgatgagcttttcacatcacctttatggtttcaatccctagctcaaagctttctggaatcttttattttttgtaaacttttttt

SEQ ID NO: 7886 - DNA, 655 bp, Macaca Fascicularis
  misc_feature (1)...(655): n = A,T,C or G
tcagaacagaggcggctgccgtcagtctgagcgcggcgggaggacagagagtggctgtggccgagcgcccgagcaggactaggtggagctgcggcagcccccgcccctgtcaggannnnnnnnnnnnnnncacctgtgggggcgcaaaagttacctccccaaaccctaaagccacacagcacaacctttccccgagtcacaaaannnnnnnnnnnnnnnnnatacgaggctcggtgcaggcatcgcccaagccttcccgacgcagcgagctagggaagggagctggggcgggggcttccctcgccccacggccctctcctctctcaggacgggccacgtgtttccttcccctcggactgagggggaaagctcgtaacaggaacagctgtagggagtnnnnnnnnnnnnttttaaagctgtccgtattttgttttatttgtaggggctggggtcccatgaacgtgatagggtgagcaacgcacagagtcgagggcagcaaatgtcaaaatttgggggtggggcctgcaccgggaacttggacgcgggccctggtcggggtggaaggagaggtcaggagtttggggaggggacgcatacttcgccagcaacttactatttcgcctgcaacttgcttttaggactgccgccccctgct

SEQ ID NO: 7887 - DNA, 167 bp, Macaca Fascicularis
tgtggggcactttctaatattatctacatagagatgcgcgtggggcccgtggggtgtcttcttcagaggagagatttagggggggggcggcgcagctttgtgagagagacagagtttcttctcgagagagcggcgcagatatcttggggtctggggggacagaggtg

SEQ ID NO: 7888 - DNA, 156 bp, Macaca Fascicularis
ggacttggatgtggagagttgttagatgtgaaaggaatgcagttgtgtttaagcaccatggccttgatgattcagggttggggagaagaaacaagaaaagtaaatggttgtcacgtatgagaccctttcgtgattgttagttaagtttttattcaa

SEQ ID NO: 7889 - DNA, 710 bp, Macaca Fascicularis
cataaggctcatcttagtgagattgtgctctgtcaaacttaattttaaataggagtggggtttggggtgccatatagaactttctagcaaccaaagctgtttaaaaactacaacaagtttcttatccgtggaggtaattaggcagaggctggatctgaagacagttgtaccctcagtcctctctgactttttaaaaaaatgaatacaaaatattttacatatttaggggtacatttgatattttgttacaagcatgtaatgtgtaatgatcaaattaggatatttgggtatttttcaattctatgtgttggtaatatttcaagttttcctttctagctattctgaagtatacaatgcattgttgctaactatagctaccctactccgctgtcaaacattgccttctaactgcatgtttgtccacattaactaacctcactttacttctcccccaacacacacaccttcccaggctctagtaactaccattctattctctacctccaggatatcaggatttttttagctcccacatatgagtgagaacatgtgatatttgtctatgtctggcttatttcacttaacataatgatctccagttccatccatgttgctgcaaatgacaggatatgattcctttttatgaccgaatactattccattctgtatatgccccgcattttctttgtctgttcttctgttgatggaca

SEQ ID NO: 7890 - DNA, 737 bp, Macaca Fascicularis
  misc_feature (1)...(737): n = A,T,C or G
tgcccacctgtgtacgcagatgccccagccacaaggcacgggtgatggccaagaagaaccnnnaagatgtaagatacaagtatataatttnnnnnnnnnnnnnnnnnnnnnnnnnnntttctagcactgtttattaacctacatcccctctnnnnnnnnnnnnnnnnnnnnnnnnnnnnnnnnnnntgccaaatctccctgtgagggtgtggtnnnnnnnnnnnnnnnnaggccccccacttcctcgatgtccctgcccactcaggcacttcctcatataccactgtgccgcttcaagtgtgacgtatttaggtttctttggggtttcttccatctcatcccaccccctcatttttgttccttgttttgttcagacacttccccaggctgggtccaactgctgagctggatagttttctctgcaccttcctgctgaagatttaacttctgccatggccttctccacacctccctgatgggtgtctctctaatctgggttgtaattagaactgggatctatttaatttctacagccatttcccaacccttcccacagtactagaaatcttagtcctataccagagtaagaggtgtgtacaagcccccactactgtatgcacggatcgctttggccaataattatgtcagtgaatctgagagctgtattaaacactttagacatttgtagaagggaattcatagacttttcacttatagtacaaaatggtttttttttt

SEQ ID NO: 7891 - DNA, 655 bp, Macaca Fascicularis
  misc_feature (1)...(655): n = A,T,C or G
cannnagcatattttgtnnnagannnnagannnnaccaccgggacagagatgtagtgtgaganngctactnnncagaaaaagccaccatgtcnncgtatagttgccacccaaatagcctatatctnnnnnnnnnnnnnnnnnnnnnnnnnnnnnnnnnnnnnnnnnnnnnnnnnnnctagatgaatgaagaatatttatttttattacttgttataggttgggcagctctgtaccagcggaccaatcttttcatccccgcgtacctcatcatcagagcaaaannnnnnnnnnnnnnnnnnnnnnnnnnnnnnnnnnnnnnnnnnnnnnnnnnnnnncctccagcggaaatttgaaactacttcaagggtctatgcaacaccgtttgctttccataactgcaacggcagcaacgaannnnnnnnnnnnnnnnnatctactgatgggaaactgtggatcttggaatctcagaggggacaactgcaaagtgtttatgaacttcctggagaagtcttctcttctcctgtggtcctggaatcaatgctcattattgggggtagagataattatgtttattgtctggatttattaggtggcaacaaaaaataatacagtcctcatttatataacaaatgtgagatgtttaaaaatatttta

SEQ ID NO: 7892 - DNA, 752 bp, Macaca Fascicularis
  misc_feature (1)...(752): n = A,T,C or G
caggagacagtnnccgcctgggcttcannnnnnnnnnnnnnnnnnnnntgctgtcaccgcttgaagtagcagtctctctggaancatttnnnnnnnnnnnnnnnnnnnnnnnnnnnnnnnnnnnnnnnnnnnnnnnnnnnnnnnnnnnnnnnnnnccctcacaccggaggacgtctgctctggactcgtcaccccaggagaactgaacacgggcctgctcactgccctggctggagaggagcacaacagatgccacgtcttcgtgcattcttcaacacgtgccctcaccgggccagcgtcccccttccccgcgcaagacttgcgtcccccgtgcctgctgggtggctgggtcctgtggaggccagcggcggtgtggcccccgctcnnnnnnnnnnnnnnnnnnnnnnnnnnnnnnnnnnnnnnnnnnnnnnnnnnnnnnnnnccaaggagacccaaggggtccaggaggtgggcgccctccgtccttccagaagcttcccgggctcctctgttcctctgtctcatgctcccaagccacacagcaggcggggagggaggcaaggctggggagtggggcctgagctgagcactgcctgcccccccaccccttcccatttcactggtggagacgtggagagggtggggcgggctggagtccgagggtcccaccnnnnnnnnnnnnntgcttgggaacctccactccccacatcccaatagcctggtgtccccagtggggttggtggcatgtgaca

SEQ ID NO: 7893 - DNA, 760 bp, Macaca Fascicularis
  misc_feature (1)...(760): n = A,T,C or G
agttgcaaacaatccaattacgctctttaaaaatgtatagttaagtaattattgattatagtcaccctnnnnnnnnnnnnnnnnnnnnnnnnnattcattcgttttggtttttttaatatcagaaatggtaatcttttatgacaatttcctgattgtttttgaacctaagttaacattcttctttcctgaatttcctataaattttttaagccactttctactttacatttttttctttgtctatgaatccatgaggtccttagggtctgaatccaggtctagtttatttatattaaaatattctactctgcttttgaaatagtgtatataccagtgtgtgtgtgtgtgggggggggggtgtaacaaaaaagttttaatgaacacctgtttttaaaatcttgctccccactcccgccacttcattttacaaagatttttagttcaatgtacatttctgtttgtgtgcatgtttatacacagattaccattccccatacatatgtacacatatatacatttctaagggtattaaacctagactggcgtctttaagcctcaaaatgttccaaaaaatgatgtattgtgcaccgtgctatcattgtggaattatgttcttcatgttgaaaaatctctcatnnnnnnnnnnnnnnnnnnnnnnnnnnnnnnnnnnnnnnnnnnnnnnnnnnnnnnnnnncctattgtttttatttccgggaaaaaaattttatcattataactcattactataacctaagacct

SEQ ID NO: 7894 - DNA, 658 bp, Macaca Fascicularis
ctagaagtgcttagacatctgtgacaccttgtctttaattgcctcagggagcaatgtaggtatcaaagagattacactaattttaaacctaacggattttacctaataatgacatatggatcatgagaaccacagaattcttgttacttaatgaccttgtcaaaacctcagcaaaaagagaccaccagactgtagtgaggcttgtagcagcataaggtcgtgttcctaggatgactacagatctctccccaggcctctcagttaaatgagaaaactcaacactgcccacctggccgtaggcccttgaccccctttcttggagcatttacaaaaaaagagcttacaattgtgagtccttcctctgtccccttgacatgtatgtgttctctcctacaattcaggagtatctaaggacctgaaagccattcctttgaagtttaatcatctggaaggttactgtctcccattcttggtgggagggtagaatcctgacttcagtgataatcgccggctagctgacacagctggtctaatcacttttatactgactgactttgaaattttttgcatgcattccggctctttcaccctcccttattctctctgtaagctgctcaattacctctacattgaaatggaacgctgctctttcccctac

SEQ ID NO: 7895 - DNA, 2036 bp, Macaca Fascicularis
tttagttgacctttttcctttggttttcaaatcttcaacataaatcagaatagtgtaacaccaaatgagaacatgtgttttcataaaggggttgaggccaccagtactgcagtgaatttccttttctcctccctcctcttttcctctgagcttgcttttagggaaggttaatcttataggctacctatctttctctccaccttactaaaatctgagtaatgatagatattttaattttaagtttttaaatttaggattactcagagctactcttgagtatttttccaaattaaatcatcctttattatttgcaagttggaccaaattttttttttttttgggagatggactctatctaaggattgtttcaaaaggactttcttattctcattcctaattttttcttattcccattcctaattttttcaaactaattgcttaaatctagaaccagtcgagattagtactgtacaatggtaagttttgattgtatttatagaaatataacataaaatatggaccatgttttgaaatcttagaggaattctagtttaagatctgaaatactttaaagttttctatcgtcttactgattatgaaggttcttataacccccaaggtaaaaattatttcagcttaaaagaaataattggcaccatgttctgagaaagattttgagatatacattgttttttgtttttgagatagggtctcactctgtcgcctaggctggagtgtggtggcgtgatcttggcttactgcaacctctgcctcccagattccagtggttctcctgcctcagcctcccaagtagctgggattacaggcgtgtgccaccacaccggctaatttttgtatttttagtgttgcgaggctggtctcgaactcctgatcccaagtgatccacctgccttggccacccaaagtgctggaattacaggtgtgagacactgtgcctggccagatgtacattgttttagatcccctgatacaaaactacttttgagatggtaagattagaatatcatgaaagtttaaactgaatccctgtagcgacttctgaaatttaggaagcattccctcttctacagcgatctggtcacagggctggattctctgacaaaaatttattctatggattctggacagaagacacgtgagggtgatatgttttaaaggaaagaggttatgcttatcttctttgcagttgataaaacattaaaactgtcttgccatagagaatataccatcaaataaaacaaccctttccctttggtgtacagttacttattaagttgatttttgggtttctttcgccagggaacttttcaaaactggtagtaattatttttaaaaatcatgtttgacatctttctattgctcggaaccagtccctgtagctgtctaagttatgagtggagaagtctgggtatgaccctgttgtgtacactcacacttcatgattgacattgatttactcttttatttccatttggttatgcttatttttgtttgaaatttgtttttttcaaatatgtttcctttttgaacttacagaattgttgaaattttctaatagccagctaaaatttggtatatattagctctgttcgtttcacttggacgtttcattttgaaagaaagaatttttatgtttcacatatagtttcatacagagtagccagtcccataatgaaatgctgtattgccatagtggtcacacccaagtggtccagtatctcaatggcgaggcagccggattggtcagggctgctttgttgaaatgtgatgattttcatatgacttctttctctttctctctctttttttttttccttttttggcctaatgttgaagatatagaactttgtttttaaatgtttttataacttcattcatatacctaagtttgtattttttgtgactttagacttcaacagtttgtatatcgggacttttaatgtgattactgtactaaataaattccactaataaacatcttacattaacaccttaaaaaaaaaaaaaaaaaaaaa

SEQ ID NO: 7896 - DNA, 754 bp, Macaca Fascicularis
  misc_feature (1)...(754): n = A,T,C or G
catannnnnnnnnnnnnnnnnnnnnnnnnnnnnnnnnnnnnnnnnnnnnnnncaggtnnnnnnnnnnnnnnnnnnnnnnnnnnnnntttctttaggagctgatatttgtctnnnnnnnnnnnnnnnnnnnnnnnnnnnnnnnnnnnnnnnnnnnnnnnatggatctgggnnnnnnnnnnnnnnngccatcaacnnnnnnnnnnnnnnnnnnnnnnnattgggctnnnnnnnnnggagaatcnnnnnnnnnnnntcgggccnnnnnnnnnnnnnnnnnnnnnnnnnnnnnnnnnnnnnnnnnnnnnnnnnnnnnnnnnnnntnnnnnnnnnnnaggcccaggggcccatcctgctcatcgtcggtcaggatgaccataactggaggagtgagttgtatgcccaaannnnnnnnnnnnnnnnnnnggcccatggaaaggaaaaaccccannnnnnnnnnnnnnnnnnnnnnnngcattacatcgagcctccttacttccccctgtgcccagcttcccttcacgaattagtaaacaaacatgtgannnnnnnnnnnnnnnnnnnnnnnnnnnnnnnnnnnnnnnnnnnnnnnnnnnnnnnnnnnnnnnnnnnnnnnnnnnnnnnnnnnnnnnnnnnnnnnnnnnnnnnnnnnnnnnnnnnnnaatgcatttgtctattgttgacatgagagattcaagatcaggttctagtgttcagtaaccctatgtgaatcagctgtctcctggaaacataaagc

SEQ ID NO: 7897 - DNA, 671 bp, Macaca Fascicularis
  misc_feature (1)...(671): n = A,T,C or G
accctatcaatgtaaacaatgtggtaaagcattcactgtttccggttcttgtctaatnnnnnnnnnnnnnnnnnnnnnagagaaaccctacgaatgtaaggaatgtgggaaaacactcaaattttcttgttcttttaagatgcatgaaaggacnnnnnnnnnnnnnnnnnnnnnnnnnnnnnnnnnnnnnttcagctgttccacttcccttcatgaccannnnnnnnnnnnnnntggagggagaccctatgaatgtaaacaatgtggcaaagcctttagtcgtttgagttccctttgtaaccataaaagtacttatactggagagaaacccaatgaatgtaaacaatgtgaccaagccttcagtcgcctcagttcccttcacctccacgaaagaattcatactggagaaaaaccttatgaatgtaagagatgcggtaaagcctacactcgttccagttaccttatgcgccactaaagaagtcatgatataggggttgggtgtagtgactcagcctgtggtcccagcactttgggaggccaaggtgtgtgtattacttgagcccaggagttcataaccagtctggattaaaacaatgtgaaacaacctgggcannnnnnnnnnnnnnnnnnnnnntacaaaaaataaaataatgccgggccagtggctcacg

SEQ ID NO: 7898 - DNA, 763 bp, Macaca Fascicularis
  misc_feature (1)...(763): n = A,T,C or G
catggatgagagctgaagaggtttgtcgtaaagggaagannnnngaagcaggagtagcaacatggctgccactactgtcactgtgatgcttatttcactataaaacccctcaaactgcaggcaccaacagtggtagaagggaatcccagtgagggtgatgactctcttggacacctgtgacacaaggattaggagatcccacagaagggttaggacacatttgacttnnnnnnnnnnnnnnnnnnnncttctacaggaccctgctggagtagatttcagtaatctatggcaaaatggttggacaatccaaccagaagtatcttgaggtcaatgatctctgtataaggagaatgatatgctaggcttctgctgaagaattgcagaccaagcaaggtatcagaaagtgtagtaaaaaaaatacaaggaggcacctgttcttgttgcatctttgtggatgtattatataaaacttttaataagatacttttaaagtgttgagtctttttaagattatgtttctactagctagtgtaaccattctattcnnnnnnnnnnnnnnnnntatttgtatgttttaggatactattcagtattagaaactcttgagtgttacattataggagcatgttttttatcatctggtgttaaaggcattcagagatatttcttgataaatatcaagggcatcattgggaagatatttattcttattgcattggggttgcagatatgacactgtataaaataaaacctgttccttgca

SEQ ID NO: 7899 - DNA, 535 bp, Macaca Fascicularis
  misc_feature (1)...(535): n = A,T,C or G
tccccacagtccacagttcagctgcgcatcccagtccctcgctgtccntcccaggtcaggcggcggagctgctgtgaaaactctggtacgaatctcgtccctcagctgaggtcgagtccgggacccaggtgtggctgtgctcctgcccaggagcagcgtttggtctcgtcgggccccttttctcttccctcctttgtttacttgttttgttgctttttttttttaacttaaattttgggtcaacttgacaccactaggatgatgattttttaaggagctggggagggcaggagccttcctttctcctgcacactatgtgccccaagggaccagaccctgggcgaacagagctactgagacttgaaacctcattgctaccatagactnnnnnnnnnnnnnnnnnagctgcccagactcatgtgcttgtgacattcatgaaaaccaaccctggccgggcgcggtggctcacgcctgtaatcccagcactttgggaggccgaggcgggcggatcacaaggtcaggagatcgagaccac

SEQ ID NO: 7900 - DNA, 731 bp, Macaca Fascicularis
  misc_feature (1)...(731): n = A,T,C or G
aaatatgtagctgtgtncttgaaaacacnnnntacattgcatatgggcacagcagtttttgacccagccagaatcagttcatatttaattaaatattgctttgagnnnnnnnnnnnnnnnnnnngcatggggctccatgacttcccttctgtccccacgagcccctcctccatccagcgacaagccatgggcatgcacacaatgcagcaagaccaacacaagagcaatattgaattgttcattctatctaaaattacatgtatataaaacatataatttatcttcctgcatttttgaagtataaagtcataaattgtacatatctgtaagctagtatacttgtttcactgtttgtaatatttaagaaannnnnnnnnnnnnnnnnnnnnnnnnnnnttaaatattttaaaaattgctctgtgatacttaatttttttcccctaaatttgtaatgtgttgcttctacataagttctctggaaatatctacaactaataggacacatgtaaatccttgaagacacatcctggaattcagtaccccacaaggacagtgtgtatacaaagtannnnnnnnnnnnnnnnnnnnnnnntgtgggatatcgatgtgtatatttatatttaaagtgtatttattgttacaagtcnnnnnnnnnnnatattttatttactctgcggttnnnnnnnnnnnnnnnnnnnnnnngtttctagttgccagtgatgttctggaaa

SEQ ID NO: 7901 - DNA, 705 bp, Macaca Fascicularis
  misc_feature (1)...(705): n = A,T,C or G
gacatggaagcttaaggaaatgaagcttgttggaaagagtttnnnnagggaaaaactatgggttcatcaaagacttgtggaagcatggttttgttttctatatccctttgtcaccaagttcctgccagaatccaagagcatattctgtaacaggtctattgatttttaaaagttttattgtaattttgcataaccttatatcttagatattttgtgttaacttgatatgaattttccaacgaagaattgtgtcattagagacccattctttataaactatagtttgttctgtaagcaacttttaaaccatctgaannnnnnnnnnnnnnnnnntaccttttcattgaagcattttctagaatgtattaagtatttcatgcttttaaaaacaccatttttataacatgttaacctttcctacctttccactgagagattatgaagattcattattgttcattgctataatatgttatgctactcacaggaatctggatgtgggtgggggaatcttagccttaaacttaatgacttaggttaggtggtgttttatatttatctgcttttcacatatcttctgttggaatacctatgttaataatccatgtttgtttattcatagtgcattgagcagctttctactctcccacatggcatctaaacattattcattaatatgttataggctggaaannnnnnnnnnna

SEQ ID NO: 7902 - DNA, 209 bp, Macaca Fascicularis
aactccaaagatgatcctgggaaaagttttcaccatgacttacagtatacctaaccattacctagaagctgaggttggatatttttaatgtgggaaaataagaaggaatctgagctttcatagtaaaacatctgctacccataaacctgtgtggtatacaaatcatgttgctttcatctattaatatatagaaggaaaagtgtattagt

SEQ ID NO: 7903 - DNA, 236 bp, Macaca Fascicularis
  misc_feature (1)...(236): n = A,T,C or G
gtctggggatgctggcaggcgcggcgtgtcccaggtccccactgcagccagatctgagggcgactgtgaagagactgtggctggccctggtgaggggactgtggccccgacagcattgcagggtccaagccctggaagtcctgggcaggagcaggtggcggaggggggcccctgagcaccaccgatccaggcgctgcacgtgcttcacctanaaggacaaggagtgtgtctactat

SEQ ID NO: 7904 - DNA, 762 bp, Macaca Fascicularis
  misc_feature (1)...(762): n = A,T,C or G
gagattaaatgaaaaaaaaagcagatgttnnnnnnnnnnnnnnnnnnnnnagagacctgttaaaccattcagaaaaagcttaagaaatgcaatatgacttccttttnnnnnnnnnnnnnnnnnnnnnnnnnnnnnnnnnngataattannnnnnnnnnnnnnnnaagtagttgattattttcacattttaattgctaatcactggctatataagtgtttttnnnnnnnnnnnnnnnnnnnnnnnnnnnnnnnnnnnnnnnnnnnnnnnnnnnnnnnnnnnnnnnnnnnnnnnnnnnnnnnnnnnnnnnnnnnnnnnnngaagaaaagggactgggggaaggaaacttattggaaaacttgatgcaaatgagtttctacnnnnnnnnnnnnnnnnnngcttgctctcctttgctgatggattgcgtttatcaaactattcatgctagcatttttccaacaagagaacttatttcgcacaggcctgctgtaggaccattgtctcgtgtaattaggaattttccatttgaaggnnnnnnnnnnnnnnncagtagtaggaactgtagggagagctctcannnnnnnnnnnnnnnnccatattaactggattttctaggacaatcagatttcaaatattctgtcatcttggcataagccattaaaagctgggaggttaccatatttggcattaaaaaaatgtctcttaagtcacctcactcccagatgtagcacaggaaaaccctttgacacaaaccatgtgttctg

SEQ ID NO: 7905 - DNA, 732 bp, Macaca Fascicularis
cacacactacaatatttcttgatataggtcattatgggtattagtttagtgactcaataatatcatggctcagggtcagtttgtctgtgattctctaggcctttctctcatagtcttaaactctaggtatcacattggtaggctagagagaggagtgagggcagcccaggtgttccttttatcagaaaagctgaaagtgtctcaaaaagcacacccttctcttatcagatgtccatcttattggccggaactatgctgcacctccattccaagaacaagagacgctgaggaaaaaaaatgtattgttttagcttctaaaaaggagatggccaagggataagacagttgagaagggtatggcatgacagagtgtctgctactctcttggttttagaaggaactcctgttattccagtgtcccctgagtaccgactgggtctcacggggccactccagattcagacattcttctttcttcttctgctgtaccaccatccttctagactctgccgctttgcttcctcccaccccatcccccagcaccacacagagtgactccactcccacacactcaggcattcgcacagtccaaccttcatttttaggaagtcgttgaactgactagcccttaggaaggtggcacaggtgttcctaggattataaaatgttttattgaataagttttctctgtggatgtccaagaacctttcctcccagcctgttgaaagaaca

SEQ ID NO: 7906 - DNA, 817 bp, Macaca Fascicularis
  misc_feature (1)...(817): n = A,T,C or G
caccaactttttacatgaannnnnnnnnnnnnnnnnnnnnnatactgaaatctgtgctcgcaagatctagcagtgaccagggctgcccagcgggggctctccnnnnnnntnnnnnnnnnnnnnnnnnnnnnnnnnnnnnnnnnnnncatcagtgcactgggcctctctgaggtcagcttatttgtactcttgcaatatttaagttgtttttttcttcagtaacagaaaccccagttgggagtttaacaaataactgattaccattcatgcatttttatttcctattaaagcatgtgctgtgctcagataataatagtttgtcagtttttagttttcagtgttcaggttatagaatataactgaccataaaaattacctgcaggtattttctttttatgaacctgtttttaaattaccaaattatttctttactggtttctgttttatgacagaaacaagtatctaacagtgaccttctctatgggtcaaggacttccttacaatttctcctaactggtgaaaataatacctgaagttttctgccttattgaggaaatttccgaacagaagagaagatcattaaccactgcatactctgtgtatataataggtcaatgtaaagaaacatgatttgaggtggtgcatgcaaataactagggtttattctatataatgagtatttatagatctgtaacatttgtttcaaaatgctgtttcatttttataaagtaccagtgtttagctgctttttatacatattaaattagcaatttaaaaaactcaaatatccgaaggtattttaaatttaagtattttc

SEQ ID NO: 7907 - DNA, 1128 bp, Macaca Fascicularis
atgcaaaaactgcaactctgtgtttatatttacctgtttatgctgattgttgctggtccagtggatctaaatgagaacagtgagcaaaaagaaaatgtggaaaaagaggggctgtgtaatgcatgtacttggagacaaaacactaaatcttcaagaatagaagccattaaaatacaaatcctcagtaaacttcgtctggaaacagctcctaacatcagcaaagatgctataagacaacttttacccaaagctcctccactccgggaactgattgatcagtatgatgtccagagggatgacagcagcgatggctctttggaagatgacgattatcacgctacaactgaaacaatcattaccatgcctacagagtctgattttttaatgcaagtggatggaaaacccaaatgttgcttctttaaatttagctctaaaatacaatacaataaagtggtaaaggcccaactatggatatatttgagacccgtcgagactcctacaacagtgtttgtgcaaatcctgagactcatcaaacctatgaaagacggtacaaggtatactggaatccgatctctgaaacttgacatgaacccaggcactggtatttggcagagcattgatgtgaagacagtgttgcaaaattggctcaaacaacctgaatccaacttaggcattgaaataaaagctttagatgagaatggtcatgatcttgctgtaaccttcccaggaccaggagaagatgggctgaatccctttttagaggtcaaggtaacagacacaccaaaaagatccagaagggattttggtcttgactgtgatgagcactcaacagaatcgcgatgctgtcgttaccctctaactgtggattttgaagcttttggatgggattggattatcgctcctaaaagatataaggccaattactgctctggagagtgtgaatttgtatttttacaaaaatatcctcatactcatctggtacaccaagcaaaccccagaggttcagcaggcccttgctgtactcccacaaagatgtctccaattaatatgctatattttaatggcaaagaacaaataatatatgggaaaattccagccatggtagtagaccgctgcgggtgctcatga

SEQ ID NO: 7908 - DNA, 704 bp, Macaca Fascicularis
  misc_feature (1)...(704): n = A,T,C or G
tttgttaaggcagagtctctcctgttacacaacactgaacctcatgccactgcctcagtggttattggccagccccagaggttagacttggagcataattctgagtggcagctaaaggtagcaggagttttacctctccctgctttgggttcagaattgagccagagaaaggaagcttnnnnnnnnnnnnnnnnnnnnnnngttaatgagcaaatgttatactttatatcccacagacatctgccaccttgtttgtcttgtcctggggagtactaaatgttaagcttttaaaaatctgaatttcagagaatctcctagaggacagaggaaaacccctcagcatggtgtgtcatagtgggattgctggttccttagccccatgccaggttgcannnnnnnnnnnnnnnnnnnnnnnnnnnnnnnnnnnnnnnnnnnnnnnnnnnnnnnnnnnnnnnnnnnnnnnnnnnnnnnnnttaaatcctgtatttaaaaaaaaaannnnnnnnnnnnnnnnnnnnnnnnnnnnnnnnnncagaggaatggccaggagaagacatgttggcacatgttcttccttctaaatctttgtgagatttttttggtaaaataagttttttggcagttaaaaaatgactgatgtaagtcactttataggaactagctgatggatgttaagagactttataatttttctcagggacctg

SEQ ID NO: 7909 - DNA, 782 bp, Macaca Fascicularis
  misc_feature (1)...(782): n = A,T,C or G
gcagggatgcagaggcctggttcaacgagaagagcgcctncnnnnnnnnnnnnnnnnnnnaggatgtcggagccacaacctcagcccggaacgagctgactgaaatgaagcgcactcttcaaaccctggagattgaacttcagtctctcttagccacgaaacgctccctggagtgctccttgacggagaccgagagcaactnnnnnnnnnnnnnnnnnnnnnnnnnnnnnnnnnnnnnnnnnnnnnnnnnnnnnnnnnnnnnnnnnnnnnncgagaccgagggccagaagctcgagtatgagcagctcctggacatcaagctccacctggaaaaagaaattgagacctactgtctccttatagnnnnnnnnnnnnnnnnnnnnnnnnnnngaggttacaagtctaaagattatggatctggaaatgtgggaagccaagtcaaagactcagccaaagccatagtggttaagaaagttcttgaggaggtagaccaacgcagcaaaatactgaccaccagactccactccnnnnnnnngaaatctcaaagcaactaatctgagatgcagcagagaatgtacgccacatgccccctgagaagaaaaggcattctgtatctgtccagaaaaatgtgcatgtctaagaaaaacatctgtcctgttgtctttctgttgttttctctttctgggcaatcaataacagcatctccccattcatctggaagaatgccacacacaaatccgatgactcatttgattatcctacagaaatctgttgtcaatctt

SEQ ID NO: 7910 - DNA, 652 bp, Macaca Fascicularis
atctcctccttttcatccctaactcctcctccccctggcgtggaattgacgcccgtgcagtacatttgccaagtggcaccttctttcaatttatgtttcattttgctatggtggtggttctttatttgctggttgccttttctcacacatctttctctctgtctctccttccttctgctttttgtttttctgcccagaaaaacctgacttcgataccaaaaaagatgaaactacagaaactcaaatttaaaaaaaaactttaaaaaaaacaaaaaaatactcaacgattctttcagctttattaacattttccattgtttcttgcgacttgtgtctcgttctttgtagtattgatgatgaacatttgataatgaatgttcttgtatattcagataaagaaaaaaaaaaaccaaaaaagcggtctgaatttaatagtgtttataataaaaattttaaaaatgaccctcatagcacgcaaaacaggatggggaatttcccttcttctttctgtgacaatgcgcatcattcctgcattagtttttaacaccaaactacctacattcatcatttccctcatttttcttttattttcttgcatttgtgaattagttcaagaatgctagaaaagtgtcgagttgtgcacatccatttc

SEQ ID NO: 7911 - DNA, 1949 bp, Macaca Fascicularis
acaatctaacaggcaccccccaccaaccaaaaaaataaaggttattgtagcatcttccccttttaaaaatctttaaaataagagaattcagttcttcccaaagcagtgtttaaaaaaataaataaagtatttaaacaaaatcaaggataccctcccgcccatctatcttacattgtgtggtatgagtggcaccattttgtgacccaggtaggatagtggatgtacagtttagatacccattttaaagcagttagaaagatgtaacttgacaaggaaagcagtctcttttgtcattctacatgtagtgcttcaggagtacttgatacatggaaggatttttttttaagaaaaaatgagtatgcctccggaaagtattttgctgcttttaagagccatagatttgtcttaagttaataaatgctgaatagaaagcctgatgataaaggtgggtaggtgggtggatggatgaatgaaggaaaaatgaggagaaaagagaaagcagaggagggatgagacagagaacaaaagaacacaggctctactgttatcaaaaagcagcctcaccaatgtgcggggaataaattggaagtcagatcattaagactttttttcatgccacatagaaaggctgatttgtcctataatgtctgtactcaaaagtcatgacaataaaatgagacctaggagtcccaagtgttattaactaccacaattttgtataactgattcttcactggtcatccagaagtctttttgaaagtcccattgccacacctgcctcctcagtgaaatagatgtaaaacccacaaagagagaatcaatgagccacactcatataggaagcaaatagagttgacttcaccagtggaaaatgcaatttcttttcaaagtgaaaactgatcgattcacaactcaaggaaagcatggagtaatttcagaactccagtaagaagtgataaatgtctagtttggaatcatgtggctgaaaatcttaccatatgctttccacaggctgggcaagaggatagagcattgaatagatgctttaattccatttttgacaatgaagcttatgcttgtgaaaatatttatatttaaccgtgaggttatgatgatttttctctacattttttgagaagcctcttcagaaaagagcaaagtagtctgctctaatggatagaataaggagttgggaaaaaggagacctgggtattaatctcagctctaccactacatatctgtgagaccctaaaatctttaccattccctctactattcctagctcccttttctttcacagtcaacaagtgttttttgaacaattatttaggtaaataatataccttaaaagttagtactgattcccattatcacactctgttgttccccagatgctcttttgaggaattgacttggttaatacagttaatattatgatacttataataataattttgagaattatcagcatgagacaatttatttgcataatagctttttgttattatccagaatacatttagttctggattttgtttgatattgtgaatgcaaactttttttgtattagcctaaataaaatgaaatgcagttatagaaatatttctgctgctagaaaaaaattacatacagccagtatacatatttagaggttctgtagtcttctagactgtaaaggtagatggccatgaggggaaatctgagtgtataaggtgtgtttcgtgttcccactgtatatgcgttattacccttgtctgagtggttgtttaaactgtcatctgtaaaactaatctgtaaaatgagatctgggttctgacctatctcttacagtccataatgttgtgattctaagaatatttcattccttattgctttctgccctctattctgaccaatgctgtaaccacaaataaaaacattacttgccctaaaaaaaaaaaaaaaaaaaa

SEQ ID NO: 7912 - DNA, 734 bp, Macaca Fascicularis
  misc_feature (1)...(734): n = A,T,C or G
tgcttacactttttctcctctggactattcattttcttcagggatatttgtttgtacttgaaaactgttacataatttgcaaatattttctgtttgatattaacatatctaagaaagaatggcaaatctattttagtaaaatattacatcttctaattcatcagtttagcaaatctaattttattgattttagtcatgttttatgcttgagaagggctaacttcctgtatactctttctaaaatatgttctttagtatgaaaacatagcactaaataagtgaaaaactcaagggcaaacttccctgcatactctttctaaagtatgttctttagtgtgaaaaaaatagcactaaataaatgaaaaactcaagggcaaaaccaatttactaaataagcttaaatatccctgaagtctagaagtaattttaaaaacaatagcactgaaacttttggggggtattttcataagttaacaatgtttgtgttatataaatcaatatactagaagcttgccaagctctatttatgtcatattacagaactcagtataaattaagattctcttgggttccttccaaataagttagttattaagttagtaaaatggtttctttaaaatgtagttgtacttacaagctagcccaataaacaagtgtttctagaagattctatggtacttatttcagtttaatatgcaaaactagactatgcatttnntcagagcaagagagag

SEQ ID NO: 7913 - DNA, 672 bp, Macaca Fascicularis
aatatttacctgctgatttggggctcttaaatttagaatcccctttcatgtgtttaagagagatatttacattcaaatcagccttttataattacattttaaattataataaaatgatggtgccggcgctccagttttccatgtattttaactgtaagagaagctgtcgtgaattgaatgggggctgcccatcacccagagcgcccccccccccacccaccgtgtgggttctggcctgcagggcacacgtgtgtcctgagcatggtggctgcatgggtgttacctgtggggccctccctccactgccaggagaagggcctgacggggattctggccccacacagtgcgatggttgcccgacttcaccacctgcagctccatctgagaaggtcctgatacgggctggggtccaggcccactgccttcgtgtcctgagccccacagtggcctgcaggcctgctttggaagccattatctcctgggcggccagccgggcacagcagtggacgtttctggtcgaagcggttccgcgggtagggggacggtcatctcctcctgcaactgtaacccaggccctgcctcccctgccatgctcctgtgggtcccactgttgccatctcgtcctcagtggcttcccgatgttgcttgctggcagaacaggccccgcaccgt

SEQ ID NO: 7914 - DNA, 731 bp, Macaca Fascicularis
  misc_feature (1)...(731): n = A,T,C or G
acattgtttatgatannnnnngggtactnnnnnnngctccaatttccattccttggtatactcagtatgtcctagtaaggaaagctttccactctactggctccttaagaagcaaaagtaggttaaattttaaacttcactgactagggtcttctttctcccctgttctaaatggagtaaaagtctgatgccaagacaaatattgggagcgagccttcctcactagccatgtccaaataatgagcatattttcacgtggtcttcactgcatttggttttgtttctgatttcatgttcctttaaggtacagtcagaagaaaatgctgagttctgagagagttccaatgaggagctgtctttcagctttggaaaatatgcatctaaaacaaaaccannnnnnnnnnnnnnnnnnnnnnnnnnnnnnnnnnnnnnnnnnnnnnnnnnnnnnnnnnnnnnnnnnnnnnnnnnatgtggctctaagcgttaacattactgtctgtatgtcgtgtatgctaggtgatatcctcagtagggattgactactagactgtaagtgtgttttatcaaagtgtgtaagaataannnnnnnnnnnnnnnaattgaaacgtaaagaaatgacacttgtgaacgtgtgaacgttaacactgtagttgatagatcttaagctgctaattgttgagagagatttaaatttatgttctgtctggtcgctgcagattctcagcagcact

SEQ ID NO: 7915 - DNA, 505 bp, Macaca Fascicularis
ctctccctgcccttgatttttggggtttccggccgtgcatctggattcccagacaggttcagtggcagtgggtcgggcactgatttcacactgaaaatcagcagagtggaggctgaggatgttggggtttattactgcatgcaatatattcggtttcctttgactttcggccaagggaccaaggtggatatcagacgagctgtggctgcaccatctgtcttcatcttcccgccatctgaggatcaggtgaaatctggaactgtctctgttgtgtgcctgctgaataacttctatcccagagaggccagcgtaaagtggaaggtggatggtgccctcaaaacggataactcccaggagagtgtcacagagcaggacagcaaggacaacacctacagcctgagcagcaccctgacgctgagcagcacagactaccagagtcacaatgtctatgcctgcgaagtcacccatcagggcctgagctcgcccgtcaccaagagcttcaaca

SEQ ID NO: 7916 - DNA, 520 bp, Macaca Fascicularis
ttccctggccatgtatttctaagtagtttctctggatcccattaagtatgcagtttctggagccaaactgccaggatgtaaatccctgctcttttgcttaaccactgtgcggcctcaggcaccctgctcaacttctctatgcctctgtttcatagccagtaaaatggagataacagtatctaataaaaatgcatagtattggccgggtgaggtggctgacacctgtaatcccagcattttgggaggccaaggcaggaggatcacttgagaccaggagttcaagtccagcctggccaacacagtgaaactcagtctctaccaaaaaatataaaaattatttgggcgccgggtgcagtgactgatgcctgtaattccagcactttgggaggccaaggtgggtggatcacctaaggtcaggagtttgagaccagtgtggcaaatatggtgaaaccccgtctctattaaaaatacaaaaattagctgtgcgtagtgacacacagaaatactgccagctactggg

SEQ ID NO: 7917 - DNA, 690 bp, Macaca Fascicularis
  misc_feature (1)...(690): n = A,T,C or G
aaaagttttttgaagattggaattcttcatatgtaaaaagagaaaaatacattcttgattttggtgactagagttgtggatgcnnnnnnnnnnnnnnnctaagattgatgaaccagacgcatgnnnnnnnnnnnnnnnnnnnnnnnnnnnnnnnnnnnnnnnnnnnnnnnnnnnacgttttccagggaacctgcccgagctcttgnnnnnnnnnntcttcgggcctatggagtcccttannnnnnnnnnnnnnnnnnnnnnnnnnnnnnnnnnnnnnnnnnnnnnnnnnnnnnnnnnnnnnnnnnnnnnnaataaaacacagacttaaagcccattttgtntnncaagcatagcagtggtgactcctttcctttctgatcttcaccgaacctcgcttcttnnnnnnnnnnnnnnnnnnnnnnnngagccacggcacctctttgaattgtcacatctactgcatggtgatggtagatttccttttcatctgtactctgaaggaatccgaaacaggcatttttacaagtctaggaaggaaacataaatctatgtgtcaaaagaatgaacatagaaaataatgtgtcctggttaacaaaagttctcattgtaaagtgttatgcacaagattatggaattttatgtgccataaatgaagttgtcttcatttgtctaaaactacnnnaaaaatac

SEQ ID NO: 7918 - DNA, 731 bp, Macaca Fascicularis
cacaaggtgttcagagattctgccctgaatcctacaaccaggagatgagaagcacagagtgacaccaacaggagaacataaagatgtggtgacagttgtcctcctcctgcagagtccatagcagtgcactcctaccgctggtgccctagttaagcctgggggccagcatgcctgatgactgtctgggagtgctgcagtcagggtccccacaatgagcacccagccagtgcccttgcacccggcatgaccgtggccattgtcacctcagagcccctgggtacagaacaatgcatcctaccagagctacatatgaggaaggaccacgtgagtcccgggaaagagctgaggccctgcgggggtaggtggccaggaccgagacctgatgcctgtgtggagaatcatctgtgggtgtgagtggcactgtggggccagtgcctaggttctgctgctccccctcctcaaagatcagggcccgagcaggggctggcgtgtgtgtgacacctggaactgcaggaccaccacccatgtgtgaggccatcatggggacctgaacacggtgtcgtctgcagaccccacccatccattagccccaattcctggccaacttctgccaaggcgagagggtggaatttggaaggtgggtgtaagctgaagcctgtcccccagtggctgacatacagctgtgacactgtgtgtggggggaagaaagagagatcagactgttattgtgt

SEQ ID NO: 7919 - DNA, 717 bp, Macaca Fascicularis
ctgtgcaaatgctaatacatggacgccgtattttggtgagtatttgtgaacagcaaggtcaaagcctagagatattttatgcaaggagattcacagtacttttcctactcatggcagaagagagacctgtatgtaattgttctagcaactgcatttcctgacatttattctcatgtaactgggcagccaggatgaccacagagtggatgagagtacagacccccttggaaggaatgttgctttggtacatgtgagctttgtgacctctgaaaagttccttaacctctctgtgcctcagtttctgcctctgtgccatgcgggtgataataatagtagttatgatgaatgagttaattcatcaaaagcacacaggacagtgccttgcagataaaggcactcagtaaacattagcaatctgactggatgcagtggctgacacccataatcccagcacttgggaggctaaggcgggcagatcacttgaggccaggatacagtggctcacgcctgcgatcccagcactttgggaggctgaggtgggtgaatcgcttgaggtcaggagtctgaggccagcctggccggcatggtgaagccccatttctactaaaaatacagggattggccgggcgtggtggtgcatacctgtggtcccagttggtcgggtggctgaggcgggagaattgcttgagcctgggaggcaggggttgcggtgagccg

SEQ ID NO: 7920 - DNA, 685 bp, Macaca Fascicularis
  misc_feature (1)...(685): n = A,T,C or G
gaccagttgctgccgcccagcctcctgcgtgtcnnnnnnctgccgccccgtgtgctcccgcctctcttccgcgtgctgcggcctctcctcaggccagaagnnnnnnnnnnnnnnngcaggtcctgtttctccagagttgttccagggccatctctgacttccgaaaatccttgcagccctgagccctgtctgagtctcctctgcccagagccactgcacctccagccggcaacgctgagccttcatgctgagttccctccaggcatgcatctctcccacaccctcatctccatcctggccagccggtggtcgctgcgtcctgccccatgtgtgtgatcagtctgtcaacgaataaagtcaccactgtgccctctcagaggtcttttttgcatgtctggcaagccctgggggaagaacttcgatgtgctgtgtggggcgggagcttcgggcctctggccttgagctgcatccaggctgacagcaccaggggcagaagcagtcctgacttcccgctgtgtggggtctgctgctgtggggtcccctgccagcctcagcatctccaggccccaggggtgcccttctctatgaatgccctgcacccactgggcctggcctctccctggactcctccctctctctcctttctctgcctgtctgaccccccactcaccatcttctcaccagc

SEQ ID NO: 7921 - DNA, 772 bp, Macaca Fascicularis
  misc_feature (1)...(772): n = A,T,C or G
aacctaatacatatatatgcacacacacttgttcagaagctatgctgtggccttggatttgtttttccccttggaaatggttcttaactctgggattttagaaggttagaatattttttcaagagaacagtggtactcaaaataatgaaaggtggtccctacattttctgtattcatcacttaaaatttttgatttttccaagaactacaagtaacatttgaaccatgctgctgttgtaccttaaacaaaaactcagtgataaccagtatttagtctattaaaaatgctctttttgaagaaaaaagtttggaagtctctgattagccagagtatagtatgagtcttcactgagaaatatggtgacccattttctttgtgaaaacctgggaaaatgcaagtgtgggtgtgaagtgtgtgttctgtttgcattgaaacaatgtaattttgtgtcttctttttgctttaactgacttatttcagaaattgtacagtcttgagggggaaagtcttttctgttaatatatttgcaattcattaaaggatatggaaaatccaaataagttacttttgaaagcaatttataatcaagttgttaaagctatatgaaagctgtgccatctgtattttcataagaaggcacagaaaaatagagatacaattttatgtttcacaaaaatctagagcaatgtttatctaattttttaaaacttacactcttttaatatatttatatttttaaannngtcatactcttttttagtattattggaa

SEQ ID NO: 7922 - DNA, 2034 bp, Macaca Fascicularis
ctgaagcggctccaaagtggctttgtacctgtaaaaatgggcttgattttttgaacatatagttaaaattgttgtctttattgtaaaggtccatgtttcatttaatagtctaccagaagtatgaggacatcatgtaaaaacacttaaattagaatgaaatagtaataaaaataaaaataagaatagccattttattgagagtttagctgagtggggcactgacttctttccctccattatctaatgttgaactccaggcagcaggttttatatttatgttcactttagaaatgaggaaatggatgtttaagaagttgagtaacatccgaaatatcccccagttattagctgacttcgggactcagtcctgggtcttcctgaccccagacttcagtgtccctaaccactatgttaggaagaaaatataggagataggagatagggatgaataaatgtaatcttcctccacagatgggtaaaatcacaagcttgggagaactgacaccataatgtaggaattcttccctggacaagttgaaaataattctatttcagtacattaaaaggcttcactctgttaagattttggagaagaataagtgaatttggtagtgtaattaacaggcggggtagtactgtcccttatggcttggcaatgagcaggagggcagttcacaatggagagacgcagacgcctttggggcggtgcagcggtagcggagtgagcctgggactgagtgtgcccctgggactgcatgtgccccgcaccgccgcctgccctgcgccaggagaacccagagcagggatgggcccagactgtcctaccaccgtttcagcaggcgcaggtctctccagcagctcctaaacagcttttgtatgtcctgtatccaaagtgtgtggctcatagtcaggttctgtgcttttgatgacaatcctttttttcggtcgggatcattttcatctgttgccgcttctgtccaacctttgctcttcctcctgatccttctcaccctgtcccttcctgtgcctgtctgcacaccgacgtcctcggtcctcgggctccctcattctccggggttcttggcttggtctgactggggacttctcacacctagcttgtcgtggcgctccagggctattgcatcttggttaaaaggcccgtctctgcagactgaaggttttctgcggtcaggatcaggcctgttcggtgtcttcctgaccgcccttggagtctgctcaaggtatattggctggaatgttctgagagactggcagcccaggagtgctgagtcgcttatgtgtccgctgtttacactgtgcatgcgtgtgtgtgcagggaaacagccaggcagatgcacatggttatttatatcttcagattatttctgtgaggaaaattctatcctggtgaaagagcttgctgttgagaaacagtaactgtacccatgtagacaccacagtattcactcaatgtatttgacaggcacactcatgttgtcagagtaaaaggaggcagcagcctctttgaaatgcagggacagagcaagtgacaaggaaaaaacacacagcaggtatgtccaaattgttgtgcaaccaattttcagaactctttgatcttgcaaaactgagacagcctaactattacacagaaactccctattcccaggtctcccccagcgcctgacagccaccattctactttctttctctatgaattgcattactctggatacctcttccagtttttattacaggcctgcttgatgttgtaaagaaatcaaatgtttggcccagtagccatcctcctctctgcttgctccatcaactgaaatttaactggtagcttcagttctagaagacagagccctgagcgctcctgacttgcacatgcgcttgtatgtacacaaaatgccctgctccctagtttctgcctgcaagaattcctccatatccctgccccagggcttcctgctttactttctcttcacatcccttcctgtagactcgtttgcaaaaaaaaaaaaaaaaaaaaaa

SEQ ID NO: 7923 - DNA, 750 bp, Macaca Fascicularis
  misc_feature (1)...(750): n = A,T,C or G
catagcccagnnngnnngaagcaaggagcctccagtgtcctgggcagcttctgtttcnntctgctgccagggagctgaggcacccatgccagtggcagagggcacagccccagccttaggccaggacctgggagggcaggcaggcaaaggcgagaccagaggggctgtgttctccagaagaatgagggtgttggtcccaggattgggaccagctgccccactggccagccctgggccacttcccgggtctccgttgtgcatgggtggcatgttccaggnnnnnnnnnnnnnnnnnnnnnnnctgtgctgccttgggcccctccctcagaagcacgttggcaggaggccaatcagaacccgagcgcctttggtcctaagaatgggaggtcgccttccttcccaatctccctgccagggcccgcagttgtggccctagccctcccctccccgggatacagaacggggagcctcgcagggtcggggcggaggctgatcctcctcggccctccctgccctgccctgtgtgttggctttgtggccgtccaagtgccaattggcttttcccccaaataagggctggtatttctcctctgtccttggaggtgatttccccctggccccctcccctaggtgaatgatcacctgggtgccagttacaggtgtttccagagaccatagaaatgtgttttcctgagagttcgtgtcattcgtgactttttgtaaagaagttgtgttttcnnnnggtgattt

SEQ ID NO: 7924 - DNA, 363 bp, Macaca Fascicularis
  misc_feature (1)...(363): n = A,T,C or G
gccctctgnnnnnnnnnnnnnnnnnnnnnnnnnnnnggggaagctctgcggggtgaagggaagcctggagaggaatctgccggnnnnnnnnnnnnnnnnnnnnnnnnnnnnnnctgcagtaaaaggactgggnnnnnnnnnnnngcaagctgagccacccggacagnnnnnnnnnnggtgccggacgccttttcttcctagcatcctgtcccaccacctgcaggacacagcagcactagtcatcctgcacaggctccnnnnnnnnnnnnnnnnnnnnnnnnnnnnnnnnnnnnnnnnnnnnnnnnnnnnnnnnnnnnnnnnnnnccaattcagaaatgttgtgatctctagctggttatctga

SEQ ID NO: 7925 - DNA, 4005 bp, Macaca Fascicularis
  misc_feature (1)...(4005): n = A,T,C or G
aacttgattgatcggaatgcagaaaattggtgttattatgaaggcttggaaaaagctctacaaattagcactttggaagagaggcttcaaatttatgaagaaattagtaagcagcaccccaaagcaattacacccagaagattacctttgactcttgtcccaggtgaaagatttagagaactaatggataagttcctgagggttaacttcagtaaaggatgcccacccttgtttactactttgaaatctttatattacaatacagaaaaggtttctataatccaggaacttgttactaattatgaagcctctcttaaaacgtgtgacttttttagcccatatgaggatggggagaaggaacccccgacaacactactttgggttcagtatttcctggcacagcactttgataaacttggacagtattctctggctttggattatattaatgctgcaattgctagtactccaactctaatagaattattctatatgaaggcaaaaatttacaagcatataggtaatctcagagaagctgcaaagtggatggatgaagcacagtctttggacacagctgatagattcatcaattccaaatgtgcaaaatacatgcttcgagcaaatatgataaaagaagcagaggaaatgtgctccaagttcacaagggaagggacatctgccatggaaaatctaaatgaaatgcagtgtatgtggtttcagacagaacgcatttcagcttatcagcgtctggggagatacggggatgccttgaaaaaatgtcatggagtagaaagggtaagttgttagaatttcgacttcagttttctctgtaaggtgataaaaagcaggtagatttctacacgggatcatctgcctcttctaacttctctgggagcttcattgtgaaaaaaattcttgatctttaaccttctttacattcagaagttgtaaacagtggattgctttattgatcctcaagtgattatgcttttgacatgtctatatatttttgtctggaggaaaaagattgttagtaaactattattgctattaacataaattcaaaatttctgttccctaattaggccattatttgatattcatcaccaccctaagaggacacacagctgatggcaacctctttcccctttaaaacatcaggatctggtccgcagtcagcctctctccagtttgtcttcccaggatatttgctctcacattcagtgttctgtataacaatctatggccagtttgcaggcttattttattgcttgcttttaggattatgtgtgtgatgtgccttagtgaggggacttttcttttcctttgtgtgaatttttgttttcctgttctttgtcatctctgaagcactctccttccacatggaccacaggaggaaaagagccgcaaatgcacccctgaggcagtcctcagcagccctcagttgtgggggcaatcggcaccactgttcccatcctgacgcagtatagaaccacaggcatcgtagtcagcatttttttgagataaccgatgaccaattcgacttccatacatactgcatgagaaagatgacccttcgtgcctatgttgaccttttgagattagaagatatactcagaagacatgccttttatttcaaggctgctagatcagcgattgaaatatacttgaaattgtatgataatcccttaaccaatgaaagcaaacaacaagaaataaactcagaaaacctgtcagccaaagaattgaagaaaatgcttagcaagcagagaagagcccagaaaaaggctaagctagaagaagaaagaaagcatgcagaaagagaacgtcaacagaaaaatcaaaagaaaaaaagagatgaagaagaagaagaagccagtggccttaaggaagaacttatacctgaaaaattagaaagggtagaaaatccattagaggaagccgttaagttccttatacctcttaagaaccttgttgctgataacattgacactcatctgttagcatttgaaatatattttagaaaaggcaagtttctgttaatgctgcagtctgtcaaacgagcttttgccattaacagtaataacccgtggttacatgaatgtttaattagattttctaaatctgtgtctaatcatagtaatcttccagacattgtgagccaagttctatctcaagaaatgcagaaaatatttgtcaacaaggatttggaaagttttaatgaggattttctgaaacataatgctacctctcttcagcatctactttcaggtgctaaaatgatgtattttctggacaagtcaaggcaagagaaagcaattgctatagccactagactggatgaaactataaaagataaaaatgtaaagacattaataaaggtttctgaagcactgcttgatggcagctttgggaactgtagttcccaatatgaagaatataggatggcctgtcataacctgcttccttttacatctgccttcttgcctgctgtgaatgaagttgacaatcctaatgtggcactgaaccatacagctaattatgatgtcttggcaaatgaaatttgaaatctcctagaaagtagactcctatagactcaaagctgaattgagatcagggtttcttttccagggtgcattttaatacatgtatgaaatgaaatatttggttaggatttttaaatggcatattctgtaagcttattttattctttacctgacctgccaatttacacaaccatctgttaaaattacctgtttgttcttacacagttttgtggtagctgtcgcttctatatgataatttcttactaagctaagttgtatacaaccccactgtattattttctttagattctgatttcaggatctgtgctttgattcctcatctgtttgttttattatttgcttgctttttaattaaagtgcatcagttttaaagtgttaactatatgttaaaaacaatgtggaggctggctcacacctgtaatcccagcactttgggaggcccagatcggcggatcacctgaggtcagaagatcgagatcagtctnnnnnnnnnnnnnnnnnnnnnnnnnnnnnnnnnnnnnnnnnnnnnnnnnnnnnnnnnnnnnnnnnnnnnnnnnnnnnnnnnnnnnnnnnnnnnnnnnnnnnnnnnnnnnnnnnnnnnnnnnnnnnnnnnnnnnnnnnnnnnnnnnnnnnnnnnnnnnnnnnnnnnnnnnnnnnnnnnnnnnnnnnnnnnnnnnnnnnnnnnnnttcttcttggcagatactgaagtttattttaaaatttaattcgccctttttttcattgtaatatttcgtggtttactatttcctttgtagtattcataaaaattgtattttctggttgaataggggtactctagttttatgtagatgatttcagaatgtgaaggctgttttgcctgtcagtcatggaaattcactggtaaaattgttgcatctctctcccagtcttaaaagcccacaggcaagaattaatgctttcttaactaagttacttcagtgttaacaagtagcttatactgaggtatgcttcaggggagcattatagggcagaaaacaaattaaaatgaaacattcttatagccatgcattgaccattaaatgcatttttatatctcagcagaatgagattgaaactcattagtttaactattaaaacatagtgttgttaaacagtattttggggggggatgggtgaatagctttttgttctatcttgtacagaaaacagtaatggaatcacttatgttcagaaccttgtaaatatgtctgtaatattaatgcttccctttattaagacaaatatacattcaaaaagggagattttatttagacacacggttttctttcaccctaatctatttagattcatactttttgcgacaggaaaaactcactgtaaaataatgccaacgtagataatgctataataaattattttgtacacagttaaaaaaaaaaaaaaaaaaaaaaaaaa

SEQ ID NO: 7926 - DNA, 131 bp, Macaca Fascicularis
agaacactttcattacatgccagagcaaaagtggtatggttttaaactcaacacacccatcattcacatcttaaaggtataacggtagattgaggagggaacaagtcaggttcacccggcagttcagaata

SEQ ID NO: 7927 - DNA, 674 bp, Macaca Fascicularis
  misc_feature (1)...(674): n = A,T,C or G
cagtacggaaataaatnnnnnnnnnnnnnnnaaagtagcaatataggacttctagtggtatgtatcagtgtaaataatatatgagcagcataggctaatcgttttaattaaaagcaaacaagcatacttttttgatttaaaaaatatgccctcaaaatgctgggggataaaatgtaagatattctttagcattaattatttttccatcatatgcaagtcagagcacttttttttaaaatagcaatacaacaggcaagagaatactcaaaaatatttaaaattgtatttataccaagagtatgttttaaatattttataatactcgagcagtttctcgtaaggcaggcttccaaatttgccaaaagttaagtgttcaatattttcaacacatacgctttttannggtttatacatgaactctctgagaattcataagtgttcccaaagatagtgaagtttacaggtctagtgtttcttctccttctttctaaggatgagggaatccacagcagactttctctagaaancacctaatgatgnnnnnnnnnnnnnnnnnataaatgagttggctactaccttgatgtaaaaatttgtaaaggaaatttttcaccatttcgagtgtcaagtgtatttttaactgtactggtttgtacttttatgacttttgtactacc

SEQ ID NO: 7928 - DNA, 675 bp, Macaca Fascicularis
gttctgtcatgctagccaaggcctctgtgaagtgcttagagagtggctgtaagtccactagggctgttgcccctaaggagaatccagattgccagttactgctggggtaaactgtgctgactcacctccttccttagaaaactccaaaccagtcaggtaggaaacttacagatcttcagtcccagaaggcatcacccttagaggctgcctgagagttaggaaaaaggctcccgggtgacagacccaacttttggtcctgtcccctgcctgacagctggtgtgggctctctcaggatcctcccaccccaagacaggcccccaaattggaccctaaatagtgttctaaggtcaaaccacgagaaggatactcttagggagaaagagcatgtgggagcagctgcgtacaccccgatgtgaagtatggatttgaaatcacatttctggccaggcacagtggcttatgcctgttacccggcactttgggaggcagaagcgggtggatcacttgaggtcaggagtttgagatcagcctgaccaatatggtgaaaccccgtctctactaaaaatacaaaaattagctggacatggtagtgtgacctgtagtcccagctacttgggaggctgagaaaggagaattgcttgaacctgggaggcagaggttgcaaggagccaaga

SEQ ID NO: 7929 - DNA, 429 bp, Macaca Fascicularis
tagagggttggatttgacttggtcgtaaggaggcacctttatgcttttaagaacttcaaagattcaagaaagaaagaagtgttttggaacttaaagaaaaagattttaaaacactaagttgtcctaaacaaatcctgttgaatggaattttaaagagatgcattttaatatatcagagaacatatgtgtatttgcgtaaacaatttgtacgtttgtaatgatgaaactccccctttacagggaagcttattccgattaaggttagactgtgtgtgtggttttttttggtttttttttttttggtctgataatgaatttgagaaccacatctttggtatatattgaccacaaatgcttttcataccacaacactcaggacacacgcaagttattcaaatacataattacttatttaccttgactaaacaa

SEQ ID NO: 7930 - DNA, 714 bp, Macaca Fascicularis
  misc_feature (1)...(714): n = A,T,C or G
gagtggattgaagcaacatcagtgaccagtcattgggttctaggggtctgtctgtaaatctgtctggannngacaggccgtgtgtgcattgcagattgactgcctcccttcaattatgcagaaatctctgcactggctggaagagcactgtcaatggtttaagcattctaaagttcacctttgtgggtctgaaacacatcacccctctcccttctacctccaacagaattccctttatgaatgtgatagaatggaagggaaagagtgcaagtcttgctaagtggactgaaggtcattttcacaaagggcattgaaagtatctgctctgggaccccatgaagggacttgcacttttcctggaacctcaagtttttggaatactgtgctggcgtcactccagaaccactggacctgtacaacatgctgattccctgatgcacaggcgatccaggcttcagtcccagctttgatgagagcaccagcctcaagccttgttctgtgcccacaaggaaacgaaagtaaaaattgatagcaaacttactttaactaaaccgtagtctttgcagcccagaatcaggcttgtttcttggttttgattgctgtaaatgaacgatttatgctttttattgttattgtcattcactggttcattcttttcttcaagaaggttttatttacatttgtgtcattgtgaaaatagcacacttgttgaag

SEQ ID NO: 7931 - DNA, 685 bp, Macaca Fascicularis
  misc_feature (1)...(685): n = A,T,C or G
tgaaatgcatggcatgggaaatttgaacgtagctttgtaaaaggactatttgtagagtaatggcattaatcaacacagaacgtcttatttgaatcaacagttacctgtnnnnnnnnnnnnnnnnnnnnnnnnnnnnnnnnnnnnnnnnnnnnnnnnnnnnnnnnnnnnnnnntactttttgtctgatatcagtacatatttggacaaagtcgtctaaacaatagtttgtcaccaaataactacaaaatctcattttaaatgagtaaggagaacatgtgaagtagcaaattttcttcaaaatagttgtgggaagagcttatatgtgaaagcttatgactggttttgagggagaacttactggggaaaatggactctgctaagtatggttttcagatagaattctttccttttttaatgggggaaaaatccacattaatattgaaactgcannnnnnnnnnnnnnnnnnnnnnnnnnnnnnnnnnnnnnnnnnnnnnnnnnnnnnnnnnngagagcagcctgggcaaccaagtgagaagaccccatctctacgaaaannnnnnnnnnnnnnnnnnnnnnnntnnnnnnnnnnnnttggactgaatcccgagaatgtttataagttcaaaagcaaaactatttgtaatttcaacaacaaaaagtgtatttnctatgtaatctgaaata

SEQ ID NO: 7932 - DNA, 688 bp, Macaca Fascicularis
  misc_feature (1)...(688): n = A,T,C or G
gagagatagccccagagggcgtgtacctggtgggcagcagctcaggtaccattgggggttgcagggcccttacgcaggtgtttctctctctctcctctctggggtgcgcgtgtgcgtacgtgtgcgtgcgcgtgcgtgtgcctgtgctgttctctgtgagcacatcagggtgcccctccgagaacacgtgcacgcgtccccacctgagcaagcgtgtgtgtgtgctcctctgcgtcccaggtttggacgtctggaggttggtgtgcctgtcttctgccctccctgagcccacagggtcagtcagtgtatcttctacgtgcctctccctctgccttctctcacagtgcccccggctccagagctcaggggtaggggttctcctgaaggtgcaggggaccctcctcatctcctggaccctccagggcactctggtccctattccccagctcccaggcagctgagccgggtctcttaggggaggtgaccagcagcttcggtgcagggagctcttggtggggcaaagggctggacccctgccaggtccgtggacatggttatatgcccgggaggggcgggtgcagggccccagggatggcccccaaccccacctctgtttattctgtaaactacaacctnnnnnnnnnnnnnnnnnnnnnnnnnnnnnnnnnattaatttttatgaaataaa

SEQ ID NO: 7933 - DNA, 3958 bp, Macaca Fascicularis
  misc_feature (1)...(3958): n = A,T,C or G
gggggaagccgagcctctgctagccgtgagctgggaagaagcagctacctccgaggcagggcgcgcaggcgggtggcgatgagagcgggcgcagccgcagccccgcgagggggagcccaccgctaaccctgcaccccacccacccctgcacaaaagagctggcgggcgctggccacgtcgccctgggtgaccttcctcggatgcagaagccgtccctgcgagcatcctcttcctcccaggctctgaaggcctggggagcgtgagcgatgcccagctgcacccgggcagggctcgcctttgtttgccagtaaggaggagaggctgtctcagctgcagaggggtcacccctgcttcaagccggtgcctctttccggctcctatggggaccacagaagccacgctccggatggaaaacgtggatgtgaaggaggaatggcaggacgaagaccttcccaggccgctcccagaagagacgggggtggaattgcttggcagcccggtagaagacacatcctctcctcccaacacgctaaacttcaacggagcgcatcgtaagaggaagacgctggtggccccagacatcaacatttctctggatcagagtgaggggtccctgctgtccgatgacttcttggatacccctgatgacctggatattaacgtggatgacatcgagacccccgatgagactgactcgctggagttcctggggaatggcaacgaactggagtggggagatgacacccccgtggccaccgccaagaacatgcccggggacagcgcagatctatttggggacggcacgacggaggacggcggtgccgccaacgggcgcctgtggcggacggtgatcatcggggagcaagaacaccgtatagacctgcacatgatccggccttacatgaaagtggtcacccacggagggtactatggcgaaggcctcaacgccatcatcgtcttcgcagcctgcttccttccagacagcagcctccccgactaccactacatcatggagaacctcttcctgtacgtcatcagcagcttagagctcctggtggctgaggactacatgatcgtgtacctgaacggcgccacgccccggcgaaggatgccggggatcggctggctgaagaagtgctaccagatgatcgatcggagattgcggaaaaacctgaagtccttgatcatcgtccacccctcgtggttcattcggactgtgctggccatctctcgccctttcatcagcgtcaagttcatcaacaagatccagtacgtgcacagcttggaagacctggagcaactcatccccatggaacacgtccagatcccagactgcgtcctgcaatacgaagaggaaagactgaaggccaggagggagagcgcgaggccccagccggagtttgtgatgcccagatctgaagagaagccagaggtggcaccagtggaaaacaggtctgctccggtcacagaagatcaggaaacaagcatgtcctgaggcgacgtgagcataacgaaggacatgaaagaagattccagatgccaggaaacctctgtcagacgcccactggccccagatctcatcctgcctcatcctgagtccctgtcttccaagggtgccagcccctccgttcatctctgaaacccagcatccctttcagctgcttgaaaacattgtatttttttttaacgatgcagtattcgtgcgttccagaaaagggcccagctctgagcccctcacccttccacactcacaaactctcagccgaggaaggcaagaagcacagggggtggcccgtgtggcgtcggtggcctccgcttctgctcgcagccgccgtggtcagagctggatacaagattcaagacccttctcttgcttgtcacccgctctgggttggagccacagacgcccaccaccaccccggctgggtctgcgtcctttcctgtgcctttccccccagaacgcggccctggacctagaagctcaaccccccaggagggccacgtcctgaggtacctcctggcctctgaccttacgtccaaaattcacacccgtggtttttcatttgacccgcccccttctcgctcataatgacacccagctcctttgagaggatcagagcccattgcacaagaagagctgctgccaaccatccttgtcctctgattgcaaaacgacaccccggtaatctagaacattctcaagcccctttaactcagatgccaagccacagggcaaacccagtcaatacctcccaccaaggaatgagatatgtggacctcactgctcccccaacccggcatcaggctgggacacgccaacgctgttctgggttggaacagcagaggctcagaagctggctctgaaatagacctagcaaaaggaagatacagggtatccagcgggttcttgttcgggaggcaaatttcccttggaaaaagaagacagacttttctaatgtggtccaaatgccggtcactggtcagatggactctagaagcagtgagctccctgtctctggaagcatttaagaaaaggctaggccgggcacgatgactcacgcctgtaatcctggcactttgggaggccgaggtgggcggatcccctgaagtcaagagttcgagaccagcctggccaacatggtgaaacctcatctctactaaaaatacaaaaattagccaggcatggtggcaggtgtctgtaatctcagctacttgggaggctaaggcacgagaatcacttaaacctgagaggcagaggttgcagtgagccaagatcgtgccactgcannnnnnnnnnnnnnnnnnnnnnnnnnnnnnnnncaaaaaaaaaaaaaaaaaaactagtcagggcacagtggctcatgcctgtaatcccagcactctgggaggctgaggtggatggatcacctgaggtcaggagttcgagaccagtctggtcnnnnnnnnnnnnnnnnnnnnnnnnnnnnnnnnnnnnnnnnnnnnnnnnnnnnnnnnnnnnnnnnnnnnnnnnnnnnnnnnnnnnnnnnnnnnnnnnnnnnnnnnnnnnnnnnnnnnnnnnnnnnnnnnnnnnnnnnnnnnnnnnnnnnnnnnnnnnnnnnnnnnnnnaagaagagcaaaactctgtctcaaaataaaaagcaaagaatggacagtgtttgcagagagttgctcatgaagttccccctaatcgtaaatgtcttcatgtctatcaacctgagcagacagcgagtagagcgggcacattctccaggcccttcttcctggctctgtggttggcctctcagcaagtgctgtccaggctgggccaaccagacccacaattgactgagcctcagtgaaagcgtccagtgcatctctacctgagacagcaaggaagtgcattctgggctattccaacaacgatggcaggggactggtggtgcttagtgctgaggggcagcggtacagaaaaatgtgccctgtgggacggggtcctgcgcaagccccgcccccaaaacccagcagcttctgccatgaggaaggtggggtttctgagcgggcttaggcctgtaggttcccatggagcccccggctgtgatgggacacttctgggtctcagcattgccctggggaggctgggacatttagggacgtggtagggttttaacatttgtttcccaaatgtcaaatctcggccgggtgcaggggctcacacctgtcatccgagcactttgggaggccgaggtgggtggatcatttgaggtcaggagtttgnnnnnnnnnnnnnnnnnnnnnnnnnnnnnnnnnnnnnnnnnnnnnnnnnnnnnnnnnnnnnnnnnnnnnnnnnnnnnnnnnnnnnnnnnnnnnnnnnnnnnnnnnnnnnnnnnnnnnnnnnnnnnnnnnnnnnnnnnnnnnnnnnnnnnnnnnnnnnnnnnnnnnnnnnnnnnnnnnnnnnnnnnaacaagattccatctcaaaa

SEQ ID NO: 7934 - DNA, 682 bp, Macaca Fascicularis
  misc_feature (1)...(682): n = A,T,C or G
tgggcccccacgccgcacaccgcagcgctgcgccgggagctcggagtnnggcggcttccctnncnnnggctggcctggccttcgcctgggcattcactgcctcatcctactagtgtgatagtttttaaaaattgagactcgcataaaagcaatgcatgctccctactccacccccagttgcgtagatcctccaaacggcatatcgccacattttacaggctcctccaagcgcgggttaagaacctccgtgttagtatagggagagcgcgccaaagctaccttaccttactgcttaccagcgtcacaannnnnnnnnnnnnnnngtagaggactttaattgnnnnnnnngtgtactatttctgtggtatttagttttgaggggttccccccacttttgacatataggttgcatgactcaagaaatttaaatattttgtcttaatttttccgtaagttcattggcacttgttagactatgctctttggcttatatatggttatcataatagtactnnnnnnnnnnnnnnngtttatctatgtttactaataaaaatgagatcttaaaaaaatgtattttcctaggaaatggataatggttgtccannnnttgtgagtatacttaatgccagtgaattatacacttaggaatgggtaaaatggtaacttttatgttgtgtatgtt

SEQ ID NO: 7935 - DNA, 659 bp, Macaca Fascicularis
  misc_feature (1)...(659): n = A,T,C or G
attttgcagacaagcannntgaaactaccagaagttgtgtatctggccccctgggtgatgaagatgagaacaggcatagcatgtcttgtaccgaacattcttctatgtgcttcacatatataaatgcatgtagtcctcacaataaccccatgacataggttcttttatcattcccctttacaggtgcaaaaattaaggaacaaggcacttcagtaacttacccaaggtcatgcctccattaagtgggaaaggcaggttagaagccaaagggtctgtctctggggtgtctgttctttgtcaccatgtacttcatggcagaaatttaattctatgggcaacaattgctattagaatattcattatataatatttgatacacaccaaataatgtgatgaatatgtatattttgaaggaaacataaaaagaacattatcactacttttgaagctacctgagtattttccaattgccttgaatttttttatttaccattttcttgctttctaaatggttttattacatacagatttatataaaattactatatcatttagttttgtatatttataaatgttataagcctgttaaaatgttgtatatagtcttctgaaacttgctttttcccaagatttatccataccctttgcatatatacaaa

SEQ ID NO: 7936 - DNA, 476 bp, Macaca Fascicularis
ttgggggaaatttagtctaggttttatttcccccatctaagacatgtgtgcacacatgcacatgtgtgtgcgagccattgtaattctatattttttcagtgaagagcatgcacttcatctttcccttcaagtatagcatgaactcgatgaagttaagccttataaagataatgtgttcagttagcaggcgatttggtaagtatgataggaaatgccatgaactccaagccctcagagaagctgtggttaactggatgggtggcatctgcttttgtggagtttcttcccatgagggcatcagtcatgagaacctagaacccaagaggctgtccaagccttgtcccaggcaaggacgtttggattcctctcaggacctggtcctgcgatccagaaccagagcgtgcagttgccggtgagggaaaggcaggattccgtcttcatccttcacggagaggtgtgtcttggaggtacacctt

SEQ ID NO: 7937 - DNA, 559 bp, Macaca Fascicularis
  misc_feature (1)...(559): n = A,T,C or G
gaactntannngcaaagtacagaaagatccatcagttcnncattgatgtttcaagaaaaattccaattcaagcatgtggaagcatgagtgagggagatagtttgtccgcatgggatactcgctccccaggacccctccactccctncggaccctggccctgggccaggggcagagcaggccctgccccagggcaacgttggacccccttttactttgtaaagtttgtatttattcccctttaggtttgcagagggggtaggggcagagtcaggggctggccagagggtctgctccctggacagagaggaaggaggtggagcagctggggctgggggcacatgcccgggcattctgtggggaggtcgtcctcggggtggggtggggctgagtggctgccctgcccccctagtttgcatggctcctcccccactcaagcaatagggccctgccataggaagacccccagagagagggtcagcaggggggcctcgcctgcgcctcccctcctgtagccccatggtggggctaggctggggctcacccccctccccagctatt

SEQ ID NO: 7938 - DNA, 3257 bp, Macaca Fascicularis
cagtgctttcagatcaggaaacagaattaatgggaaaaaagaaaactgggagtgcttctccaaggccgaacaagccacctctggcttctcctggtctaggagtggctaagtcagtgaccttgggctcctggagtttttctttcgagtactgatttgtctttgtgtgctcctcccaccattctttcagtttgtatacagttgggagtgagtcatagctgatgtccatagcaagggccttctggcgcaggtgacctccacaggttgcaaggtgggcctcaggttggctgtgcgatcttcgctatcttgtcattgtcctaaagattccttcaccctgagtctggcccccgtcctggtggcacagtctgtagcagttctaggatccacgagacagtgcacctttgtcccgaactttccagctaaagacacactggaaagagaatggctcatctctgaactagtgcctgcggcctagggaatccacccccattgatcgatcagccctggactgtctgaattagtccctaaggtggtggtggttggtcaggactgtttaggatctgcctcgttgggcccctacccgtgtgccaacagccacgtccccatgtgactgggttgagccctgccgtttcctgggacttggactgccggaggtctctgccgcatcttttgggagcccccatgctgggtgaaggtgtgtggctcctggtggtgataaaacatgctttctgctcctcagggttgccttcgtgattcctccggtggtggcagcacccccgtccctatgggtgccgcggccgccacccctgtacagccacagaatgaggatcttcagggagggcctgagagagcacgctgcaccttacttccagcagctgcggcagacgacggctccgcgcctgctgcagttccctgagctgaggctggtgcagttcgattcaggaaagttggaagctttagctatcttgcttcagaagttgaaatctgaaggacgtcgggtgctgattttatcacagatgattcttatgttggacattttagagatgttcttgaacttccattacctcacctatgtaagaatcgatgaaaatgccagcagtgagcaacggcaggaactgatgaggagtttcaacagagacaggcggattttttgtgccattctttccactcacagccgtaccacaggtataaaccttgtagaggcagacaccgtcgtgttttatgacaatgacttgaatccagtgatggatgccaaagctcaggagtggtgtgataggatcgggagatgcaaagacatccacatatacaggcttgtgagtggcaattccatcgaagagaaattgttgaaaaatggaactaaagatttgatccgagaagtggctgctcagggaaatgactactccatggcattcttaactcagcgaaccatccaggagctgttcgaggtttattctcccatggatgatgctggcttcccggtcaaagcggaggagtttgtggtgctttctcaggaaccttctgtcacggaaaccattgcacccaaaattgcaagacctttcatagaggccctcaagagtattgagtatctggaggaggatgcccagaagtccgcagaggagggggtgccgggaccacacactgatgcgctgtcctcagactctgagaacatgccatgtgatgaagaaccatcccaattagaggaactagctgacttcatggagcagcttacaccaattgaaaaatacgctttaaattacctggaattattccatgcttccactgagcaagaaaaagcgagagacagtgaggacgcagtgatgactgcagtgagggcatgggagttctggaacctgaagaccctgcaggagagggaggcccggctgcggctggagcaggaggaggcggagctcctgacctacacccgagaggatgcctacagcatggagtatgtctatgaagatgtcgatgggcaggcagaagtcatgccgctctggaccccgcccaccccgccacaggacgacagtgacatctatcttgactcggtcatgtgtctcatgtatgaagccactcccatcccagaggctaagctgccccccgtgtatgtgaggaaggagcggaagcgacacaaaacagacccctcagctgcgggcaggaaaaagaagcagcgccacggggagtccgtcgtccctcctcggtccctgttcgaccgagcgacaccaggcctcctgaaaatccgcagagagggcaaggagcagaaaaagaatattctgctgaagcagcaggtgccgttcgccaagcccctgccaacttttgccaaacccacagccgagcctggtcaagacaacccagagtggctcatcagtgaggactgggcgctgctgcaggctgtaaagcagttactggagctgcctttgaacctcacaatcgtgtcacctgctcacacacctaattgggatcttgtcagtgacgtcgttaactcctgtagccgaatctaccgctcttccaaacagtgccggaatcgctacgagaacgtcatcattccacgagaggaggggaagagtaaaaacaaccgtcctctccgtacgagccagatctatgcccaggatgagaatgccacacacacccaactgtacacgagccactttgacttaatgaaaatgactgcgggtaagaggagccccccaatcaaacctctgcttggcatgaatccctttcagaagaaccccaagcacgcgtctgtgttggcagaaaggtatttctctagtcatgacacatttgttactgtttggaaggatttcattccagtgtcatctaagttcagcgagttcagcaaatcgttgtgcacttagtgtgttcaggcatcagctggacatggcagtgcgcagaacctgcgggagagatggtgcttctcctgccgtgggctggggtgtgcatgggacggcccctgccctgtctctgtgttacagggattgtccttgctggccctcggtggggaaagacgctgacagacatgatgagtgtgccagggccatgtggccaaccacaaggggctttcttccttgcaccccacctctcaggcactgattttgttagccatatcttaagaacacatcatgggccgggcgcagtggctcaagcctgtaatcccagcactttgggaggccgagacgggcggatcacaaggtcaggagatcgagaccagcctggctaatacggtgaaaccccgtctctactaaaaaaatacaaaaaaaaaaaaaaaa

SEQ ID NO: 7939 - DNA, 644 bp, Macaca Fascicularis
  misc_feature (1)...(644): n = A,T,C or G
cagccccgatgcccggcccccgcacgnnnggatgtccacgccctttacaccacatccactggtnncacgtgccatgcccacttgccacccctgtnnnnnnnnnnnnnnnnnnnnnnnnnncctttcccgaagcccccagggggtgctgggctgggtttctttgaggagatctgggattcttgcctgccagagggtgccgagagtcgtgtgtggtgtccacttgggccacagggcctggagggcttggtgtcccaccacctggagcctttcgtggtggtggcccagccccctaccagatattatgtagagatacacctgcccccgaaatcaaagatgctgctgcggctagaggcggccctggcagacggagagcctgtggccctgcggactgatgagtgggctgtgctgcccctggcgggggactacctctgtgggctggcgggtgctctctgagccccgggagaccacgtgggggcaggactgtggcccttgtgggggccaaggcacactcttgtagatctttccccaaaaccctgcattccccagagccctcgctggcttgttttcttttgggccccggttgggagcaggctcatgggggtgagggtctgtcttagtctgtttttgnnnnnnnnnnnnnnnac

SEQ ID NO: 7940 - DNA, 688 bp, Macaca Fascicularis
  misc_feature (1)...(688): n = A,T,C or G
acagcaccacctttgggggagctccttcccttatggggttttagtgagggctgccagtcntagggccctgccctccaacattccccaataagcataggaatgcttgtgtgccagtcactgtatttgtaaacggaagcggtggacctgctcagcttccaatagaaagcccgtgtgtgcagggccagaggacacagcccatctaaggcgctaagcctccataaagagggagtggaatctggacaggattccagccccagggtacaccctttctgggacccaaacacacccttccccttccttcaattctgagactcagtaaatgtctctacttgcagaacaagtttgagttgggtttctgtcacttgcagccaaaagagccagtcacagtcggcatcgggtcaaccatctgtgaaatggcgacctgacaccctgtcccttccctgtgaaggccacaacatcccaacaccattagtcactgacgaagtccaggagaaatttctaccaactgtagcaaaagagacgcaagggagaaaacattttgttactgacagtgcactcttccctctgaaacagggaggcaggatctgacagaaaaaaaggacaagtggcggccgggcgcggtggctcacgcctgtggtcccggcacttgggaggccaaggcgggcagatcacgaggtcaggagatcga

SEQ ID NO: 7941 - DNA, 747 bp, Macaca Fascicularis
tagccctgtgccatcggttcaaggagacttttcgtgaaacttgttggttttgaggactgtaaaaagtgatttcatactctgaatataaaactggataatagggtaatgttttaaaatttattatgctattattcagaatgccaaagtattattttttttctcaaaatcagtctggacatttactactttttagactttttgactttcaactttctgtacaaaaattggctgggttttgagcttttggtaagaaataaaagccgattaagcactggccgccccgcggctggtacccaatgcccgagtcactgtggcagcattcgcactggcgtggggagtcctttcaactcaaggaggctgggtttctgggcacccttgaggttttctggatgtctttttatctttctcgtgtgaactgcactacaaaggagaccagcccatttcccaagccagccagacacctgggtcttgagccataaactggcgtagttaagctttgcagcttccaatgtattttatttattcttttgttgggtttttgttggttcttgtaaaattgtacagaaactttttaaaagaaattggattcaaaactggatgtgtattcgtaacctcatgatttttatttgtgtattgtttcttttattatttcagttaaatttttacattattttgcatgtatatttctttgtacagagaccttacatgtttacacagtatgatgtgatgtaaatattttattttgcc

SEQ ID NO: 7942 - DNA, 2151 bp, Macaca Fascicularis
actcggagtgatgctaaacgtgtttttcagggcaaataattattcacatcttgttataagcacatgacttctgatgtttattaaaaccacaaaactaagccctgagaagcaaaatacaaaggactgaagagaaaatttgagaataaaatgagaaaccagatctcttcagacgtgaaccaaaggagcccgcgtttctcagcagccaggagaggcacgggaggcggcttgtcgacatttcatccatttggcgctggaatggccagatctactttttactttttcttgggttttgtaatacttggctcatgataaagggacttttcagcgttcgtttataccactgggctgggggaacactgctcacatgatccacataattacttttccatctttcagtcctttaaccctctctcgcctggtatggtggggtgcactggcctgaggaagctttgcgtgctggtgcacacagccagcgcagacagctgtccacacgcacagatgcacagaacgagtgctttttgtgagctggggtgtgaggccattcacttctcttttaaaagagattgatttatctaactttgcagaagtcaaagaaaaatattaaaaaaacccatactagttgaaagaaggaaggaagggagagagaacgggagggagggaaatgaatgggaggcttgtgtatcctgaaatggtattttttacttgcagctctgatcaaaggcctgtcgttccttcatcgaggtccaggtttgccttctctgtgtctgtgctggaccttgacctcaagccctacgagagcattccgcatcagtataaactggacggcaagatcgtcaactattattcaaagactgtatgtgccaaagacaatgccgtgatgtcgactcggttcaaggaaagcgaagattgcacgttagttctccacaaggtctaaccctttccctgcagtgtctttgaaacttgaacacagaatgtgaaggttgaatgatagagctattttctgttgtgttgggtgagctttggttgtgaatgtttttgcttttaacccctgttgaggtgggattgcctcttggagacatggaattgaagagcactgggaacatcttcctggacaaggaatgtaggacatgctgtgtcccaggaagctgctcacactcttaatatggaagtgtccgttaagccctgggaagaccttctggatagatcttccttcccaaccagggctcatgtctgattctctaatgctaaaagccttattctaagacccaaggtttggatctgctaccaccagactcctaacatagaaaacttgaattgtcacatacattttacagtttgaacttttaagaaaacatggatactactggaactttccccagctgagttacatggtcacttttcagtgcaagccacatatcaacacaggtttttaggtggttccctgctgcagagcgtgacctcgtggtcgtgcagacgccggttctgagcagtgtagactcagggtccctgtggaggtgctgaagcccgtggttccacacggggcagcagggagcgcaagactcaggtcaggatggacaccactcatgcgagcattgacctttttttttttttgctttacaatttaatctttcacatgagggggatatgagttgttctttcccactaaaaattgctgctgtagaagttggaggtggagctgtgactggctgggctgctggggccgggctgggatgtgtgccccaacagctcagtgctttcctgacactccagtgcctgggctggttgaggaacgagttctctcttcctcccggaccgagttcctccctcgggtttgccttgagacgcattgagtttttgggccctgtggcctctccctgtcaggctgccacaggccctgcttccggaaggtgaacagctcctggctgctgccgagagggttctcgttggggtcaccaaagtgtgcccggctgctatgaaaaacgttgggaatcttggtttcagttttttattctatgctaggttgtacagacttatttatatcatcgttttgagggactaatggaggcttattgtaacatataatattagcgaaaccatggaattatatgaaaattatacatgagaaataaggaaactaaaaaaaaaaaaaaa

SEQ ID NO: 7943 - DNA, 713 bp, Macaca Fascicularis
gccctaccaggaacagacttgactagcacctcgatcatggacctccagcctccagacttgcaagaaatacatttcccctgttgaaaccacccagtctgtggtgttttgttatggcagcctaggcagactaatacacaaaacctgctctaaatagataaaataagaaattactacagacggctctttagaaattgtgtttaaaaacaaaacaatccatatttacccaagatttacagaatgtacgtctgtacacgggagggatttctggactagtggatgatgaaaaatgtccatataaaggcacctccagcttcgagttgccaacacaggaggaagaatgctctctgttgttcagatgctgatgtgtgtcctgtgcttcctggacggccagtgggatcataagctggtagaagcaagatcttcatccactgacttcatatttcttccacatcctgagctgtgttgtctgactttaaaaataaattaaagcaaatggaaatgtttccattgagattttggcaaaaccccacgtggcatttgtctctgcgggctacacttggaaggcatgctcctggaggcccagcggttttctctggcctctccgtgtcctcccatttgcgtgcctgccccaaggactcgcttattcccggatgtgaagcggaggcacgaaggggctgactgagaggctgaaatgtgcttctcttcacacttac

SEQ ID NO: 7944 - DNA, 662 bp, Macaca Fascicularis
tatgagcaactgggataatgttggataacatgataatactgagttccttcaaatacataattcttaaattgtttcaaaatggcattaattctctgttcctgttgtaatctaattccaaaacaccctccaggtcatattcataattgcatgaaccttttctctctgtttctccctgtctcttggcttgccctgatgtatactcagactcctgtacaatcaatcagactcctgtacaatcagactcctgtacaatcagactcctgtacaatcagactcctgctggcaaggatctgtcttcttttcttgtcttaattgtctttcgggccttgtatgtggtaaaatcgccaaatcacagtcgagactttatttttgttcctagtttgatgcccttatgtcccggaggggttcacaaactgctttgtcaggactgctgcagttagaaggctcactgctcctcctaagccctctgcacagaggtagcacctgcagcccaggagcaggagcccgaggagctgccctctgacacaggtgcagctgagatggctacagctcgggagctgggaaggtgatggggcacagggaaagcacaggtgtcctgcagcgctgcaaagtgacccactgcctggagaaagagaagaaaatatacttttttaaagctgagt

SEQ ID NO: 7945 - DNA, 1769 bp, Macaca Fascicularis
agtaactattttcttaactttcccaaggataatacataactaatatttttttcagataactaaaaagaagttagtttgtaatatacaatggatgccttaacctgagcattacaaaaacccatggttgagaaagaaattccaaactataaacagagttttaggctggggaagaagaataaaattaaagctgaagataaagaagactttcttaaaacttagagatgcctagtagtgaaaaataccacctcaaaaggtaatgaattagctgccagaaagttcagatagaggctgaatctcgtgaagggttttgtcaaaggaattctcatagtgtgaaatatggctagatggcttcttcatttttccccatttagtatataatcctatgctttaaaaaataaactcggttaaagttggaaatggggaatcggcagatgagaagagaaaaattaggtatgacacatcgggtgacaatatcagcaaataagggcacctgggagtggaagagggtgccatcaattatgctgaagtgacaggcagaccagttggctcataattatcacctacaaaatgattcggcactaaatatgccttgaaagcatattttttagcttatgagggaaaagaggatgagatttgtcaaatgaaagaacacaagtcacaaaagtacacaaaagtgctcaagaacaagggaggaccaagtgggagtgtgacttcatttctgtttgttctggaatggggtcatcaagaatagggctttggttgaataatagtgtatgtacagtaaaaaagaaaatggtgtggtttgtgttttgtttggcaagaggagaaccttgttcacataaatgctccattattttaaatctgagtcaatggatatctaaattcttgttaacatgtgcagtagcattcaagttacattgtgaccctcgcgtcacaacaaagactgtattgtagaagcacaaaccaacataaacccctttttaattaaattatctaaagcagagccaactaagtttcccaagagcagaccttattattaaacatccatatattaatgcacaaaatgaatttttatataatatcaatgattaaacatagcatgttgtcattctaaaatagatgagttctaagaatagtcccaaacaattacacttctgtaagttttttaaaagccattgtaactttcaatttgtttttactgcccctacttcttacatcatactgtaactcgctagcatatgttgaaatggggtcctaataagatattcacttcctctattcatcagcactaaaactcctaaaaagcagttttaagaactctgaaaaagaagagttgtgttatttttgtttcgttttgttttaatatccatttggaagattgaaagaagagaccaatgagattgcttccctcaatagccagtctggtgataaaggtatctttaagagggctgacttagaaggtagaaaagaaaaagaaaggagagcaaaaagtccaataggaaagagtaaggttcaactgtctttccagcaaaattaattgtatgtctttcattcccttggtaagtttatccagatcccactaaggtgcagcttttgttttcttaatttctatgaagagtgtaccaatttttctagccaacaaaatgtatgtttgaatacctatgactctataccacctgtgtcctttcctcattgcctatttccattcagttgcaagtcctgcccaattaaaattcacaatgtaaaaaaaaaaaaaaaaaaaaaaaaaa

SEQ ID NO: 7946 - DNA, 114 bp, Macaca Fascicularis
  misc_feature (1)...(114): n = A,T,C or G
agaaagtcaagcattttccacgtccgaaggttacatgatgactcaaaggagacttcatgaaacttgtacnnnnnnnnnnnnnnnnncacctaggagaagtgtgaaatttctatt

SEQ ID NO: 7947 - DNA, 2115 bp, Macaca Fascicularis
gcacaggaggccgcggcgcgccgtagctgcgagctgggaaagccgaggatgggcgggggtccgggcggtgggagccaagtcggatcagggagtggcttgtaactcggcggcccattggacacgaagaagagagcggggtggggctgggagggttgggggtccggagaaggggcgcggacccaagaccacctggagccccaaatccggcaagaccaacttctgggaccgactctctgtccactccgatcacctccacgcctcggcaccgctccctcgcagggtcctagcaagtgacctcactcttgtgggcacatgctcccgggtctctgctccccacactgactccagcacctaagtgaccctccctcatctcgtcccgcagctcacacccctttgtcttgcctctccctgcaacccaaaccgggtcacacattggcggcagatggtcaccatgggccattgctactacaacgagaccattggcttcttctataacaacagtggcaaggagctcagctctcactggcggcccaaggatgtggtcgtggtggcactggggctgaccgtcagcgtactggtgctgctcaccaatctcctggtcatagcagccatcgcctccaaccgccgcttccaccagcccatctactacctgctaggcaacctggccgcagctgacctcttcgcgggcgtggcctacctcttcctcatgttccacactggtccccgcacagcccgactttcacttgagggctggttcctgcggcagggcttgctggacacaagcctcactgcgtcggtggccacactgctggccatcgctgtggagcggcgccgcagtgtgatggcggtgcagctgcacagccgcctgccccgtggccgcgtggtcatgctcattgtgggcgtgtgggtggctgccctgggcctggggctgctgcccgcccactcctggcactgcctctgtgccctggaccgctgctcgcgcatggcacccctgctcagccgctcctatttggccgtctgggctctgtcgagcctgcttgtctttcttctcatggtggctgtctacacccgcattttcttctacgtgcggcggcgagtgcagcgcatggcagagcacgtcagttgccacccccgctaccgagagaccacgctcagcctggtcaagactgtcgtcatcatcctgggggctttcgtggtctgctggacaccaggccaggtggtactgctcctagatggtttgggctgcaagtcctgcaatgtcctggctgtagaaaagtacttcctactattggccgaggccaactcactggtcaatgctgccgtgtactcttgccgagatgctgagatgcgccgcactttccgccgcctcctctgctgtgcgtgcctccgccggtccacccgcgagtctgcccactatacatcctctgcccagggaggtgccagcactcgcatcatgcttcccgagaacggccacccactgatggactccaccctttagctaccttgaacttcagcggtatgcagcaagcaacaaatccacagcccctgatgacttgtgggtgctcctggctcaacccaaccagcgggactgactgactgtcaggccagggtctggcacggcacagcaccactgccagccctccccaggcacaccactctgcccagggaatgggggcttggggtcatctcccactgcctggaggagtcagatggggcacaggaatctggctcttcagccatctcaggtttagggggtttgtaacagacatttttctgttttcactgtgtatccttggtaagccctgtggactgttcctgctgtgtgatgctgagggttttaaggtggggagagatgagggctctcttgggccatgctacccagtgtgactgggtaatgaggacagacttatggacgtcccatccacctgaggctgattctttagcagcagagactaagggatgcagagtgtgagctggcaaaggtttgtggctccttgcagcctccaggggctggcctgtctctgttagaactgaagcagtccactgggaggggatgatacaaggagtaaacctttcttttcactcaaaaaaaaaaaaaaaaaaaaaaaaaaaaaa

SEQ ID NO: 7948 - DNA, 750 bp, Macaca Fascicularis
  misc_feature (1)...(750): n = A,T,C or G
caggataaagcnnnnnnnnnnnnnnntactcttnnnaagtgnnntagtctagtattggatcagtgaaaaacattaataaaacaagctttgtctgagaacctctagtatacatttataaatctgcttatttttcaacttggatcattaggcttacatactacttgtttcaaatgtgtcaaatacaaaaatggtaactaggttgacagatattttgtatttttcttttaagtccnnnnnnnnnnnnnnnnngacaatgcttatggagagccagttagannnnnnnnnnnnnnnnnaatctgccttgccattttacaagcattagattcctttcctgtgtgaagaaagcctctgtgannnnnnnnnnnnnnntaactttatgaagtgctacagaaagcacaaaggattgattcacgttcaccaatacctgctgagagtactgtcccaggaagatccactggatgnnnnnnnnnnnnnnnnnnnnnnnngtaaaatggttttcaaatcatttttgagattggttgcataacagtaaggtacctgaaagaaggcttctgggagttagtgaactaggtagattgttttgttcacataaagccaccatcaacttaaannnnnnnnnntgttataaatgaggtcactatggacttgccctaaagatctttactcctgtacgtctgtcttccataggacaaatgataagtactacatacctcatctcttgggttattattgtagtcttgcattcatgat

SEQ ID NO: 7949 - DNA, 730 bp, Macaca Fascicularis
gaaaggggatggagaaaaagaaactatgactaaagatgagaggtatgaacgagttgtcaagttcctatgggcttaagctaggacaatcaggccctaaactccaaatttggataaaatatctctttgcattcctcttggccacgtgcatagtctgacacatatgtatgtacaattagacttgcaggctgcaggagtgccctgcattgttttcttttaattagaaataaaaagtattagtctaaatgtggttctggtgctggtgccctgtttatacataacaatataggacacccccaaataggttttgcttctggtgaatcttggtcattgggttagtatatgactgtctataatgttttccatttgtattattatattggggaaaacattttttatcattttctattaagaaaatggaaaacttaaatatggtgttgaaaatggaaatacatgtgatatttgcattattaaacccttttgcagatctaaagtctcagggttccactattagtggttaaagtattgaataatgtctgggtctatttccatctgtaaaataagaatatttgtctcacttgtctgtcatgaatagcaaatgagaaaatgtatataaaagcactttgtaaattgtaaaagtagtacagatgtgagcttctatttgtttagaagcataaatgtgaattatgtacagtttgaattatgcataaattttttgtctaattttaaatat

SEQ ID NO: 7950 - DNA, 694 bp, Macaca Fascicularis
  misc_feature (1)...(694): n = A,T,C or G
caggcgatgtgcatccgacctngnnacgaagtggatgtgcttcttggaaagctgttgcagcctgtatctgtgggtgcagagggcacctgcccggtagactctcagctttctcacccccaggagcctctgcgaggcccctttgtccttggctgagcgggacctttctttgagaaatctgtctgtctgtctgtcagcatcgctgttttcagacctcaggctgcagaggaggggagaagccacacaataatctggacccagtaaagtggagagaagggcgtctctacacagcccggccagggaggagggccccagaacagggatccaaaagcttgacgtcactgaacagggctgggtcctagcagaacaggaaggtttggccagaggtgacctcagcattccctccaggggcacccaggcctctcaaacctggggggaagaaggcacatgctcaggcccaccttccccttcccatcagagcccatgcgtcctgggcaccaccacttccactctgcattccgaggctccggagggctcttcctgctgtgaatggaaaggagaagaaaccctgtgggcaatggcagcctctgagtctggcattcttgccgatggctggccagcgaggagaatctcccgagccctgacacacgcaggccttttgtggctgcggaggaaatgggatggctctgaacaaaga

SEQ ID NO: 7951 - DNA, 234 bp, Macaca Fascicularis
  misc_feature (1)...(234): n = A,T,C or G
ctgcccatagataatataaaagagtgtgagacctggctctcgggaaaaaatatgatagatatgttttctcaaaacacattttgtgttgggcacccctctctaaaacacgatacccgccacagggatatagggggggtttttgcactaaaggaccccaacactgatatctggatagcaaaaggcatattgtcttggggcannnnnnnnnnnncggggtataggttttacaccaaa

SEQ ID NO: 7952 - DNA, 739 bp, Macaca Fascicularis
  misc_feature (1)...(739): n = A,T,C or G
atggnnnnnnnnnnnnnnnnnnnnnnnnnnnnnnngaagaatacaagcagaaaattaaagagtacatccagaaatatgccacggaggaggcactgaaagaacaggaagagggcaccggggacagctcatcggagagctctatgtctgacttttccgaagatgaggcccaggatatggnnnnnnnnnnnnnnnnnnnnnnnnnnnnnngaaagactattatttcctaaccatgagaagcagactataatattcatatttaaacaaagcaattttttttattactnnnnnnnnnnnnnnnnaataatagcattgatatatatatattatatatcaccctttagatcttgatttcttggtcatttctcnnnnnnnnnnnnnnnnnnnnnnnnnnnnntccannnnnnnnnnnnnnnnnnnnnnnnnnnnngcattcatgagtccatgtggccaannnnnnnnnnnnnnnnnnnnnnnnnnaaaggaaatagccgctctgataggtagacatgagtaaaaagaacaggaaaaaatcgcttcttgtannnnnnnnnnnnnnnnaacaaaccaaaccaaccagctcttggatgtgaagataaaatagtgctttttcaaaatggaaaggaaaaacttggggaggaagaggcctgctgtgggggcattagagccagccacataagaatcagagccgctccttcctgtgaatcctaggtggccgctactgtcttctgtggagttacag

SEQ ID NO: 7953 - DNA, 663 bp, Macaca Fascicularis
  misc_feature (1)...(663): n = A,T,C or G
gaattgtgagttcttttgnnnnntnntgctgnngtnnnagagcagnntctgctgggcaccaccttggagaaggctctctgcgctgnnnnnnnnnnnnnnnnnnnnnnnnnnnnnnnnnnnnnnncatcccccatcgtagtgagcacctctggaacctgtcctgagagagccaccctcgttcgccaagtcttnnnnnnnnnnnnnnnnnnnnnnnnnnnncagcagggcgtgcttcccctatcagtgagagcctggccgggctagtgtcagtggtcagggaaatgcaagtcttctggttgttctgggtaaaagtggagacaatannnnnnnnctgnnnnnnnnnnnnnnnnagtgaggatcactttgcccttgaaggaaggttttgagaaatggcacacggagctggtttcttttgtcctcctggtgggatttacagacacagattagtgcttgacaaatggagagcatgttccaagtcgaatctagtacttgctgtatattctccctacccgggagaacgtgaaaagtgctttaaaaactcaagcgacaagcgagagatcaaccagtgacttgctttacactagtggtgaccttcaggtgccaaccgggcgcacattcgagattgacagccacgtccccgcaggtttattaaagccagaacag

SEQ ID NO: 7954 - DNA, 2002 bp, Macaca Fascicularis
agaacactgcttccgtgactccagcgctcccaccctcctgcctgccatcggttccctcgcgcccacacccacctcgcttttgccaaatgtatgtgctcatccctttctgaatgcactgggaaggagagcagtagatagacaaactgaggaacgaaacagcacagaatgttctggaaatcgcagcaaatctggcttgggttggagcacatggggacgtcagggcacgtgctgaagaggaaggacattggggtcctgggttgactccagctctcccactggccagtgacgtgtgaagcaagttcctcagccacctaagctcgagttcctcacctgtaaaatagagaagataatacctccttgcaaatacgtggccagaactaaatgaggccaagtgtgagaaagcgtctagcacagaaggagacaagaggggctctggatgcttcaggggggtgaggagggaagtcctgtcactcctcatcgaagatctgggttttgtcagctgaacagagaggaagaggaaggacttgaagactaaagaaatgtcaggcattgaggtagaagaactgattgatatccagaggaaaaaactgaacttggccatggttccaacctagtggttaagctgccggaaaaacaagaagaatttacataatctgcatattcatcaatggagcatcttgaaccaagatagatccgtggagccagtggcagatcaacccctggccagacatttcacacatgggcctatctaagctctgcttattccctaggccaaccacgagggcttgttgagcttggagaagaatctgagtcagctgccgtcgcccgtcctccagcatagcagactctggaaggaagatgtcccggtgtcaggattcagaaatgctcacctgcacgtatacaacaaagaaatgtgtgccaagaaaaggaaagccagagatttgcgacaggggagctgccaccatcactggttacataatcggtggggcccctgcaaaacgaacatgcagcgtccctttgaaaattattaacagccgaagacgacagcagagcctggaaccaagagcagggcctttgacaatgttcaggggtgatgacgccctcccttcctcccccactgtgcctctgaccctgtattttttgttttattttgaaacaacgtcaagcttatagaaacgtttcaagtactatgcaaataacacttttttcttactgaactgtttgatagtagattcgaggctgagacatctgactttccaggaaacctcagtaatttagggggacaatagaagagtctgtttgatgcggtggttttttccattgcatcttaacagttggggcacaaccgtgatgtgtcgcgtttctgatgttcacgttgatgacgtgatgagagtggtatccagacttcactcttctgtcctttgtagttagtttccttatccctattctgtagaagaggcaataaaggccttttgcatttgtattggtgcccagatcattaagattatttggagaaagatatttatccatacatgtgtatacgcatatgcatatttacaaatagatgtataggtctatgtatgtttgtatacatacacttatattctattatgttatctggtttctaaaacagatttgcatcagtttaagaaaaaataacaggacggtcaaaaaattgtgcagtcatttaaatacttttattttctgctgatgggagtgccaattagtataatgtttctgaaattcatcttattatatcaagagtcttaaaatgtttaaatattggccgggcatggggctcacactcactctcaccccacacacactcacacacacacacacattcacacacacacaccccctcccacacacacatcccctcccacgcacacatatgggattgtcagctgaagaacttagaatgcctagaaaaaaaaaaaaaaaaaaaaaaaaaaaaaaaagaaaaaaaaaaaaaaaaaaaaaaaaaaaaaaaaaaaaaaaa

SEQ ID NO: 7955 - DNA, 770 bp, Macaca Fascicularis
  misc_feature (1)...(770): n = A,T,C or G
aagttttaaaagtagtcttattngatacagtaaggagaactactttctaacaaaacacttgcatagttatgacagtgatgctttaaaggaataaaattcttttttttttaaagagtgatattccttttcaaaagaatactaactctcagaatgttcactttaaacaaatatgccagaacatagacagctaaatgaatgttactctgaatagtgatcatgctggaaggttatttcctaatgccagcaatctaccattgcccaaaacctgctgggtttactcttttagaattgcattcaaagttaatttgtcacagacactattaactttatgattatacgttgttttaaaaaatacagtattaggaagcttgattatttttagttaccattatttggcaccaagtgaaagtttccaaaacttccacctaactttgaggtaatgcagaaagtatacaactgtctttgaaagcaatcccaaaagagttttaaaggttttttgagcagtgcagtatacttaggagaatgaactgtggccttccaaggtaacaaactaccttaaaggaactcagctcatttgaatgtattgagttttggatgtacttgtttcattttttaaaaagttcacattattttatagtgtcgaaaggaagaactaagattaacataatttctttggttttttttattgcttgttattatgtaaaaacntgggtggcagttcagaaggaagattgttgtaacagaagagtgacaaccaagaattttttgat

SEQ ID NO: 7956 - DNA, 720 bp, Macaca Fascicularis
ctgctgaccagctcctcaggggagctgtggaggatggtgcgcatcggcgggcagaaactgagctttgatgaatgtggcatcgtggcgcagattgcgggtcccctggcagccgctgacatctctgcctactacatcagcaccttcaacttcgaccacgccctggtgcccgaggacggtatcggcagcgtcatcgaggtcctccagcggcggcaggaaggcctggcttcctgagtcccatggggaacagagcagccaccctgctctcccctcgacccaggcttccaaagacttctctaaagctatttccttaagctccggaatgagccccctgttctgccggggaccctcgttctgctctctgtatgtaagctgcgtgcgggcaccggcttttacgcagacacctgtgtgcactcgcaggtggagtgggcaggtgctagcctgactgcgtgtctgcccacacaggggaacacggtgctcggggcttaagcccccaacccatcactccctgcgcggcctcggcgtttgcacagtccctgcctgaggcccgagccacccccctcagccttcctgggccagctgtcccccagacagggccctgacctctgttctgcctctggtggggttgccttccctggccaggtgagtcctgacagtgcctccccctctggggcccccgagaaaagcattttgacaatctctctctcttctgtttttattgac

SEQ ID NO: 7957 - DNA, 647 bp, Macaca Fascicularis
  misc_feature (1)...(647): n = A,T,C or G
aaagaaggtgatctgagaccaaatagcagcagcaatggtgatcattttggacagcgtgttccaatttccccaatgtgccttcactggcatttggtgccccccaaagccgcttaatgtagaattcattcaaacccttctctgccttttccactgatgaagggatttggctaggtcaaaaggaagacagtagaagttatggatttcataaactactaagctccaccagaacgctgctgctgctgctcctccaggcctcagttgtctgtttctaacataggggtggtaacacttgatctaccgtcacaacagtaaccagaaacttctgcgcctgtccgttctcctttgtgcccggttaatcccggagaaaagcaaccatgcatctgagtatcataaaagtcggcgcagtggctcacgcctgtaatcccaggcgcttcgggaggccgaggcgggcggatcacctgaggtaggnnnnnnnnnnnnnnnnnnnnnnnnnnnnnnnnnnnnnnnnnnnnnnnnnnnnnnnnnnnnnnnnnnnnnnnnnnnnnnnnnnnnnnnnnnnnnnnnnnnnnnnnnnnnnnnnnnnnnnnnnnnnnnnnnnnnnnnnnnnnnnnnnnnnnnnnnnnnnnnnnnnnnnnnnnattgctctc

SEQ ID NO: 7958 - DNA, 613 bp, Macaca Fascicularis
  misc_feature (1)...(613): n = A,T,C or G
gggcccaggtgtgctangcccctcnnggggggcactggcctcnnngcagggnnnnnnnnccagcgccggnnttaatgctaaagccaaatgcagctncnnntgtgcaacacactcctggccatcnngctgtgtcaccccctgtccagcatccacttgccatgggggatggatggatttagggtgggagggcctcccagggccctggacagtcacaccctagcaggtttggaggagcagccagggagccccgagtggcccaggagtccccccacacacatggacgcataggcctgccttcttgagaccctgtccacattgctggggccaccctggtggggccactggtgggtgccagggacaggttagggccacgctggggagggcagtttggttttttattctaccatgtgcagtttggatgggagccccacagaggcaggtcctggaaccacccacccttacacctggacactcgctctggtgggggcacgcacaggtggaggtggttgtgggtgcaggggtgtggggggcacaggggtgtggcctagctggccccgcacgtgggccggggaggctcaagttcgccactttactcagaccgatgcacagtctt

SEQ ID NO: 7959 - DNA, 1906 bp, Macaca Fascicularis
  misc_feature (1)...(1906): n = A,T,C or G
tcatgctgcgaaccacagctgcctccagcctacacgtattctgctctgaactggggtaggagagggatgcatgaagccactgcggctcctgggaatgacacagctggtcacctgtcgttgtgtggagcaaacaggctgcctccaagggccctcgctctccgtcccttcccggcagcccccgcagacccaaatcctcaaggggtcctagaggactgtggagaactttgagcctgcctttggagtgtggccacacagaccagacatttgatccccagagataatgacagcacggtcttccagcaattcagcccaagggctatttttctggcctgcaagtcctcgtccagtgcgaatatgcagaacggagccagaagtgcaagtgtattgaggcagctccaaggaggccatgtgccccagctctttgcaaaatcccatctggatttattttgcagaagacaaggaaggtccttttccgtgtaactagggagcgttagggagaatcagctcttagcttacaaagaggcctccagagtggagccgtgtttgacgggcatcaggggactccccacaccgggcacactggactgacagatgccagctgcacttgctgtctgggtttgtgtcatcatttgggcctggccaggccccacgtctccaaccaaactgatggtctcccaactgagagatcaggaaaaaaaaaaaagccaacggggcgcggtggctcacacctgtagtcccagcactttgggaggccaaggcaggtagatcacctgaggtcgggagttcgagatcagcctggctgatctcnnnnnnnnnnnnnnnnnnnnnnnnnnnnnnnnnnnnnnnnnnnnnnnnnnnnnnnnnnnnnnnnnnnnnnnnnnnnnnnnnnnnnnnnnnnnnnnnnnnnnnnnnnnnnnnnnnnnnnnnnnnnnnnnnnnnnnnnnnnnnnnnnnnnnnnnnnnnnnnnnnaagcaacaagagcaaaacgctgtctcaacaacaacaacaaaaaccccaaacaaacaaaaaacaaaacaagccagcctgttccttcagacctgatagtcctaaaagtgagaagtttggtagccctttgcctctatctggttcaggccatctttgcgagtcccagaggctcagggttattaatcgacctcatcaacatgtgtgcgtacactcatatgggttgtgttgtatcaggtttgtgttttttaattcagttcgcttctttactgaatatgacagatccctttcgatgttctttggaaactatcaccttaatctaaaataaggagcaaaataactttttgttaaaaacgtttttagggcagggtcttgctccaccacccagaagtgcggtggcgtgatcgtggctcattgcagccttgacctgggctcaggtgattctcccacctcacccgcctgagaatctgagctcaccctcctgagaatctgagctcatcctcctgagaatctgaggctctacagttacatgccaccatgccaggctaattttaacaaaaattttgtagatggctggatgcggtgctcacacctgtggtcctggcattttgggaggccgaggcgggaggatggcttgagcccaggagttcgagaccagcctgggcaagacggtgagaccctgtctctacaaagatagaaataaatgtttaaaaaaaattataaattatgaaaatagagcaataaaaatataaacataaattataaaagtagagctttacagctgggtgggtggggggtgaactccagtggtcccagcaactcaggaggcagcagtgcgaggcttgcttgagcctagttcaaggctgcaatgagctatgatcgtgccactgcactccagcctgtgtgacagagaccctgtctctattaaaaaaaaaaaaaaaaa

SEQ ID NO: 7960 - DNA, 607 bp, Macaca Fascicularis
  misc_feature (1)...(607): n = A,T,C or G
aagcccaannntaggcnnnnnanggacccagcagnngnttcacgccaataggttgggcgcatgcgcagaaatnnnnntcggctctagcgtgagctttctcaaggggccacgtccagcttgccttttgattggcccagttggtggggtgtcttcnnnnnnnnnnnnnnngggcactaagaatgctcctgatcgtcttcacaatgagggcggaggccccgccccgccagctgctcagtacgtgccgcgtagcccgtgcgagccaagtgtgagtcggggcgagagcctgcggggctagcagtgggccgagagtgagagggcggcggaggagcagcgatcacgtggttttagggactgtctaataattccacgccagcattgccggtgtttcaaggggctggggaccgctgagttcgccaccaacttttctccgacgaactaccctccccaacctacaagcccagttccgcttgaggtaactgctgacgagactgtcctatacagccctacaagacagaggcgcctggggctgaaagcggggggccacaatagggagccagtgttattcattttccctacctttgatgaaaataagaactaattcttaatg

SEQ ID NO: 7961 - DNA, 723 bp, Macaca Fascicularis
agcaagagccgactggagaagagccagctgtgttgggaggagacaaagaaagcacaaggaagaggcccaggagagaggccccggggaatggaggacactcagcaggccccagctggcggcacattcgggctgagggcctggactgcagttacacggtcctctttgctaaagctgaggcagatgagattttccaagagttggagaaagaagtagagtattttacaggggcgctgaccagggtccaggtattcgggaagtggcacagtgtgcccaggaagcaggcaacgtacggcgacgctgggctgacctacacattttcaggcctcacgctgtctccaaagccctggatcccagttctagagcgcatccgggatcgcgtctctggggtgactggacagaccttcaactttgtgctcatcaacaggtataaagatggctgtgaccacatcggggagcaccgagatgatgaaagagaactggcccctgggagccccatcgcctctgtctcctttggtgcctgcagagactttgtcttccggcataaggattcccgtgggaaaagcccctcccggagggtggcggtggtcaggctgccgctggcccacgggagcttgcttatgatgaaccacccgaccaacacacactggtaccacagtcttcccgtgagaaagaaggttctggctccacgggtcaatctgacttttcgtacaaattttgcttact

SEQ ID NO: 7962 - DNA, 661 bp, Macaca Fascicularis
  misc_feature (1)...(661): n = A,T,C or G
agtggggggtgaccacaggcaggaagaggnnnnnnnnnnnnnnnnnnnnnnnnatnntgagatatgctcacatggtcaatggattnnnnnnnnnnnnnnnnnnnnnnnnggacatcctggacgtactgggtgannnnnnnnnnnnnnnnnnnnnnnnnnnnnnnnnnnnnnnnattccctatttcccagctaaccaggagatgcttcagaaggtcgaagtcgaatatnnnnnnnnnnnnnnnnnnnnnnnngacaccacaggcgccaggaggtgggaggacctgcccccgcaggcccannnnnnnnnnnnnnnnntggagaatcacgtgggagtcgcagtcaaatgggttnnnnnnnnnnnnnnnnnnnnnnnnnnnnnnnnnnnnnnnnagtcacagactnnnnnnnnnnnnnnnnncctggcagcgaaacnnnnnnnnnnnnnnnnnnnnnnnnncacaaccaacacnnnnnnnnnnnnnnnnnnnnntgtatttttctatttctgttcaacctgttggtttctacaatgattttaaacattggaaagccagccttgtgtatatttttaaaaattctgctatttaaaatgagccaaagtgctcaaagcannnnnnnnnnnnnnnncattagtgtcacatggttgcgtgtccagctgaag

SEQ ID NO: 7963 - DNA, 809 bp, Macaca Fascicularis
  misc_feature (1)...(809): n = A,T,C or G
tatgcacatgaatgagnngctactgctcaaaaacaaatcagcatcatactgtnnnnngagagagtgagagtggcacaggcacgagtgggctcagcccgtgtgagtgaggagaactgaggaatcacggggtgnnnnnnnnnnnnnnnnnnnnnncatttgctgcagagcacgtgtttctttcttgcctcccttcggttttcttcagttgcgttcagtgtaccttctggaaccaatagtgctctctgttttcaagtctctcaaatgctaagnnnnnnnnnnnnnnnnnnnnnnnncactaggcttttttacagctgtgcttgagaacatttccgagtggaccagggcctcgaggnnnnnnnnnnnnnnnaaatttagcagatgtgtgcagtgattccctctgttttgtatttgacaccttcatttaaaatgctaagatgcaatatcattcaaagtggggaaaatgcagaattgtgtttcctttttatccgtgtgattccttaagaaacatgtttttaaaatatgtgttctaaatggttttttattctgtattactgctttggccatgtggctctcatnnnnnnnnnnnnnnnnnnttctcagnnnnnnnnnnnnnnnnnnngagaagctctggaattacagcaaggtttttgttccatgagcgcaatactgtatcattaacatttttaatggtatggattttataccatctctgtatgtttgcaaatattaagttattacatgttttaaaatgagcgtttttcatcctaaattttatatgtttgcaaatatatttttaataaaatcaaacc

SEQ ID NO: 7964 - DNA, 608 bp, Macaca Fascicularis
  misc_feature (1)...(608): n = A,T,C or G
gataacccatggaccgccactaggcttcctggactgggtccccaagaagatgcagcgggtgggctgcgtggagctgctgaacacggtgcagaggcgcgtccagccgnnnnnnnnnnnnnnnnnnnnnnnnnnnnnngggtatggtgtcatggcagatgggacgaccacctatgtgaatgcgtccgtatgcactgtgaactaccagcccgtgaacccgcccatnnnnnnngacctccccacaccccggaactcctgactgatccccactgccccagtccnnnnnnnnnntgccagctccataggcctggtccggccaccgttccttccatattgagttgcctggacgacccacttggctgcggggactggcctagcaggcgggtcagggccttgaaacaactcttcagccttctgtcacctggagttgggaccctgcgcatccccatcaggggttctgtgctcatttactttttctgcgtgtacatcctgcgtgtacctcgttaaaggacctactaagctcatggccctgtcatgtttgggaaatgactgaatcttcattcttctcccttggacgccctcctggtttgggaagctgctgctcttcaatg

SEQ ID NO: 7965 - DNA, 701 bp, Macaca Fascicularis
  misc_feature (1)...(701): n = A,T,C or G
agaaaagannnangcacttgtnaaanctgggtaaataggaaaaatatataatcatgctcagacatgtatctgggataatttaataataatcatagtaacaatggctaatgataatttagctttatgatgtttgctgagcactctggttttacatgtattatcttcttttgttcttgctacaaccctgtgagatagtaatattatctcatttttctggtgaagactgaagcctgggtatattaaatagcttgcccaaggccatgcagcaaaagtcactgactgaaacctacttcttatttactcccaagtctgttgttcttaactgcagcgtattatttcctctcattaatattgattctataggttgttacttctaaaaattagtattgagtttaatggtgaacacatttttctattttctcttgaatctgcttctgtaatgttatggtgatttatgtggctttttttttttgtataagttatacatgtatgcatgtatacttatgagatctcctctggaatgagggaggtctnnnnnnnnnnnnnntagattctcattgatgtnnnnnnnnnnnnnnnnnaacaccatctgtagtgttaaatcaactaaattatttcagtaataggagacaaaacaaccagctttcataagttttaattgtcaaaacgaaaaggaatcagaataaggatcactgagaatt

SEQ ID NO: 7966 - DNA, 654 bp, Macaca Fascicularis
  misc_feature (1)...(654): n = A,T,C or G
caaaaacagtaaaaataaaaataaaatgtaaacagagaataagataccaaaagaaagaatgtgannnnnnnnnnnnnnnnnnnnnnnnnnnnnnnnnnnnnnnnncttcctggatccttgtaccttacaaatggaaaaaaacggtgggtaggggtagcatcaaaatgatggtgatgttttaagatggctttgggtttcagatgtctgacagccatacttgaaaggacacaaagatagatgtgtacccgccccccacccgctacacccttgttctgctctctaatctttgcacataccagagatttcgtaagttctgtgagtacctggttttctgcnnnnnnnnnnnnnnttgttttgcacataccagagattttgtaagttctgaggcnnnnnnnnnnnnnnnnnttaagtaagatannnnnnnnnnnccataaacctgctctcccgcctcaaagtttgaaccaaaatatcagaaatggcaggaaccaatcatagttagccaaatcgccttgttcaaacactagccaatcatatatctgatttgtataataactctatgcccacttttcttagactatataacattgttcggagctgagtgggggagctctcctgcccgtctcgttcacgagcgagggagagttccaggtcgaa

SEQ ID NO: 7967 - DNA, 1712 bp, Macaca Fascicularis
  misc_feature (1)...(1712): n = A,T,C or G
agacgggctgagtggccctgctgtctgaaggggcctcagttttatcctccaacaccttggggctccactggtgctcacctttcttctccaagcctaggtcttcagcatgaggctgaagatctgggtgaatggcctccatcaacattttccttcgtccacctctccagtagcagagcgcagataagactggacggggcagccctgctgaacccacagcagacctccaaagaggggtccaggactgcactggaaggaagtgaccacaagatgacaccgttgttcttccagacactcccgctgttatgaggaaaggagtcatttgcagcctggaggaggactctaccattccaagatattcagctgaccacccaagcagtggctcctgagacctccacactcgacagagtcccgcacacattcaaggccaccacctccttcatgctcctttctgatcacctctccaagtcctggtgtcaggagccttctctgtggccgtcctggagagacttgagcctgggacgtgacctgctgggctgtgaaggtttctgagaaggcaaacctgcggtctgacctgcctggatgctgcactcaacctcatctcttcctgggaggcaggctctcttcccttgtttctacaaatttggtaaaacagcgtttaagtcctagtccctggtagtgaccctgccaggatttgacccaggctgtctgactctatttatgcacacatcatatattaccgttttctattgtccttaggccatggcacacatgtaacgaacacttaacgtggcccaccaggaagtctttcctttttggttcaactcagatcttggccattggccacaatggggccttggtcttctctgaagatgacctgggactgctgttcacaggcaaatccccattgggcatttctattctcattgagcttgcagcaaaccatgatggtgtccgtggcctatcttctcccaaagccaaggacgggagatggtacatcaggtgggcacaggattcatgctgatttaaaagctttatggcagggcacagtggctcctgcctgtgatctcaacactttgggaggccgaggcgggtggatcacctgaggtcgggtgttcaacnnnnnnnnnnnnnnnnnnnnnnnnnnnnnnnnnnnnnnnnnnnnnnnnnnnnnnnnnnnnnnnnnnnnnnnnnnnnnnnnnnnnnnnnnnnnnnnnnnnnnnnnnnnnnnnnnnnnnnnnnnnnnnnnnnnnnnnnnnnnnnnnnnnnnnnnnnnnnnnnnnnnnnnnnnnnnnnnnnnnnnnnnnnnnnnnnnnnnnnnnnnnnnnnnnnnnnaatttgagaagctaaaaatataaaaacgagaatatgtggaaaaaaccataagcaacccataacgccatatttactatctgaatttttaagagaaaatgtgtaaccacggttttgtagttttctgtgaatcgaacttgcacagcttctgttaatttattcctaagtattttatgtgagttgtaaacactactgtaaatggtttcatcccaattttagttttcaatcattcatcaatggtatacagaaaatacattttaaaaatacgtattgacttgtatactgagaccttggtaaattcacttttgaattctggtagcatctttgttttctatgaatcatgtttatgtgaataaagctactttaacttcgttttaaaaaaa

SEQ ID NO: 7968 - DNA, 1475 bp, Macaca Fascicularis
agctgtttttcgtcttccctgggttatttctgtagggcgcaccgcgaagatgcagctcaagccgatggagatcaaccccgagatgctgaacaaagtgagtggcggggctggggcgtgggctgggcgccctttctgagcccctgcatttagcgggtgactttgcgaaaccggtcacggggagacggaggggctgcgccccgtggcgagctagcgccgagcggagctcccgagggcgtggcgcgggcagcacagactcggctgcacgggcttcgcgggcgccacgtgtgggccgcgctttgtgctgtgtcattgcgcccgccagagtgggggtggcagggcgggactggggctcctcccaggctcgggtgcgggcgcggagggcgcgcgcctgctggccccgccctctggcaggtgcccgcgacccgcgtgtccccgtgcccctggccgccttgtttcctctccgcaggtgctgtcccggctgggggtcgccggccagtggcgcttcgtggacgtgctggggctggaagaggagtctctgggctcggtgccagcgcctgcctgcgcgctgctgctgctgtttccactcacggcccagcatgagaacttcaggaaaaaacagattgaagagctgaagggacaagaagttagtcctaaagtgtacttcatgaagcagaccattgggaattcctgtggcacaatcggacttatacacgcagtggccaataatcaagataaactgggatttgaggatggatcagtcctgaaacagtttctttctgaaacagagaaaatgtcccctgaagacagagcaaaatgctttgaaaagaatgaggccatacaggcagcccatgatgccgtggcacaggaaggccaatgtcgggtagatgacaaggtgaatttccatttcattctgtttaacaacgtggatggccacctctatgaactggatggacgaatgccttttccggtgaaccatggcgccagttcagagggcaccctgctgcaggacgctgccaaggtctgcagagaattcaccgagcgtgagcaaggagaagtccgcttctctgccgtggctctctgcaaggcagcctaattctctgtgggagggactttgctgatttcccctcttcccttcaacgtgaaaatatatactgccccccccccatgcagtctacaatgcttcagtacttgtgaaacacagctgttccgttctgcagacacgccttcccctcagccacacccaggcgcttaagcacaagtagagtgcacagctgtccactgggccgatgtggtgtgagcttcagatggcgaagcattctccccagtgtatgtcttgtatccaatatctaacgctttaaatggctactttggtttctgtctgtaagttaagaccttggatgtggtttaattgtttgtcctcaaaaggaataaaacttttctgctgataaggtaaaaaaaaaaaaaaaaaaaaaaaa

SEQ ID NO: 7969 - DNA, 384 bp, Macaca Fascicularis
  misc_feature (1)...(384): n = A,T,C or G
gggaagtcaaagccctgggccttgccttcagggagttgacagtgtccgtaaagtggtgaagtgcccaccacatgaaccaaggagagacaccaaagcagctgcggtggactctggcctgtccaagcctctgcgcacctgcaatctgtttccactggcccttccctgctttgccaccattgtggaagaatagaagggagggggagaaggtgggtgggctcagggagaatgaccagagtggccagaagatgcagagagaagtcccactgggatttgagtattccctaagnnnnnnnnnnnnnnnggatgaagtagtgtgtgtttgtatccttgtaattatgtgagttaaaatgactcagagatatttatgtgtgcgtgtgtactccg

SEQ ID NO: 7970 - DNA, 646 bp, Macaca Fascicularis
  misc_feature (1)...(646): n = A,T,C or G
cagcagcaattgaaggcttctattttgtggggcagacatctactgagcaagcacacagtgagtctcatgtttaactgtggatatgcctgaatgtccagtgtcagttcatgaagctgctccctttccctcccagctttttgttgttgagacagggtcttgtcacccaggctggagtgcggtggcaccactgtagctcactgcagcctcaacttcctgggttcaagtgatcctcctgcctcagtctgtagctgggcctacaggtgtacaccctggctaattttcgtattttttgtagagacagttcctaactcactacgttgcccaggctggcctcccgactctatgcacacactttgaaaagaaaatgcttctggtcaggcatggtggctcacgtctgtaatcccaacatcccagcactttgggaggctgaggcaggcggatcatctgaggtcgggagttcaagaccagtctggacagtatggtggaacctcctctctactaaaaacacaaaagtttgcccagcatggtgacgcatnnnnnnnnnnnnnnnnnnnnnnnnnnnnnnnnnnnnnnnnnnnnnnnnnnnnnnnnnnnnnnnnnnnnnnnnnnnnnnnnnnnnnnnnnnnnnnnnnnnnnnnnnnnnnnn

SEQ ID NO: 7971 - DNA, 204 bp, Macaca Fascicularis
  misc_feature (1)...(204): n = A,T,C or G
ccctttgtgagatcaagagcgtctggcacatctttctgcaaagagatatgaaagtgtgtgcatccccgttagcacaaagtgaggagggggagagacaactcacccccgtgtccaccacgacccgtgttcgcacgcggacacgtgtttcttccccactcatattttctcgttccagagannnnnggggggaggtgtccatatcag

SEQ ID NO: 7972 - DNA, 2492 bp, Macaca Fascicularis
  misc_feature (1)...(2492): n = A,T,C or G
attaaacagtagggatgtgaattctgttctataacaagaactttggaagtagggcattccaggactatacattcaagaaagtcatcaaggtgttctaggtttccatcttccttctcttcctgctgtgtcagctgcttcctcataacaaggtgactgcaatagctccagataacatctgttcaaaggcagaaggaagtttctttctccccacagacatgtgtgtgtgtttcaagagcgagaaacccagttcctatcacattttattggtcagaatgatcacctggggcttgtggtcgcatgcgacgttgtcacataatgatgtcacatgacactgtcttaaccattccttagcaagggagatggtattaccatgatccgtttaggttcaccaagattcacccttaagaactgaagaagggccctgtccctagacgttcagactctaaaacaccaaaacaggatcatatcttgggatgtgtaagagagttgggaatagacaaccaatagtgttgtctctgaacaccgagtctttttgttgctgcataaaaagccagaaaatcatgtttctgatgactttggagttagggggaggggctatggttgtttgctcagaaaaatgccatctcatcccccttccctggcatctttctgatctgtcctgttttgtaggtggaatgttcccaccttcgtttgcctgttcagacgtgtttgtccttccattatttttccagctgggttgccagcagaatgcagagcagtctagagaaatgaaacagagctgacaggtctcttaatgaaagcttgtttgcacaccttgcctttcctgtgatcgctctgtgcctgagagcctctgggtgtggatttttacatgagcgtttgtctttcttttaattaaggcctgtagaaatggattggtttttataaaccaggcatttctcatcccctcactcttgctcttcctctttccacaccttctctgcccatcttcctctcccctcccccttccttctcttgctcccgcagctattcccaaagcctctctagctgggaggctcctgatggcctcagctcaatgccagctggaccctccccgtttttggcaatcttaagcaagctaaattagtttgcccattgttgccctcttctgtgacctccctcccaaacatgcaccaccatcacgacgcaaagttctagaaaagggctctgctatcagttattcacatgttggagtaaatattttggtgtattattcctactgggagcctttgcatcccagttcaccacatgacatgaaaagttctgtctcttctttaagaaatggcaaagaccagctacttacttacagaagtgatcttccctgtctctttaaaattacaacatgcctttgcccctattggtcttcactccaaaaaaatggggtggcctcctggctttgttggtttcccacagccctatggatgacttggtaccctactttttttttttttttttttgannnnnnnnnnnnnnnnnnnnnnnnnnnnnnnnnnnnnnnnnnnnnnnnnnnnnnnnnnnnnnnnnnnnnnnnnnnnnnnnnnnnnnnnnnnnnnnnnnnnnnnnnnnnnnnnnnnnnnnnnnnnnnnnnnnnnnnnnnnnnnnnnnnnnnnnnnnnnnnnnnnnnnnnnnnnnnnnnnnnnnnnnnnnnnnnnnncaaactcccgacctcgtgatatgccttctttggcctcccaaagtgctaggattacaggcgtgagccactgccccggcctgtaccctacttctttttgaaaaagcaccttcttcctctactttcattctgaaacctccatttaaaacacttctcctccttagcaatagtgagaatcccttcagactagatagggtgtcaaaaggccaaagcattgcccccaacacagtcctttaatgtattcccttctttccaggtgtcttcctgaacagagaaaaatgtatagatcagagagatgcaattgggagctccgtagtgaatctagttagaaatgagaagcagaaaaaataggaaagacccgtctctcaatattatggttgcttcccaaaacgaaacaaaacaagttgatacggcatgaaggcaatttaaaatgatagatatggacatgctgccttacatttcatatcacctctttactaaatgagagtttttttggatgcagagagaaagtttgcatactattgaaaagtttgactttctggaatctatgtgagctcaggaatagatttggggatcttagcagaggccggtggtagcctattaaatgtaaaacaattggctttgtttttaaaaccagctgccattttgtagtttcatttaaagaaaaagtaccttctattcatttgcagaacttgctttattggattctatggtcactgtgtatcataactctatctttttttgttacctgaaataaaaatgtggcaattttcctgaaaaaaaaaaaaaaaaaaaaaaaaaaaaa

SEQ ID NO: 7973 - DNA, 755 bp, Macaca Fascicularis
  misc_feature (1)...(755): n = A,T,C or G
cgttcagttgtcctggccaccctgctgctgtaaccatggtcggaactccatcctgccactctggattatgactttcgtttcctcacagtggtcctgcttgggctctaggcccttccactccccattctctctacagcagctgggctgatccttttagcacccaaggatatgttggcatcacagtgacccagatggtgataccatcacaatgatgagtgaaagtcagaatcctcacagtgaacccccaggccctagaggttctgaacccccatccctcctctgattctctcttcctcccgcacttctctttgcattctgctccagctgccctggcctcatggnnnnnnnnnnnnnnnnnnnnnnnnnnnnnnnnntagggccgttccccccgctgtggcttctgcttgaaattcccttttccctgatgtcccttgactcattattccctttcttcctttgagtcttctgagatccagcctctcagtgatgccgtataaccctactcaccccagagcccgtccgnnnnnnnnnnnnnnnnnnttgcgctgctgggctcagtnnngctctttgttccccatagagtacgtgtcatctagtgtactatattgttctcttatttattaggcttgttttatttatttatttatgttttgccttttgtgctaaatgtaaacaccccaagcggtggtatctttgtctcttgacaatgatacattcagtgtttctcaagcacctccaatgctggtttgttatca

SEQ ID NO: 7974 - DNA, 721 bp, Macaca Fascicularis
  misc_feature (1)...(721): n = A,T,C or G
aacgtttcacattccactgtccctgcttttagataaatacctggttccatagaacgccagctatgtgccagaaccagaggggtcatccagacggaccagggaccctgccctggagcttgtattctcccaacagtactggctgaagatggtttaggataggcagaagaaagatcataatgcccccaggatttgagagatatagaagctttccaaagaacatttaaccataaagggcaaggcaagagcnnnnnnnnnnnnnctatcttccaggcgccccaccctcagtatcaggcaacccttccacacnnnnnnnnncagcgatgcttgggaggagagtgctcaacctgccactctgagggcgtcatccccaccaacaggctgaagaaggcactggaggtcccatcagccaatannnnnnnnnnnnnnnnnnntttatccaagannnnnnnnnnnnnnnggccgactggcttggcctccttaggctggaaattgcaattctgctttcccttcacacctcctattagtgtgcaccaaagaaagtacctcagatctactcttccagaagtcttaccacatacttaatttaccagattgggaaaaagacactttannnnnnnnnnnnnnnnnnctttgcagttaacatccccaaacaatagaagggaagagttaagaccaagtggaatgaacaaggaaaaaaaatcatcnnnnnnnnnnnnnnata

SEQ ID NO: 7975 - DNA, 220 bp, Macaca Fascicularis
  misc_feature (1)...(220): n = A,T,C or G
gcaggaagcgcaggcatggaggcagcggcatgctgtcactgcggtgggaggtgcgcgcggtcagcctggccgctttcctccacgttcagatgactcccgctcgccctgaccgggttctcacagtgtctcaggccactgcgccaccgcgctggtgctcagcagaagtggggtctgctttnnnnnnnnnnnnnnnnccactcgnnnnnnnnnnnnnnnctcc

SEQ ID NO: 7976 - DNA, 744 bp, Macaca Fascicularis
  misc_feature (1)...(744): n = A,T,C or G
cgcacgccaacaccagctgnnncagnnnnncagtcagctcctttccagagacagcaatcagattataccagaaaatgttctgntccgcggagaactnnnnnnnnnnnnnnnnnnnnnnnnnnnnnnntgtccacgtgtctgctacagaacacttccgttttgtaagccnnnnnnnnnnnnnnnnnnnnnnnnnnnnnnnnnnnnnnnnnnnnnnnnctccccagaagaatgtgtcnnnnnnnnnnnnnnnnnttgcttgttatgaatctaatggaatttcctgtagtgggnnnnnnnnnnnnnnnnnngaagaagagnnnnnnnnnnnnnnnnnnnnnnnnnnnnnnnnnnnnnnnnnnnnnnncagtcnnnnnnnnnnnnnnnnnnnnnatgtcagtaannnnnnnnnnnnnnnnctgnttggtgaaaataagacttttggaggagtcatctttcgaaagttggagtgtgcaaacgtaaacagcttaacccccannnnnnnnnnnnnnnnntcccacaacatgggcttcaaagcttccctcagcctcttggcctnnnnnngcctccttctgctgggactgtggccctgaggtcctggggctgcactttgcccagcaccccatttctgctgctctgaggtccagagcaccccatggagtactgacaccctctttccccgccctgccccatttaactgcccagtaagtgggagtcacaggtctccaggtaatgccgacagctgcc

SEQ ID NO: 7977 - DNA, 722 bp, Macaca Fascicularis
  misc_feature (1)...(722): n = A,T,C or G
nnnnnnnnnnnnnnnnnnnnnnnnnnnnnnnnnnnnnnnnnnnnnnnnnnnnnnnnnnnnnnnnnnnnnnnnnnnnnnaagacagtctcaaaaaataatataaaataaacataaaggacagtaacaagcattggagaatacacacagaagttggagtgagtcctggtacgtgcattgctgttgagaatgtaaaccgtgtggccactgtgacgctcaaaacgtcaaacagaattatcggtaacccaataattccactcctaggcatgtgtgcaaaagaattgagaataggtgtatcaaatatttgtatacaaatgttcatggcagcacagtttacaataaacaagtagtggaaacggagcacacgtccatcagtgatggacggaatattacgcagccgtgaaaaggactgaggcactgattcgtgtgaaagaacctcgagaacattatgctgagtggaaagagccagacgcgaaggccacagagtgttggttccattcactgcaggggaacgaccagaactggcagatccacagccacaggacaccgaccccgttaccgggggccaggaagggggagtggggggtgattgctccagagccacaagcccctttgggggtgctaatgcttcagaactccacagaggtgatggttggacaacgtggtaaataactaaacgccactggattacattctttaaaatggttggttttatgttatatgaa

SEQ ID NO: 7978 - DNA, 192 bp, Macaca Fascicularis
aacttgagcgtaatatccgcgcttttaatccttggccaattgcctagggatggcaatccacacactttaaaagtgtatcaacagaaagtgttgcctcatcaagataaaccagcgggaattatttttagtgggaaaaaaaatggcattcaaattgcgactgtcatggcgtgtaaacttattgcaattacaatc

SEQ ID NO: 7979 - DNA, 760 bp, Macaca Fascicularis
  misc_feature (1)...(760): n = A,T,C or G
tgtattagcccaatactnnttgcagagaaaacattttcaaagcatgtacttcctgaagacacgtcagtcnttnnnnnnnnnnnnnnncaatacatagggtggaagaatgtgatttggggctgaccataaactggaaatttgtgaaannnnnnnnnnnnnnnnatcttcagtttagtttttcagttgaactggaactcatttctggnnnnnnnnnnnnnnnnnnnnnnnnnnnnnnnnnnnnnnnnnnnnnnnnnnnnnnnnngtcctgccccaccagtacgtgtccaggatactctttttttcccctctgtaaagtcactttcttnnnnnnnnnnnnnnnactatgatgtcaggtttggggatgaggacagtgnnnnnnnnnnnnnnnnnnactgactcctcaccccagtgcacgaggattcctgtggcatnnnnnnnnnnnnnnnnnnnnnnnnnnnnnnnnnnnnnnnnnnnnnnnnnnnnnnnnnntgtcacagaacatctcannnnnnnnnnnnnnntggtggaggtggatttaccccttgttttacaaaggaccgtgtaaagtcattgaagttgtgaaagtctattttttttcctgtaaatctattttttacagaatataagaaacatcagtgacctgatctgtccttcctcctccttcccgcttcccccaaaatcacattccagtttttattgtctttgtgtccaaagtaaactaggtgacttatttgtataaaatgnnnttgccacaagagac

SEQ ID NO: 7980 - DNA, 671 bp, Macaca Fascicularis
  misc_feature (1)...(671): n = A,T,C or G
ggccaggaccacacagtnnncaganncagatggaagtctannngcttgacagcctccaccaagatctacaggacaaagggagggaacaagccctgctcgaatggggcacggactgtccaccttttctgatgtgtgctgtcactgtcaacctgtgctgtggcatagacatggatgcgaggaccactttggagactggggtggccttaagtgcactcagagaagggaagaaggggccatcacaggatgccagcccctgcctgggttgggggcactcagccacggccagccccttcctgggtatttattctctatttattggggataggagaagaggcatcctgcctgggtgggacagccccttcagccccttctcccctccccgcctggccagggcagggccaccccactctacctccttagctttccctgtgccagtttgactcggaggctgggagcatagcagaggggccaggcccaggcagggctgacgggaggccccagctctgaggggagggggtccgtggtagaggcctggggccagtagaggctccccagggcttatgtccaccacgtcaagcaatgggtgtggatgtaattagctctgggagcagttgggtagatgggtgggggctcctggcggccttctgctgcccaggccacagccgcctttg

SEQ ID NO: 7981 - DNA, 764 bp, Macaca Fascicularis
ttgcatgtcaataaatatgcctctacaacatattttgaatcacttaatatttttctctgttaacggttggtatatagtgttgtaatcctttattgcatattctcatacaatatacacattcttttgcaaaactaggaatacagtgttgagacttgccttttcctcttaacagttgtcttttcaatttagtgttatatagatctgtcatatgctttttaatctaataacttgacggaaatataattaccatacattaagctgcatgttgaaagtatatacagtgtgatcaatcttggaatgtatatacacataaaaccataaccacaatcaaaattgtaaatatattcatcacccaccaaagctactttttttttttgagacagagtcttgctctgtcaccgaggctggagtacagtggtgcaatctcggcccaccaacctctgcctcccaggttcaggtgattctcgtaccttagcctcctgagcagctgggactacaggtgcatgccaccacatccagctaattttgtgtgtgtgtgtgtgtgtgtatttttagtagaggcagggttttgctctgttggccaggctggtcttgaactcctggtctcaagtgatccacccaccttggtctccctgagtgtcaggattacaggcgtgagccactatgcccagcctcccccaaaacttcttaatgcccctttgtaatccctccctcctctctctccctgtgcccctaacccaggcaactatgggtcactttctgac

SEQ ID NO: 7982 - DNA, 759 bp, Macaca Fascicularis
  misc_feature (1)...(759): n = A,T,C or G
attatacattaaatagaatnnnnnnnnnnnnnnnnnnnnnnnnnnnnnnnnnnnnagttggcatgtgtgtggcagaggagnnnnnnnnnnnnnnnnnnnnnnnnnnnnnnnnnnnnnncgattccagagtaagtcaggtcgctaggtaagttgtaactgattcttttcctgcagcgcacnnnnnnnnnnnnnnnnatctccctcccaccccctccacagcctgctgctggctgtcctgtatgtgagctagcagctttttaatctnnnnnnnnnnnnnnnnnnnnnnnnnnnnnnnnntcgttctggaaggnnnnnnnnnnnnnnnnnnnnnnnnnncaaaaagcaatacttaaactgaattaaaactacccacacgtgaagcttgtcggaattgtnnnnnnnnnnnnnnntaagacctggtaaatgtggagccagtgctgtgccctgacctggagnnnnnnnnnnnnnnnnnnnnnnnnnnnnnnnnnnnnnnnnnngacctggggnnnnnnnnnnnnnnnggaacgcctgctctcnnnnnnnnnnnnnnnnnnnnnnnnngccctgactacattttttgctctcggtaaaaggagtcaatgatatctttgtacttctccaaaactgtgagccgtttcagtttcatcgtgggacccaattctccaccggaaatggagaagtctctctcgagaatggcccacttctggatgtggtagggccgggctgcagcattcatgttgactctccggatcccctctt

SEQ ID NO: 7983 - DNA, 628 bp, Macaca Fascicularis
  misc_feature (1)...(628): n = A,T,C or G
aaaagttatcagcacgtgggttactgaacantgactgtttatttaatggaaaattacattttaagagtattagagtgaaaatgatcttttgatttaattaaaatattcaggtaaaaatnnnnnnnnnnnnnnnnnaaacttcatgccagtgtatcgtgaaaacattaagctgctnnctgcnnnnnnnnnnnnnnnagtagagtatgtgtttgaaagcgtcattccagtcttaagttttaggtattcttaaaggggttggctggagaagtgacatttaacattgagtgaacgtttnnnnnnnnnnnnnnnngatataaaaatagttaaaaacaatgtttagtgtttcctgtcagggttcacccattaaagaatggtcttgtaaaaaactcatcgagagtgttggcgcccagaggtgctaccttgcccacagttgtgtcatcnnnnnnnnnnnnnnnncacgcccagcgtttagctgcacgtcagatgtggccacggggccacaggacatccctgcggatggatgtttttatgcagattaatgaggatggagaccgctgcagaactgtaagccccccagggnnnnnnnnnnnnnnnnnnnnnnnnnnnnnnnnngagnnnnnnnnnccct

SEQ ID NO: 7984 - DNA, 510 bp, Macaca Fascicularis
  misc_feature (1)...(510): n = A,T,C or G
aattaaagcctggcacntnnnnnggcttgattcctagaagcctcctcttgctgaaggaaaattcccagtgcttgctgcctttccatgtgctgtgagtgctttgagttcagactgacaacagagtgggtccagctcccatgctttccatgaagatctcccacaaatgtcatccatgctcatgagatgaatcaacttgtatcctgaacaagcaaaactgtttgggactcactgccctcaggcagtcacttggaagccaagaactccaggaacttttcagatggaactggaaacactagggcaggagacctcccctggtgggaggtctgttcacctgtacggcttgactaatggatgtcctgcttgaggtgccctaatattgcaaattctttgtttccaggggtaccacctgtgcccctgggactatgcttctgtacatgaccatgactctcatgatatcccctcagccctggaaagcatttgtgttagcttccatttactgagcagagttgt

SEQ ID NO: 7985 - DNA, 493 bp, Macaca Fascicularis
  misc_feature (1)...(493): n = A,T,C or G
aggagaagaccnnnnnnnccagnnngggtgcagagaaaaccaagaaggaggagtacatgaagaagctgcacatgcaggagcgtgctgtggaggaggnnnnnnnnnccatcaagcccttataccagaagagggaggtgaccaaggaggagtacaaggacatcatgcgcaaggccgtgcagaagatctgccacagcaagagtggggagatcaaccccgtgaaggtggccaacctggtgaaggcgtacgtggataagtacaggcacatgcgcaggcacaagaagccagaggccggcgaggagccgcccacccagggggccgagggctgaggccaggcagtcacgggccttgcccggggagctgttgggagtggtgggaaannnggggcaccagcatnnnnnnnnnnnnnnnnnnnnnctgacacctggtctgtgcgtctgtcttgatcacagtgaaaactggacacttttgtatgtatattatagatacactgttc

SEQ ID NO: 7986 - DNA, 732 bp, Macaca Fascicularis
  misc_feature (1)...(732): n = A,T,C or G
tgtgtgattgtggttaagatacatatttggtgctttatttatccagaagcatgagtcacatagtacataaagtattgaatacaaaattctaaagataaacacaattgttcttgaatttaaaatgtatgggataaatgcttacaaatggatttataaacctttcacttctacttcattctcctggctgtgtcttctgaagatgagttgctaggtgcaacattaagaagatagctccttcaaatcctgacactatatgacacagaaagaacttttggcaaatatttattcagcttacttgtctccagtggcaaatttctcagcatttctctttgttttgtctatgccttagcctgtacgtttttctagaaannnnnnnnnnnnnnnnnnatgtattaattattacataattgaagttagacccaaatatgttaaatatttcctcttgcaaagggagaagaggaatggagaaacaggggtaaggtggggaggaaaaaatacctcaggtgagagaacaagtaacttgcaagaggcttattaaactgtatgtaaatgttgaagaggctgatttgtagtttctctactagaaaaataataagatctattattaaaccgtgagttgagaataatattccaaatgtttgttgttgtcgttgttgttgttgcctattactctctgctgtaagtttccattcaaagccaagagtgttttctcaattggaagagttgatcttt

SEQ ID NO: 7987 - DNA, 640 bp, Macaca Fascicularis
  misc_feature (1)...(640): n = A,T,C or G
cagaaagaagggaggcaaacttggggagtgagaagccagcctcccagaggcccagacgtcgtgttctccacatccaaccctccagagaggacagaggcttggcttgggaccttgtaacttccttgcaagnnnnnnnnnnnnnnnnnnnncaaaagatagaaggaactgccctttgggacttctttatgttgagtgtgagtgggaagatgggactctgctttacagccatatgtgctggagccatccccttcttggaccaaccactggtctctatgggaggccccagcctcacatttccctggcaaggagagagaggtttagcgatgtcttgggcccaggattatagcccagagatgggcagttaaggagacatggtcactggtccagacttgggccaaggctctcttctgtgagggatgggttttactggtgaattacctgtgtggagaagatatcagggccatgtttagcacactgaagggaccagtctccaccaagcactttaacatccctccagccagcactgattgatatcatgttacaaagagggcaaggtttttggcccctgtttgcagactccatgtcttaatcagagaccacagttttctctttgttccaatcagcaccacctcggtagccc

SEQ ID NO: 7988 - DNA, 482 bp, Macaca Fascicularis
  misc_feature (1)...(482): n = A,T,C or G
ctgtccggagataggcagccatcangaacnnnnnnnnnnntatccgcactagaaagttcatgaccaaccgactacttcagaggaaacaaatggtcattgacgtccttcaccctgggaannnnnnnnnncctaagacagaaattcgggaaaaactagccaaaatgtacaagaccacaccggatgtcatctttgtatttggattcagaactcattttggtggtggcaagacaactggctttggcatgatttatgactccctggattatgcaaagaaaaatgaacccaaacatagacttgcaagacatggcctgtatgagaagaaaaagacctcaagaaagcaacgaaaggaacgcaagaacagaatgaagaaagtcagggggactgcnnnnnnnnnnnnnnnnnnnnnnnnnnnnnnnnnnnnnnnnnnttggatcacagccgaaagagtaaaggtgctgcagtaaaggctacctgtgtccatt

SEQ ID NO: 7989 - DNA, 765 bp, Macaca Fascicularis
  misc_feature (1)...(765): n = A,T,C or G
caggcttgagtgtcattcacgctgccttactggcggcttcaccttccgcagctcggtccggcttcctcattctcacggcggcagccggcctgtttccctctgctctcgaggacccagcacgggcctcccagcttcgtctctgcctggccctggcagcgagggcggcatcttgggcgccgtgcgctcatgggtgcagacatggcactgacgtgtcctgagtgttgagttatggctgtgcagtggtgtccgtgggacccagaacagccctgcaagcattttcttaggattgtcttttaaatgaannnnnnnnnnnnnnnnnnnnnncactctccccttggactgtgtgtttgagtccgggttggctgagactgaaagtctgttacgggaaaagtcttttatttcattagatnnnnnnnnnncatgtctgtattttggacgaccatataattcattttgaagtgatttcttcagctcttacccttgtatgtgtaaatacgtggttttgcttatttctctagattttgaagatcttttcgatgatgatgacatccagtgagatgacctctggctgcaggcggggccaggcccttggtacagagtcgcggtgtgagcnnnnnnnnnnnnnnntcaggtggttttaaagaacnnnnnnnnnnnccttgaatttaggacctggttaaccaagaaagataaaaatgttcttcaccacctagatgaggctgttcgtctctgaacatgaccacggttgtgtcctcactccaataa

SEQ ID NO: 7990 - DNA, 701 bp, Macaca Fascicularis
  misc_feature (1)...(701): n = A,T,C or G
cttccagggagtctccccagccacatctttgagcatttacttggctcttgttcaaccttggtaactcgccattaccaacagggcacatctggattccttaacataatggagccctagctaatttcttcaagcaaacagttcttgttcttctatttattcccacccttgcactttgggtgttgatctcccgctatctttaaagcctctgctgaccagcataccctactccagcctcactgagcatttttgtgtaaggttagtggtgcagttcatttagcaataaatactgttgtaccttttgcagtagacaactattaactttcatcttgattctcaattttttnnnnnnnnnnnnnnnnnnnnnnnnnnttccccagcaacattgtaagattgagagtaggaactcagtgagattttaacaaattccatggattgtcttaagagctatctaaacttggaagaaaaataacttccaaagcatctaaaattgaaaataaaagatcagaagcaaaatgaaagatcaattccacacaactcttcctctctcagacttcccttttctgccatatcctgtaaacatctaaagtgttctgagtacnnnnnnnnnnnnnnnnnnnnnnnnnnnnnnnnnnnnnnnnnnnnnnnnccttgccagtaggatgtgcctgtcctttgcattttaacnnncatgttctgtgctc

SEQ ID NO: 7991 - DNA, 3121 bp, Macaca Fascicularis
tactcaggtttagtatgtaaaactgtactttaacaagatccccagtgatttatatacacattaatggtcttgaactcctgacctcaggtgatgagcccacctcggcctcccaaagtgctgggattacagccatgagccaccatgcttggcgtagtctagcttcttagctatgccaaaggtatctttatagctcataagtgttccaggacagttcatcatgagtagaaaccttctacagatttaggcttaaaactctagttagaaacaacagtgttcatacctggtttattatccatgtagatctctattaaatacttagcataatgacaggtgggtgaagggatcaggagcccggaacctggcaacaaaacacaaatgacatctctcagcagacttgagctccattatcttaagaatttgtttcaggttatatgataaatatcttgcaaggggtgttatattatgttaagtgggtatcaacatcttgcgttagtgaatgaccttagggctgctgttaacaggtggggagtggcagcatgatgttaatacagcacccaagaaaaagtacttaaccagagaatttaagaaggaattatttctctcattgggtcatctatagaattttgccctgattacagtttgtgtctaatctgctccaggaaagaacaaggtaacaggtacaatgaggtggactgctaattaaaacatagccttaaaatcattatccatactgtgagtgattacagtttacattgtattaaaattttaaaatccagaataagaagaaaggggttatgaactcagggttagagatatttttgtgtgtgttttagaggtatctttagctttttcttatttaaaatgaactcataatgaaacacagtcactttgaaaatttgatggtgtaatgcatgtagaagcacttggtaaactgaaaaagacagctcaaatattatatgtctacatacaaacagatactatttattctctcgccattctctcaatgcaggtcaaccctgattgtaacctaaaagcatgaaatgcaactctttctctctaggcttcttttgttatttatcaaaatttacaattgatgagaaaacgccccccccactccttacccaacttagcgtatctctctcctttcttcaattctgtcctcttgctctgcttatttcccagaccattctaaaaagttccctctcttcctttggcatttatatttttcaaatgcttgtagacagttttcatacgccacctcagttgttgctttgccaagctatacagatttagtccttttcatctttcctcataagtcactgcctccatctctttaatcatttttcttgctgttctctgaattccatccaatttgtcgatatctttctggtagagaggtgccaagaacggagtgtacagtgtggctaaggagccgtgtccatcacttctcagccagatgggatggttgttacttcagaggacacactgaatctatactgggggctgagataaaggaaaaggaaccagtaaatcttgagaaagtaattctataattcattgtccctagggatgataaaataagcatttaattaaaagatgtgtttctagttttgtgactagcagatgctattttggtgacaaaggcagaaaactgcatcatttaataagataagaaaacacaagagcataatgctgtaaatcagaccctttctcacatttggagaaacaattgtaaactatgaacaatattatcttgaaaatgcttttagttattttattcagtatgaaagcagacaggaaattcggatcaaataatttaaaacatttaatatatttcttgtaccatgctaatgcagataataaccaattcataaaatgtgcctcacaaaaaaaggataaattctgtaaatttatttttatttatagtttccatcaaagttttttaggttatgtttcaagatttaggtttaggtttacttgcaggatgagtgacagattaaagtatgaatattttttatgtaggcttttcacagttaatactcagaagcaagtattttctagtgtattagactgaagctgaatatagatatttcaccagatgctttattgaagctgagttttgttacagccctaatttatctttagtgttttgctttatgcttatgtttaaagttttactgtactcattgaactgtgcttgatcattaataatggcagctatctttaatgagatgcatgtcaccctctagcaggtggtatggtctaatagtctgaggattgagttatgattcagaaaggaaatatttcttatatgggactacaatgtagaatgagaaaactgcaagtatcttaaaaatggaatataacacttgaataggaaaatgaaaaaataaacaaatcaggtttcctgaataataatcatgccctcttagtcctgaaaggagaaatcacaattcacatattgctattatagaatctagcagaaacttggtcaataaagtgctgacatctttagttaagataacccatctgttactttgtgctagaaggaggagaagagaaatagttcctacaatgcatgtatgttttctagcattaaagctgcagagaaaataaatatgcatgcccttacttcttagaactccaagaacattactgagattctgttggtctacacactaccaatacttacactaatggtaattcttagatattggcctagtcagagtacaaagtttaattataaattcatattttctcattgatacctttatcctaaaattcaggttttgaaaatgggaaagtaaaatccagaaatataggcacaattaacaaagctatgtaattggattcataagaatgaaagtttgggtcttagcttatccagccatgtgaccttgggaagcactcttggttaatgcagtttcttaatggactaattatctacacacttctaattcccagggtagtcaggaatatctaaggggtaatagtaaggaaagtgctgtactgaaaggtactaataattccttattgtttttcattttgtggtaaaggtaatcatgtctctttacatgtctttcatcttcactctaaggtttactccaaaaaaaaaaaaaaa

SEQ ID NO: 7992 - DNA, 2272 bp, Macaca Fascicularis
cgatacttgctcaggtggcagatgcctttgtgttccttgctgacctgcctgggcctcaacatcttgttcctcactttgaatgagggtgcatggtactcagtaggtgccctgatgatttcagtgcccgccctgctgggctaccttcaggaggtttgccgggcacggctgcctgagtctgagctgatgcggaggaagtatcatagcgtgaggcaggaggacctgcagagagttcgcctgtctcgtcccgaggccgtggctgaggtgaagagcttcttgatccagctggaggccttcctgagccgcctgtgctgcacctgtgaagctgcctaccgtgtgctgcactgggagaaccccgtcgtgtcctcacagttctatggggctcttctgggcacggtctgcatgctgtatttgctgccactctgctgggtcctcacccttttaaacagcaccctctttctggggaatgtggagttcttccgagttgtgtctgagtacagggcatctctgcagcagaggatgaacccaaagcaggaagagcatgcctttgagagccctccaccaccagatgttggggggaagtgtggtctgatgcacagcacgcctcacaccgggcagcgtggaggaggctgaggaggctgagccagatgaggagtttaaagatgcgattgaggagacccacttggtggtgctggtcctgcagccttgcaagaggtgggcaggactggaaggagctgttcccacaggaggatgatgagggtgtcccgtgcccagcagaggacgagctggccctgcaggacaacgggttcctgagtaagaatgaggtgctgcgcagcaaggtgtctcggctcacggagcggctccgcaagcgctaccccaccaacaacttcggaaactgcacgggctgctcggccaccttctcagtgctgaagaagaggcggagctgcagtaactgtggaaacagcttctgctctcgatgctgctccttcaaggtccccaggtcctccatgggggccacagcccctgaagcccagagggagactgtgtttgtgtgtgcctcgtgtaaccagaccttgagcaagtgagaagagaggccagggtccaaccaggcacccatccttggggccagcagtaggcgccccactctccccaccccggccccctgtggtgtgtgctgggcaaatgtggcctgaatgctaggtaggcttccccttccttcctcgctctctccagctggattctggagctgttctccacccctgagagtggctggcaatggctgctctcaatcccttggggagaggagcccctggagggcctggcatgttgccctgctctgcctgggactgaatgagtggactcagggctgggcaggcagtagccaccagagggcagcagtgaactaggtcaggtctgactggggtctgatgaccagcgtcagtgtggctatgcctgagaattccagacctgaggttgggaaaagaggtttttctcctgtagggtactggccaggccctcagcctcagagagcctgcagaagggcttgggagtgccacaccccatctctgctgattgaatgtccttccaggcaccaggatctcatcatttcccccatcagagggtgtggccaggcctaacaagaccaggggtgcttctagaaacagggtttaagttcccagattcccccagaggagaatgtgtataggaggggttggctgagtccttcagcattaagtggaggaaagcatggggaagccccaacagctggacagacctcagcctcccctcgaagacgcctcaattcacagactcagcccacacgatgccctagtgtccccagctgcgctggagcagctggatcacagggcactcggatcacaacttctgcaccctctgcccagagtctggggcagtcctccactggcccagcgctccagcttcctttccctgcctcttgccccatggagtgggaggccaggtgagtggagcagaggtcctgaagcccttgacccctgggggcctgggaagtgtaggatctttctggactgggtcctggatcccggggctattccctggaggacagtcttagttatgggataaggtcccttgggggtctccatttcctttggtatcgtatcgcctctgtgtcctgttaggagagttcagtaccccgtgctttctttacactggagaggaactaaaaggatctctgtgtctatggagaattgtcaataaaaaggcctcaagcttcttgtttaaaaaaaaaaaaaaaaaa

SEQ ID NO: 7993 - DNA, 2305 bp, Macaca Fascicularis
agtagagatggtttatcgggcaatatatttctgagcagccttgccagtggaaatttcaagttatttgattcctctgaaataaatttttgtatacagtagttaaatggtgaacttgtagatttcaaagtgtacattcaggtttttcaaatcaagaagctgataaattagaaaactccatccatacagagtagctatctgattttttgtttatgatataatgagctggtttatcagtagagtgaaatacagatcacttcctggaacatgtgctcgttaactctatcagacgactccatgatcatggcaagatatttactaaaattctgggtctggttcatttttacatttcctttctgtctttcacaccagtattctcccagcctccctctatttgtcttccaaccagttttataatagttggagatatcagactggttctgttactccatagagagctgattgcccgctagagaatcatcagtgtatcaggtaaaagggccctggaatactaattagttgatttgcagtaggaatttctggggtgatacttttttgtcttaaagaattgataacacacctccaaagaggcagtaattttatttctttgttaaagtcagacttaactctttgttaaagtcagatttaatcctcctactttatgattccatgaatcttgtagatttaacttttttttttacattcagtttccaatttaagggtatcattcatacagaaataccactagtaagaatgctatttaaataatgctaaaactaaatctcagcataggaaatcatcagtccatccaacatatattcattaagtactatttacctggaattatttttaggtactaaggcagaaataaagatgggtaagtcagagtccctaccctgagtaggtcatgtccactgagtatttgttattgctcggttgtgacatgctatgcacaaggcattcattgttgtgtatctcagaactcacttcttgtttgtgggtataaagagttgaagatctaaccccttccctttctattaagggtcccaccttttctttaatctggttcataagttagttactttgtgcatatactctgtagttgtctgttttgaaaccatgtctgtgccccatcctttccaggacaaaggagaacacagttactctttgaaatcatgaagataccactcaattctatcaaattgtgtcattctcaacatttcagattattttttacactttgagaaaatgaaacatgaatagaataaaagattcttgacatggcagaattacactgatgaagagcatatgtgtgactgccaggggtgaatggaataaaagattcttgacatggcgaaattacactgatgaagaacatatgtatgactgccaggggtaacacaggtagtgatagaacaattctgtgtcctgattgtggtggtattacacaaatctctacatataaaatctcatagaaatagataccccccataatacggtcagccctctgtatctgtgggttctgcgtttgtgaactcaacaacctatggatcaaaaatattcagaaaaatattgtatctttactgaacacgtacagacttttccccgtcattgttctctacacactacaatataacaactattcacatagcatttacattttaagtaacctagaggtgatttaaagtacaggagaggactatgcatatgcatacattatatgcagatactgttccatttgatatggaggacttgagcctccagggattttggtatgtgcaggaggtcctgggtccagtcgctcacagatactgagggatgactgtatacacatatacaatatatagcatgtgagtatgtaacaacggatgaaattcgtaagggctgtagttttgttaatagtattgtatcagtgtcattttcctggttttgataatgtactatggttatgtaagatgttattgtttggggaagctgggtaaagggtacagggaaatgctctgtaatatttttgcaacttcttgtgagtctaaagttatttcaaaagaaaaaaaatttttaagggaagggaaaagtatcaagtatcataaaaccagataaatgtgaagttaaggtgtggtgactccaaacatcgggaatatctgaccttaagacacattattactgcagtaattagaaatgtcatggcttcacattaatcatgaatgacttaggctctggacagaatttaggacactgtagcatgctgtcttctcttcggggaataatgaaattcattccaggaagactctgacgttctgcaaaaaaa

SEQ ID NO: 7994 - DNA, 741 bp, Macaca Fascicularis
  misc_feature (1)...(741): n = A,T,C or G
cattgcagtgtgctccatcctagctnngaagcttccgctcagaggtcctggcgcctcggcacagctgccacgggctctcctgggcttnnnnnnnnnnnnnnnnnnnnnnnnnnnnnnnnnnnncccctgtagccgggcaagcaggagcaggtctctctgcnnnnnnnnnnnnnnnnnnnnnnnnnnnnnnnnnnnnnnnatgtgcttcattcccccctggttaatttttacacaccctaggaaacatttccannnnnnnnnnnnnnnnnnnnnnnnnnnnnnnnnnnnnnnnnnnnnnnnnnnnnnnnnnnnnnnnnnnnnnnnnnnntcacaggttcaatatttaannnnnnnnnnnnnnnnnnnnnnnnnnnnnnnnnnnnnnnnaaccttaggagaaaacttaaaaatatatgaatacatgcacaatacacagctacagacnnnnnnnnnnnnnnnnnnnnnnnnnnnnnnnnnnnnnnnnnnnnnnctcaccacaacggaacatgcagtactaaagcaatatatttgtgattccccatgtaattcttcaatgttaaacagtgcagtcctctttcaaaagctaagatgaccatgcgcnnnnnnnnnnnnnnnnnnnnnnnnnnnnacgccccctccacacactgtcccccagtatacgccgcattgtactgctgtgttatatgctacgtacatgtcagaaaccattagcattgcatgcaggtttcatattcttctaag

SEQ ID NO: 7995 - DNA, 316 bp, Macaca Fascicularis
  misc_feature (1)...(316): n = A,T,C or G
aaaaaagagataatgcctaggtaccagggagaaggagcgggccctcccgctccctgtgctggccggagcagcgttttccnnnnnnnnnnnnnnnnnnnnnnnnnnnnnnnnnnnnncagcactgaccacccctgatctccctcctcccaccctctgttccccaccccttcccttgctggccattcttggctcttagaagggaaatgttgagccaaagttatgcctgtaaagaccctagggtctcaaaaagaagtctcaagacggcattgcttaaggtgcttcgttccctgatccccttttgattgttccaaaaaaa

SEQ ID NO: 7996 - DNA, 1712 bp, Macaca Fascicularis
  misc_feature (1)...(1712): n = A,T,C or G
ttaacaccagtacactttgcctctcaacacttctgcatgcctgtgtccatctgtgtcattcatcagagctcaacatttgcttagtttcttttcttgagatgagttgttatatagtgaattgcacaatcttcagtgttaccatcctatgagtgttgatgaatgcaaacactgctaagcccagacccttccatgatatagaacatttgcctcccccagaagtttcttcatggcccttcctgctccatcccactcccacctggagctcccttggcctgcctagcgtaagcagaggcatcgtgcccttctctaaatgcccccactgctgggctccctggagagagaacacaggttacagagagtgtgatgcaatcagccagtgtgtggggcgatgctgggggtccttgagcaaggagggaaggcagctctgcacccccacccggacatccactggaaatctagctgaatgaccatcaagtcatgtgtgaaccatgggaggcctctgagcggggctctcctcccttcagaatataagaatttctacaatttccctcaacagcttctgatgtcccaagtccatggacagttctctgtgcaagatactggccaaagacaggttcacaggtatcagagatggagacacaaaaacaatgatgaggtgcctcaggagccttaaggtattccccctccccatctccaacatcttccccaagtcatccttgataaaaagaaaatccaggtaaaatcagcatgcgtacataataagtataaaacaattcctccaacccccactcccattcagctgctcatttctaaaaccctcctagaaagaaattctagagtcacctccgtgaaagacccttgctggtttttgagaccagagtatgaaaattccccaaaacaaaatacttcatattaggcagacaatattaatgatgaaagctgatgggttcttcctatagtgaatttcatattctataagttgtcatccatatagatgcttgcttcattcattcatttcttcattcattcattcatttctacatgttaaacacacaggaatgctctttgtttaaaaaaaatgcccctgagatttgtctttaaagatacaactctctgggtctaggttttgtcatcctcttttgataggcagtagatacaataaatatttcatttccctcttagttataacacaagtgtgatgcctcatgacagaggacaagtggtggcggcacagcttagtgaaagccactacagagtggtgagaagtgcagtgaaccagagcttgtgtgtctgtccagggaagcagctgctacccacacccagacggttgctgccgctggagtattcagtccagtagtgctacatcttcttctgtttatttttcccacaagagaaaccagaagtaaagatagtttatgggccaggcatgnnnnnnnnnnnnnnnnnnnnnnnnnnnnnnnnnnnnnnnnnnnnnnnnnnnnnnnnnnnnnnnnnnnntgggaccaaacatggcaaaaccctgtctctactaaaaataccaaaaatcatccagacatagtggtgtgtgtatctgtgatnnnnnnnnnnnnnnnnnnnnnnnnnnnnnnnnnnnnnnnnnnnnnnnnnnnnnnnnnnnnnnnnnnnnnnnnnnnnnnnnnnnnnnnnnnnnnnnnnnnnnnnnnnnnnnnnnnnnncaaaaaaaaaaaaaaaaa

SEQ ID NO: 7997 - DNA, 437 bp, Macaca Fascicularis
  misc_feature (1)...(437): n = A,T,C or G
gaaaccacangagttaagtgaccttaggtaacataatggtgatggttggcgatttgagcctttgtaacctaggaaacacaaaggtctgattcagattgtgtgggggatttttaacatatttgaaactcagggggaagatgattaataacacaaactgttagctacacatgaaggtttacttgagcttttgtgattcaaagctcaggggtggtaaggactctaaaaccagggaagagggagaattaatatattgtgcaaatgctggtatttcttacgtgactgtttgcctttgttgctagatgaacagaaactaacaatagctctatttctctgccaatataaaatctacctttcatataatgctacattgaaggcacagaatttgctagcatctctctctccccctacctacctatctatctacaatttaaataaag

SEQ ID NO: 7998 - DNA, 615 bp, Macaca Fascicularis
tgtcatattgcaaacccagagtgatctggtattcctttatcatatatacatatactatatttagttttacaactttatgaagtaaactttttacaactttataaacaactttatgaagtaatagtacttccccttactgatgatactttctcttcaattatctgctattctatttttttgatgttgcttgtaactcactaaaccaacttcatcactcactagtgtgttgtaacccacagtttgtaaaactcacaagagtgtgcaagtgagatactgattctgtctacacagaggtgaagggatattttggcaaataataagatggacctggcagtaatgaatgagctggtggaggcctatagctatagcaagatctgtggcccattcatttggcaaaactgaagggagttcaaaacgcttcctctctcctatagagtcagcacgaatggacctgtctaatgcccatctgttgttctgtctgctcagcattacccctgttcttatagagaagagcatgtgcttcttttggtacgtgctcttcctacccagcccccatttccacactcccccgccccagctccacccgtgaggttcatatggaaactcccatatgtt

SEQ ID NO: 7999 - DNA, 2363 bp, Macaca Fascicularis
agttttgcttttctctaagactatcaaaggcaaggtattaatagtaggattatttctagatcagaatatttcataccttcctgaaggtttatgtgaaaattggcttaggaaaacttggagtagcagagactgaggatgagtgctagagatgaaatcaggacagatttgttgcagttaattcttgtcaagcaaattggtggtaaatgtcacattgttatgtgaattgagtacatatttttaaagaaagtttgaaaaaaattttagaaccagctatgaggctatactgtatcactgggggctggaagtaggggcttagaatcatactgaagaagaagcccaggtagtttctgtcctcaggtgaataacggactatgtaactttcccgaaaggtaaaacaatagccactgcaaagacgaggtgtcttacttccaccaaatacactttctgagatggttgtagggctagtatttttaccatggtttaaaaagtagtcagttacatagaaagtgtattggtatgtatttgaacctgctcttcattaaacaaacagattagatgtaccctcaactggcaataattgtatctattttcaagtacagctagctgtcaaagcatgaagctcttgtgtatacacactgacacttggttcacgcatgaagaacagtgcctatgcactttgtgtagctataatgtagggatctaggtgtaatttcagtgaaatggtgtatagatgtattgtaatttaatgtatatgttatttttggctattcatctaaatgcagtagacatgttgatcggtgttttgcaaatccttcttttccttcttagataactagtcgtgaatcatttctcctctttctcaatgtggtttgggaatatatatgagtgaagaatttatctgtgaatcctttgtactgataattgtttgaaagtctgtgtgtgtccagcacctttgtaaatacacaattcagagcagggatgggctgggtgtgtgtcctggttcttagtgaaaggtcatctcatgtctgtataatacatggtgaatacaactgtggaacttttggttacctagacttaggtaggtttagaatgagaatgtccatctacagtcctttgcttggtggattgggctcagagagacaaaaagttagtctgcccctgtgcatattagcatcatgtctttagagaaaggtcagtctctctggttgccaaatactcctcatgatgctcatgacttaaaggttctgaagagccttgtcgcccttgaatttttgagtcagggtacaggaaaaacattgctgactaactaactgcaaacgaacatgcaggtgaaaccccacaaaagcacagttctggctataaacttcacagttctctgtaaaacaatgtagaacactagaagcacaggaatagtcagtgtacagcttagggggttgtagaggagcaactgatgaagcacaggtcccacatatatgagggagtatgacctcctctacctaatacgttctgtgtgcatgttttgaattattgaagatggtattaactgttgcaaatatacacttgcctcctaaaacatacattctgtataattgtcactaaatacaatgctgtgaggtctataatttctgtaacccctttctcctccccaaggacagaaaagaactagtcactgctatagggaaccctgagtgccctactcttttcccaagaagggtaaagcctacaatatcatcagggggcatgaagcacattaatttgcagtggcttcttcatatgaagagatatggtggacaggctaatttttccttgaaaatgtgactttttcaactcctttcaaatttaggatggaatacttcctgaaataaaactgggctttatgcaggattctctttgaaaattcttgtatgtccagaatgaaagataaaaataattgtattcctcacattcacaatccccgttggtctgaagtcatgtagcacagagcatctatagcacatagtgtttaaagactaatgaatgcaaaaagataaattcttcagctaatttttgaattgtttctcatatatggtactagaaaaatgccttgttgatgaagcacattttgggtagttgaggtcttttgcttttgcctttagctttctaagctttcttacaatgtggactgattactgtaacatttcatgtgtaaaataactggatattctttatatactggaaataacctgtgaatccaatatttcactaagtgtttaaactttcgtgtatatatctttcatcaataaatgtggatttcaatttaaaaaaaaaaaaaaaaaaaaaaaaaaaaaaaaaaaaaaaaaaaaaaaaaaaaaaaaaaaaaaaaa

SEQ ID NO: 8000 - DNA, 320 bp, Macaca Fascicularis
  misc_feature (1)...(320): n = A,T,C or G
aaagacaannnncnnncannnncattgcacttctangnataagggtgtccaaacaaatacataataaactgtgaacaccataaattatacaaatttcttgatttttccatagatatgaaatacataatacatatttttaatagacccatacttcattattaaaaggtttattttatcatttcaggacagagaaagtggatgaagttattaaagaatgggaaggttctttctttaaagataaccctcgattgaggaaaaaatctgtttctcttcgatttgatcttcatttagcagccactgatgaagggtgttacagacta

SEQ ID NO: 8001 - DNA, 775 bp, Macaca Fascicularis
  misc_feature (1)...(775): n = A,T,C or G
ctggcatagagaaaaaaatagatttaggaatacataccttcacgcagtacatgaaagaaacacctaactgttgtgacatcaaatatgttaaagcgtcttcataacttaattttagcaatatcaaaatgcaatgtgtaaatctggttaataattagaggggatgccagcatgcacacagctcctcaaagatagccagttaagatggtgtataatagaaaaatcatttctatttttggaatggtttatataatttttcaacagaaaattacaggattagaaggaacctaaagggataatatggtccagtaccctgatgtcaataaatgagtggctattcttcccgatatgctcttttcataaaattgttgcagaaatgaaaattgcttgccttctctttttgccattccattatnnnnnnnnnnnnnnnnnnnnnnnnnnnnnnnnnnttattactacgtttagtttctttgttgaaatagataagttacagttagtatcttttaaattaaacattttttgagtaccagtccttactctagtttcttggtatcatatccttcagctttctctcaaaaggtattttcattattatcaatgcttttcctatcattctgggtacttcgttaagtttatcttcatttctctaagaagtgtaagttgtagtggaaggatttagtattctcgtggtttttatttgcctgtcctgcctttgagagcagtacactcctttatttctgaatactctgcatccgagccccttgtctggcatgtagaa

SEQ ID NO: 8002 - DNA, 694 bp, Macaca Fascicularis
cacagaagaggcaaacgagactcaaagaggcacctcagttggacgtgccccagatgaacggtatggagatggtgtcagaatttgggtccctgcagccaggccccagactgcctcttctggttggagggtggtttctgtccctatcgcgtctccttgttttgttcagtttcctcagagtttgtattctgaacctttcccctctgcctgctaggtcagaaggatcgtcgcccaactggcttcaagccctgaaactgaagaagaagaaggtctgagaagtcactgaggttcttcccacctggcagtctcaggcagtgcccattcctgtggggtccctgggtgaggagatggctggagccccaccatgccccaggctgcagcctctgtccccctccacctctgaggagcatctggggaggcacatttatgcactttgtatcaccttcccaacaccccccacaccttcccttccctggatttcgtcactagtggttgaaggttttatcccttcctctccttccctctccctctctgcttccttctccagcctcccttgggttttcttttgataccaatttatagcattttttataaaagcctttgatttttataatgggtgggactgtacccctgcctcaccccaggtctccctctgccccgccaggtaccccacagagaccaatgacatttgccactg

SEQ ID NO: 8003 - DNA, 673 bp, Macaca Fascicularis
  misc_feature (1)...(673): n = A,T,C or G
tgaacatnnntgagagaagaattcacttannnnagctttagagaatnnnnnnnnnnnnnnnntataatagagtnnnnnnnnnnnnacaacnnnnnnnnnnnnctagagcgtgattgctaaaannnnnnnnnnnnnnnnnnnncaaggtccatgttnnnnnnnnnnnnnnnnnnnnnncgtaaaataaaagcatttaaaatagtttacagatatttttgaccagttcattttagagattatnnnnnnnnnnnnnnnnnnnnnnnnnnnnntattgttgnnnnnnnnnnnnnnnnngctttctttccnnnnnnnnnnnnnnnnnnnnnnnnnnnnnnnnnnnnnnnnnnnnnnnnttgtggcaggagagattaaggtaattacaacactcagttctatgtcttacaagcactttgttttgtctctgcaagaaaatacgattccagtcatttcccataaaatacagacattctaccaacataatatgctttgattgatgcagcattatgctttgggcagtattacaannnnnnnnnnnnnnnnnttctgtatttaaatattgtaaaaagaaaataagttataactgttataaagcagaacttttgttgcattttttaaannnnnnnnntcactttgtatgtttatttggtcaatgtttctgcagtatttataaaac

SEQ ID NO: 8004 - DNA, 766 bp, Macaca Fascicularis
  misc_feature (1)...(766): n = A,T,C or G
ggcagtgcctngnnngnnnnnngagatgctgnngnnnngatggcagctcttccgtggacagggtgcaagtgcatccttgccaagtgtgccagcccggggcagnnnntgcctctggggctctgtggtgtaggctgtcttaccacggctttggctgccctgccccaaagccatctggcttggatctgaaggtctgagctggcagcgaggacccccagctctcactggactctgtgggctccccctgttccacaggtagactgttgtgggctctttttgcctgggcctcttctgaggcaggagctttcttgagggannnnnnnnnnnnnnnnnnnnnnnnnnnnnnnnnnnnnnnnnnnnnnnnnnnnnnnngagaagggccctctggcctcctgccggtacagggaaggcaccagctagagcctcccttgtggtgtgagatgttcctggaactcagccaggcnnnnnnnnnnnnnnnnnnnnnnnnnnnnnnnnnnnnnnnnnnnnnnnnnnnnnnnnnnnnnnnnnnnnnnggtggacagtggcctcctcagcttcctccccatnnnnnnnnnnnnnnnnnnnnnnnnggagctgtggcgatgctgggccgtggggagggacgannnnnnnnnnnnnnnnnnnnctgctcatnnnnnnnnnnnnacagctcagggggcgtgcagtggaggtgacaaggaatccatcacaactagcagagatttctttggtcctcctccactcccactgcttcactgnctaagctaaa

SEQ ID NO: 8005 - DNA, 755 bp, Macaca Fascicularis
  misc_feature (1)...(755): n = A,T,C or G
aagcaataatggcataagattctgtgatacaaggcatttttggcaagggaagttgccaacatttttctggctgggatggcatagcannnnnnnnnnnnnnnnnnnntcattcataagnnnnnnnnnnnnnnnnnnnnnnnnctgggttatgtagaaacagctctggggggggttgatacaacatacttaatggggcttctgtgtagaagagactgaatcctcaacactgccccttttgaggatctgtgatcctggaacctctctgatggactgggatacccttgactgaggtctgctgtctggaaaggacaccacaggcccagaatgaaggggcatctggaccaatgacctagattcaacacagggcttggagctggtggtacagtctggttttggcccaatgtatgttggaggctggaagcccctgaagacctaaactgcctggatgagctcattagggtgcattaaagagtctgtaatttgggaaccttattgtgcagcaccacttaaggggagggacttggcctggcccagcaagtgatcactctagaattggacaagtatacactagactgcaccagnnnnnnnnnnnnnnngacaccttgtggtaacaactgtagacgccccatcaggcttgatgggagactagaaacagactttnnnnnnnnnnnnnnnnnnnnnnnnnnnnnnnnnnnnnnnnnnnnnnnaaaagacacttcaagtnnnnnnnnnnnacttcttgaaaatctaggcct

SEQ ID NO: 8006 - DNA, 702 bp, Macaca Fascicularis
  misc_feature (1)...(702): n = A,T,C or G
cagagacgcaactgacacaatnntgaggcccccaggtaagcctggcgctacgggatggagacgttacctggttttgaaaggcccagctaaaccagcgagacccgcgtgcgctccgcggggaagcaagcctccccaggggcgcacctggaagcgctcccgccccctggtccttatctctgaatcgaaaccgaacctggacccatctagataattggactgagcaattaaggacgcttcactctcaactgttagcattttttcctaaggctctcggaggcggaatcagctgnnnnnnnnnnnnnnnnnnnnnnnatttcaggcacctgtgaactgagcctactcaacaatcggcccttactcttaaccaaactcagcaaaggaagaaagaccaagttgctgaggatgcacagagccacgtgggtgcggtcctttagaaacaggaattctgagtcagtagatatggaaatgttatggtttgcagtcttcagaacatgctgcttttatgccgttcacatgattctccttggactgcgacgtgaagtccaagaaacaagtcgaatgtttgtatattaatagaaaaaacatctgtaagggtgcacaccgactgttaaccacggtttcgcgggtaggggaaacaagggagttacatttttttactacattgactttggattttgtatttttccagttgtatttacttca

SEQ ID NO: 8007 - DNA, 706 bp, Macaca Fascicularis
  misc_feature (1)...(706): n = A,T,C or G
gccaagagtgctgcagactcttcattgctacctccaaaactaagactgttcacttggtggttgttctgaggcaaggattatagagtcggaaactgtagactaggaggagtctcctaattaattccttcatctttcaggtgaaggaaatgatccatgcaagagatccctaatctcacctgtacactgtgnnnnnnnnnnnnnnnnnnnnnnnnnnnnnnntgctgaatccaggtctgagatcacaatcccacctgaggacaggatccacataggagagtcacaaattggcataattgatttgtggtagagctgagattagaatccaaattcctagtctagtaccttcccactgtaccacattatgtctgcagaggggaaaaaggagcagctcttaagaaatagaatactaagggcccccgtgactgtgtggccctgggcatcctcagtttcctcatttggtaaattgggataatagtacctacctcttaggcttcgtgtgaggatgaaatgagatagggaatataaagaaagcagatagtggctggcacatagtacannnnnnnnnnnnnnnnctagttaaggaattataaaaacaaatgagttcttccttctcaaaaatactgaatttcttttccttgtactctgtgaaacactggacagccccatttagagaaacaaattctctgccctcagagaatcctaattg

SEQ ID NO: 8008 - DNA, 756 bp, Macaca Fascicularis
  misc_feature (1)...(756): n = A,T,C or G
catccagggagattgaaagccatgggtnnncntctagagttgatactgataacaagttttaatttttattgatatttaataccttctaagacagaaggataagatcagatgggaagtgcctctgttgaaggatcttaggaaccttggtttttgttttttttctggttgannnnnnnnnnnnnnnnnnnnnnnnnnnnnnnnncactctgaggatttgtttaactaaaaagtttccagacacagaaagggcctccccacctgctttgagaagctgtctgtgctgggagtnnnnnnnnnnnnnngggccccatcactgccagtgtctgtgcctcccagcggtcagccctgcgtctgccctggccctgtctcctctgtgacagggcagagcatttctggtcagtttccccatggtgtcccccgcccctttgtaaagtggatggacatgacggaattcagttgtctcaccctgacagcctgggtgttaatattcacttttcccgcactcagacacgggcgaccttgaagcagctctcggtttgtagagtccacgtcacagtccccatggcctccccagataggtgtgtgcctgtgnnnnnnnnnnnnnnnnnntctccaacttggcgtttcactaaatgcagctgatctctgtgcactcgtgatccgtgttgaacaatacatgtaggttctttttccatgtaatgtaagaacatgatatactgtacattggaaagcatttaccttatttatatatctgaa

SEQ ID NO: 8009 - DNA, 1216 bp, Macaca Fascicularis
  misc_feature (1)...(1216): n = A,T,C or G
gtataggcataggaacaaagcagatgcttgcagaaagaatgcttgantcttgagtctccctagcagtgaaaagtgagcagaggcccctagaaaccctcctctgaatcctcctaattccttaagatagatgcaaaatggtaagccgaggcatcgggccaaagctggtgcgatgcttcagggaaaatggaaaccccaaccaaaaataatgattgattctggttccaaaaggtgtcacctgcctgtttcagaaaagttagactttccattgccnnnnnnnnnnnnnnnnnnnnnnnnnnnnnnnnnnnnnnnnnnnnnnnnnnccacacagggggcgtgggagcnnnnnnnnnnttcctggaaagcaagaagggggcacaggtgtccctgattaagcaggaaccagcacccttggcatccctggcaggctccctgctgtcagccacacacctgccccctcacaccaagctgacctcagagttggtcgtcttccttatgggacaaaaccagttgaccagaaaatgggcagagagagaggacctcggaagcattaaaacagatggtgtcagggtttcaagaagtcttagggcttccagggnnnnnnnnnnnnnnnnagaatatttatgggttttttttttcaagtgtcaattatatggtagattgaggatatttttttctgcagctcaaaggtggagggagtttattagttaaccgaatagcgttgagaggaatttaaaatactgttactaccaaagaattttattaataaagccttctattttggtaacacttctctatatttttactcataggaatgtcactgttggacaattattttaaaagtgtataaaccaagtctcataaatgatatgagtgatctaaatttgcagcaatgatactaaacaactctctgaaatttctcgagcaccaagagaaacatcattttagcaaaggccaagaggaaaaacagaaatatatttgtctcgaacacatcattgatgtgatgttgacattccctttaatctgccaactgtgatcaaagttcataggtgtcatagatttccattatttgctaaaatcatgcaatctgatgcttctcttttctcttgtacagtaagtagtttgaaatgagttttgtatataaatactgtattaaaaattaggcgattaccaaaaatccttttatggaaaccgttttttaaaaaagtgaatgtacaca

SEQ ID NO: 8010 - DNA, 219 bp, Macaca Fascicularis
acctgtgctgtgtttaggtaaatgtttttgcagaatgtggaagatcaacccatgtattatttgcccctgcccaaacgtaaagattaaggagaaaattaagcaatattaagagtgaggcaagagagaaaagaaacctagctttggagttccatctggttttcaatacgagtttcaagcaagttggaatgagttaggtccctcaggtgtggaaacctgttt

SEQ ID NO: 8011 - DNA, 1826 bp, Macaca Fascicularis
caatttacccagtgtgtggtattctgttatagccacagaaaatgaactaaaacactagatgagggcaatgttcatctatttgggagactaggggtggcagaggggaaactaaagtcacgcagaatcagaatatagtacagaggcctactaaaagattccagggtgggaaaggaataccttgatatggatgttaagtatatcagatgttactggatagaacaaccactcctgcacatggtccttcaaacgctacttgaacaccccaggaaaggggaattcactactattagtttagactgattattatccccataagcaatatgaccaagtaaaaccaaaacagctgtgcctgccaagatgagcaggatgtaaaaacaaaagggaaacagaaaagaggtacttcaggatcctaaacaacttcatgttaccagaaggtcatgggcatgctacaaaaaggcagctagctgttttgggataccaggtgcccaagagactgctctaattttagaaataacacagtgcttactaaagaggtccaggactcatgggtctggaatgcaacgttctttcaccctcaggccgtgcatactcatattctgttgttgattctgctccaattattttctgatattgagggagggaggaccagaccacagaactggtatgtgcctaaggaatctgccaagaattattaaatgataacttaaataatacattatttaaatttacagagagttgtaaatttacagagttggtgatggccactgtctgataggctgagttcattttcacagtggccttgtgctgatatcctctgactctccagatccatcctctgcccttccctgccagtcctttgccctaggaggctgacctcctaggctggaggcatcccctgagccgccaattgcatcttgcggttgtgttcagccaacggggagcaccagcagatcagagtgaagagagaaaggttaaggtacttcttctctgtgctctgtctgagtctgtggccctgccttctctgttctatattttgcagcacaattttctgtccttgtcctgttgggcctaggagtgctgctgacatctgctttccgggtgtcttaccaccccttgtttttacccttaacactcgtacttctgaaacagaccttcattaaggtcatctatttgaaccaagtgggaatgacttctatttcctaacagactccttgttactattatatcttgccctgctaacaacattccttctgtctctcccaattattatcaagcctggaaagaagcaaaccccatgttactatcttagcattaggggacctgataccctcatctgggtcccctgtaaacaaaaaacaattccctggaattttaagcctctgtgaatcagtatttattccattagctccttttataagctagactgttgcttggaatcagaacttgtttggttcctgagcttttcctgcatcaatgtgaaatatgcagtctttgtgacctggtgggataggggcacattcaacctatagcatataggatcctagtttaattttgaacagtggtcctctgagttcttacctcaaagccctagctaataaataagctttcttgtccatgagcaggaacttaaaagattgcttttaaagtgagaaatggggagatgccaaagggtggaaagtttcagttttcaagacggataaatgctggagatcaaatgtattgcaatgtgactatagttaacaatactctattgcatacttgaaatttgctaaaaggaacgattttaagtatttgttatcaccaaaaaaaaaaaaaaaaaaaaaaaa

SEQ ID NO: 8012 - DNA, 1821 bp, Macaca Fascicularis
tactttcagacaaacggggaatttcctaaaattagtctggctcattttgactattttcctaagtacaatatcatgtatatagtcattttttatttatttaaaggtatatattcacttttgtggatgctttatccgtaaaatttataggccactacattatacaatagatcatctagtctaattttcaatgggttatgctgagtccattcaattccatttcaacatttttttcaaatacaattttatataattttctgagattagacagaactcctttgactgtttaatattgtggaaggaaattgaataatttatttatattgtgccaatgaaaaccacgataggatatttatttagaaataagacttaaaaaaataacaacccaaacaaaaatgcttggataaacacaatttctctttcagagttcctgcttcattagataaagtgaaatgttgaactggatttgaataaataaacagtaggcagaacatagaagctgaaagattgcacataattgttttaactgtttgctttaatagaactggtgtaactgtaggagcatgttcctttttggcttgtggattgtagattttgcaaagagctcaaagcttcagaagacaggcttgagcctgtgtccatagctttccaagttaacactaactgtagtacaaccttcttacctcagataaatcatatctgcctattatctagaacactactgctgcagatttttttttttttttttttagatttaaaaacctagtccgaaataaataaacatttacatgggcttcactttcctccccacgggcaggagtcactgcatgcataaaatgtacaagagcagaagatgccgacagaaccattttctttaactctcctttataactgagtttgctgattgatgtgatgcaagggattttatttagaagtaaaagcactgaaactgaaccggaggaaattgccaaaagtcccagaatggctttgacagaattgccatttctgaagaacagctgaaattcatttttcatatctttgagagtgagctcaatgaaaaccgtattttgtaaagggattctgtaaaccttcttccaagcacaaataattccaaacaggaaggttctggggcggggggttatgtgggtgtgtgcatgtgtgttcttccctctaaaattaatttattttctctatctattggaatgccctgtaaggcctttctttaacacacactgactttttgaagaatgatcttcagaatgataacttgctattttatggtgactctgtggttaggcttatttacagttaatctaaaatattcataaagcaccacttattaatcatccttttggatctttcaaacaaaacttaaaagtgtcttcaaaaatgttatggctttgtttgtaattcaggtatattaaaatgttgttttgaaatacagtttatcttaaagaaaatttgacagtaactatattaatggggacgttaagtaatatatttttgattaatggtgtaccattgagagaataagaaatggaagtctattattttattctttaaatgtgctgtttaaatatatttccatattttaaaataaaacagatgctaatttctgctgttcttgatttggttctttatttaaaaggaatacaaaatgtaagtatgtcataaattgagactataagaatatttatcaaatgcaaagtgtggatcacatgattctttgttattcttaattgctaaaattgttttttgtgttgttaataattatctcactattaaatgtgcaaagcaacaatccatgaaaaaaaaaaaaaaaaa

SEQ ID NO: 8013 - DNA, 783 bp, Macaca Fascicularis
  misc_feature (1)...(783): n = A,T,C or G
tcactgcnnnnnctnnctgnntcaaagaccagaaagaaattattgataccaatggagctggagatgcatttgttggaggtnnnctgtcnnnnnnnnnnnnnnnnnnnnnnnngactgaatgtatccgtgctggccacnnnnnnnnnnnnnnnnnnnnnnnnnnnnnnnnnnncacctttcctgagaagccagatttccactgatggaagagccaaaagcacaagcccaggannnnnnnnnctgccctgattgcttcctgagaattcccatattaataaagaagaaaattatctgccattttttcctactataataatgctgaatcttaatttagagggtacaagggtacggtaatgcttgtagaatctttattatctcaacaatctaaaaaatgatgtttatttccatagtttgatagtgccacttaaatgccaattaaacaaaactataacatttcaatataaatttttatttcattttcaattactttgtaaattcatgtgtatttagtacactgattctttttttacatttctgctttgaatgcagatgcaatttaatataatagattttttaatgaattaatcttaacatagtaatctttagctttttatacaaatatatttaatttaggagtatatgtgtgtctatacacacacatacataaatataccacatatatacctgatagtcaaataaggtacagaaattttatcttgtcaaattatgccaaataatctctttaatggcactcaaacatgtaataaactttggataattaaa

SEQ ID NO: 8014 - DNA, 734 bp, Macaca Fascicularis
  misc_feature (1)...(734): n = A,T,C or G
agntnnnatggcttggaaaaaaaaaaatcacatattcattgcatgattaaacttgtccattagattgtgattttgcacgttataaggattataactggggtaattttaaaatgttggtatttggatagaannnnnnnnccaggattttgataaaaatcaaaatatatattgtatctaaagtttctttttaaaaagttattatttcacttataatcaaaaggtttaaataagtttagtgtatattttatgattattattattttgtatctattcagagataggaaaactgcattcccatagaaagggagacatggtgcattaatattccaaagcttagtttaagctggtgatgattagaaaagtggctttcatttgtgttctctagaagattctcagtagtcctgtgggcatgtgaacaacagcatgtataatctccataatgaatgtcttgttagcagaaatgtctgaggcattgctgagatgcagaatgagctgaggtactgattttgtctttcatggctccctattatnnnnnnnnnnnnnnnnagctnnnnnnnnnnnnnnnnagtttttcttggatattaatgctattaatagtaacagtttccattatggagccttagtaggttcttgacatacattaacccattgctattacttatgtaattttctaataaaacttgatgtgataaaatatattttctgtaatatactcatagaatatatggttataa

SEQ ID NO: 8015 - DNA, 461 bp, Macaca Fascicularis
  misc_feature (1)...(461): n = A,T,C or G
aaaagtatatgattggacagggccgaagaggtgtcttcagagaggaataggaccccttccccccaagtcccccctgcaggccaagatctttgctaaaggccattccctccacagggcatttggcatcgggtgggaggggaaaacgcatcttgttaattatttttaatattatttattgtacatacctggggcagggggctggggaggtggagaggggagaagggtcccctctatctgcccctcccactccttttctacggcgatttgtctgtgtctggcccccacccgctgcccccccccttgttgtctggatgtggttctattttttatcggtctcctttcccctcctccctgttctcgccccctccaccccaccccctgctcccaccaccctttgtctcttgctctttcttgggcttctgtacaactcaacttgtatacactnnnacacacaaccagcc

SEQ ID NO: 8016 - DNA, 735 bp, Macaca Fascicularis
atatataacatcatatttgaccttggtgtcttacacaagtgttgctaactcaatagtgaaggagacaccattaaattttctgaacccatgagaggtactggagatggggagtggaaagtgtttggttcagggatatctgaagaacagaagggcagagatttcttaagtgacgcctcatctacaagctggaaatccctaataacaagtaaaaagcttataaataacaggtgatacactcaactcactggttttagtaaattaccaacacaaaaagtattcaagttctataataagctgcactggtcttaaaaacaagtggaaaatttgaacggattagtcatactcctatgattacattgttcattacaatctttttctcagtaaacagaaataactaatttttttgttcttcattctttgataaaaattaaaatcttattctgtgaggattacagaatactataactcaaattatgaagtagaataaactctttaaataattattctttatcacaaagtgtaaagaaaaagatacaagaaaacaatttatttttaaaatttaatatactaaacgctcaaatatgttctaccatagaataagttcttatcttaatttacagggtactaaaaacaattttaaaatgcttaatgttaccttttatattttaattggataagaatatatatttgtttaatgcaaatcagaatcactatattaaaatgaaggttcttgaa

SEQ ID NO: 8017 - DNA, 1782 bp, Macaca Fascicularis
  misc_feature (1)...(1782): n = A,T,C or G
gttacatagtgctgactttttttgtttaaattaaacagattggtaacctaatttgtggcctcctgacttttaaggaaaacgtgtgcagccattacacacagccnaaagctgtcgagagattgactcagcattgnnntcattccttaaaattaaaaacctacaaaagttggtgtaaatttgtatatgttatttaccttcagatctaaatggtaatctgaacccaaatttgtataaagacttttcaggtgaaaagacttgattttttgaaaggattgtttatcaaacacaattctaatctcttctcttatgtatttttgtgcactaggcgcagttgtgtagcagttgagtaatgctggttagctgttaaggtggcgtgttgcagtgcagagtgcttggctgtttcctgttttctcccgattgctcctgtgtaaagatgccttgtcgtgcagaaacaaatggctgtccagtttattaaaatgcctgacaactgcacttccagtcacccgggccttgcatataaataacggagcatacagtgagcacatctagctgatgataaatacaccttttttccctcttacccctaaaaatggtaaatctgatcatatctacatgtatgaacttaacatggaaaatgttaaggaagcaaatggttgtaactttgtaagtacttataacatggtgtatctttttgctgatgaatattctgtattataaccattgtttctgtagtttaattaaaacattttcttggtgttagcttttctcagaatatgtcctggtcttttcttcccccatttatttgaaggaactatgcaattttgnnnnnnnnnnnnnnnnnnnnnnnnnnaagtggactgtttagtgcctatcatttcctaagttaaagtggaaatgccagttgaacacctaaaagcaatgctttaatgtggcacttttcttgaggttgtgatacctccttctcaacctaatttatatcctatttaatgacaaaggaacaatccaagtacttgtaatatgtattttaatttttgtttcatatgagttaaagtgttgtctaggtgacatcaaaatctgatgcaaacagacttgaccatcttcagacccactgcattctcaagctgaagtggtctgctcatagtttgtgtgccaggnnnnnnnnnnnnnnnnnnnnnnnnnnnnnnnnggttgtaggtgtaattnnnnnnnnnnnnnntgnnnnnnnnnnnnnnnnnnnnnnnnnnnnnnnnnttcctggaagggcagattctgctatatcttnnnnnnnnnnnnnnnnnnnntccagaggaatatggacacatttcatatcccatttgtagagtaaagcttcaagtgaccagtcagcactaaaaaaaaaataagtagnnnnnnnnnnnnncttggggttcttgtgcatcaaaaaatatattgtagttaaaatgtcttcaannnnnnnnnnnnnnnnnnnnnnnnnnnnnnnnnnnnnnntatcttgtnnnnnnnnnnnnnnnnnnnnnnnnnnnnnnnnnnnnnnnnnnnnnnnnnnnnnnnnnnnnnnnnnnnnnnnnnnnnnnnnnnnnnnnnnnnnnnnnnnnnccagacagtgagnnnnnnnnnngctgtctgacagtattacttctgcaccacatttggcagccannnnnnnnnnnnnnnnnnnnnnnnnnnnnnnnnnnnngatggccttgcctggcagnnatcttctgtgaaaccaaaggtactgggccaggaccacagcacagggccaaacatacattccatact

SEQ ID NO: 8018 - DNA, 1807 bp, Macaca Fascicularis
gctatgtaaatacaacttcgggggtcccaaggagacctagggtgctactgaccccacgggactgcagacaggaatggggaggggagaagaagagccagggtatcaactgtctaagccaagcctcctgtacaattgccggaaaaaagaaccacaagagaaggcaagttctgaactgcagctgcctcccaagagtcaggatcctgtaccttccacgacctgtagaacatcaactttgagtcacaaggacatgagtattcaaataaatacatggcatggtacatgttggggaaatggtagctacagagtcttcagagtagatccaggtaaaggattgtggttcatttcccctgcgtcaccctgtccccctgtctcatatccagggttgcttttttttttcctgaaggagaattttttaaaaaggaagaaagaatggaagaaaggaaaaaggctttgatgtgaatgaaataacatcccattctcaggcattaatcagaatcaatacagtagacctcccttaaccatgagagacacgttccaagaccatggatcagcggatcatgcccagtagatgcctgaaactgcaaatagtaccaaaccccacgtatcggatatcttttcctatacatacatatctatgatgaagtttaaacacagaaagagattaacaagaataacaaatagtaaaatagaacaattataacaatatgccagcaccactactcttgtgctgtggggtcgttactaagtaaaataagagtgacttgaacacaagcactgccgtactgtgacagtcggatgctctggacaacgggaggactcacgttccaggcaggacggagcgggatggcccgagactttatcatgctactcagagcagcacgcgatttaaacttatgaattgtttatttccggaattttccatgtaataaatattttcaaaccaccgttgacgtcagtaacagaaatcacaggaagtaaaaccacagataaaggggggactactgtactcttaaaattgcaccctctctttcctcctatccaagtccattctccgcacctacaaagagattttcagattcctggacagtgttaatctcccctctcctgtgctcctaggttctcctttgatggcacccaggcgatccttccctgcaccctggttgtgtctcctttgccaagctgtgaactccctgggcaccagaactgagttttgtccatctcagaattcccctcagaacctggcacaggacaggagcttagtaagcatctgttgaaatagttaattttatttggctggtgtgacataaccctctccctttcttggcagcttttaaaacccttggaatcttaccaatgatagtgtcttttttatgctaattcgtgactgacggctgggggttcctggatagcctagggatgggggctgtttgccagagaatcaaccatgagatgagagggttgtagctttcagccctactcactccatcccaccccaccccatcccacctccaggaagaggagagagactgaaggctgagtcaatgatcaatggcccgtgatttaatcagtcatgtctctgtaatgaaacctccacaaaaaccataaaggaagaggtttggagagcttctgggttggtgaacatgtgcagctactgggaggggggtgccccagagagtgcacggggactcggtgcccctttccccataccttgcccaatgtatctcttccatctagctgttcttaagttgtatcctcttataataaactggtaatctgataagtaaaaaaaaaaagaaaaaaaaaaaaa

SEQ ID NO: 8019 - DNA, 165 bp, Macaca Fascicularis
ttatttatagagactttccacgtatgttgtctttccactggtgccctgcgtggtgctctcttgggggggacataacactggttttacagagtagtgtggtgtgttgtttgtgtgtgtgtgtgtttgtttttaaataaccgcatgttttaagtgtgcacttttgtc

SEQ ID NO: 8020 - DNA, 1324 bp, Macaca Fascicularis
ttttcagaactaagacttgaatctatagtttggagacagctaacctacctccagtagtgttgactgtccactatatagtttggagtagttaacgctgagacatagttctggtcaggtcccaacaggaaataaatgttctactcaaataagataaattggggtgagtttaataaagggagtttttacaaaggtcttggcaggatgcagggaaaccacaaggacagctctgggcactgcatgctataggcagctcctgctgaggtaacgacgctgtgctgacaccgtctctgggctctaggtgaggggaggatgtgatcagacagagctgtgtagagtgggtcacttagctggtaaaagcagccaaccagcagccaatatgcagtagccctcggaggagtaaggaccctgacttcactctccccactccctctgatctcttgcctcttatatgattgttggccaaaaccagctggaatccagaaggcaaaaaagaccactggtataacccatacaggtgagcctcctggggcctggcagggtagaagagtagagtagatctgaaggggcaggtgggggaaatccagcacaactagtaaagttgctagacttgagtgacaaagaaggaatccttggacatccagactaacaaagatgaggtcatcttaattaagtttggctgtattgtctaaccaaagtactggcattacaggtgtgagtttttgcgcctggctggtaggcgattttaattcacctctgacagtctaggacagataaagtagacttccttgcccaattttatatattgaattatacaccaaccatggagaatgaatgaactttttaatttacctgtgaaaatattcacatagaccacccataggagacagacaggacaacctcaacaaatcctaaatagatcaccacgtggtataattcaataatgttagaaaacaaaacaaaaaaccctagcacctggacattttaaaactctgtcttggacacacatggtggctcacatctgtaatcccagcactttgggatgccagggcgggtggatcacccgagatcaggagttcgggaccagcctggccatcatggcgaaacctcatctctgctaaaagtacagggatggctgggcatggtggcatgcgcctgtggtcccagctacttggtgggctgtggcaggaggattgcttgaatccgggagaccgagattgcagtgagctgagagcgcgcctctatactgcagcctgggtgacagagcaagactgtctccaaaaaaaaaaaaaaaaaaaaaaaaaaaaaaaaaaaaaaaaaaaaaaaa

SEQ ID NO: 8021 - DNA, 748 bp, Macaca Fascicularis
  misc_feature (1)...(748): n = A,T,C or G
agaacattatgagannnnctttgctttttttaaaatcttttttagctcatcacctgtcgttagtgtcagtgtatttnatgtgtagcccaagacaattcttccgatgtggcccnnnnnnnnnnnnnnnnnnnnnnnccctgttctaaggccttttgcactctacagagtgggcccttggggagccggcgcctgccagtgcgtgctgccagtttcgcttctccctggagcctggggaacccggcccagctgagcctgggtgccagcggggcagcacctcgcgtcaggtttccagcgcacctcgagctgcttcacacgctgcactctgggccctccctgagtttccttcctgggtgaaacacaggactcgggaaagtctagctgccctgttaaggccacagaaattgccagggagcacaaatagctgataagaagcaacctctgaggaagtctttgtcactgagttaccatgagtggcccgattgtacgggcacatagatgagacgcttgtgctgtgatccagagaagagagccactttataactttttagcgtgcagtccctgtagtcgggagcccgccgcagtgcacgttacctagtcctgtgtggaactttcttttgccacctaagctgtgatcagcnnnnnnnnnnnnnnnntctctgatgcttaagttttgtatctcaaaataagatttttaaaataagcctacagaaagctcaaaatgcatcacagaaaaactgtgtgtttaacg

SEQ ID NO: 8022 - DNA, 745 bp, Macaca Fascicularis
  misc_feature (1)...(745): n = A,T,C or G
aagtagtaaagttcnttnnnaactagctgcttggtagttacaattcccaaatgcagantnnnntcntttcttgttaaaagccttaatctcatttgggtactcaaaagannnnnnnnagtttattctggttaacttgagaagccaagaaagatcatttttagtaagtatgccttccnnnnnnnnnnnnnnnnnnncagcatcctaggctcagcnnnnnnnnnnnnaggccccataaaacacacacatgagcagggtgagaaatgcttgctttatagctgctccaccctcatctccagagatttttgtgtctgtggttgtgggtctnnnnnnnnnnnnnnnaccacttttagagtacctttgcctaaactcttttagaattgaggccccaactttgacggcgcatttannnnnnnnnnnnnnnnnnnnnnnnnnnnnnnnnnnnnnnnnnnnnnnnnnctgattagatcaagaactatttggaagtgcctcttaagtttttttccnnnnnnnnnnnnnnnnnnnnnnnnnnnnnnngtccagatatgtaaaatcatttctctctattttccagctggttgtgttagtgattctctaggannnnnnnnaaatgagttaaataagttgttggcttggggcaagtgaagtttgtgactatgcttgatttaataagctgagagtctcttgtttgtctgtcaaggtgccttcctctgataaagccttacctccatctcacccagcaacagtt

SEQ ID NO: 8023 - DNA, 770 bp, Macaca Fascicularis
  misc_feature (1)...(770): n = A,T,C or G
ggatgctgaannnngtannnaaggcatnnnctacaaagtggtcatctgattgtttggcnnncatcaatttttgtanntnntgactcagtataaattttaaaaactaaacgtttttcttaagaaattaaaagtcttatgacattatcaaaaggaaaatatatttagaaactcttgcataacaaatttaacaggaattttcaaagaactgctttattttccacatgatataaagcaaatatttgactgccttacaccaagaaaaacgaagtgttacttctattgatcagagctcatattaatacaaataggtaaaataataaaaactgcgtattgtattcatttttatttgaatacaaatgtcagaaatcatgatccaaaatttagacgaaagtttaaacaagttcctagaagttggtttatgacagtgttattaggacaaacataagaacaatagatattggtactttacccttgttagaaatcagaaatactttaaaaaatacttaaaaattgtgaaaacagggcnnnnnnnnnnnnnnnnnnnnnnnnnnnnnnnnnnnnnnnnnnnnnnnnnnnnnnnnnnnnnnnnnnnnnnnnnnnnnnnnnnnnnnnnnnnnnnnnnnnnnnnnnnnnnnnnnnnnnnnnnnnnnnnnnnnnnnnnnnnnnnnnntcacgtgcctgcaatcccagctacttgagaggctgaggtggaagaatcactgaacnnnnnnnnnnnnnnnnnnnnnnngccgagattgcatcannntatt

SEQ ID NO: 8024 - DNA, 655 bp, Macaca Fascicularis
  misc_feature (1)...(655): n = A,T,C or G
gacctcacttccggtattgttccatcaccgtatcttccctgaaccactgtcacttgagattttctggtttgtatatatggttgtgtccctctcacttttttactaggatgccaactttttgggagcagacaccttgtgtgcttatggccacatccccagtgtctagaagggaggctggcacatagtatgtgcttgataaatatgtgtcaagttagtggtggggagtgagagaaaagaaggtaatcattccaaggtttctagcttgggtgacagggcagatggcagatggatggtcaggaaatacaagagaaagaatccagtttttgagggatgatgaggttgtctttgaattaatggaattgaggtgttttggagctactgaagtaccattgtaattagaaagacagttctgggccgggcgcggtggctcacgcctgtaatcccagcactttgggaggccgagacgggcggatcacgaggtcagnnnnnnnnnnnnnnnnnnnnnnnnnnnnnnnnnnnnnnnnnnnnnnnnnnnnnnnnnnnnnnnnnnnnnnnnnnnnnnnnnnnnnnnnnnnnnnnnnnnnnnnnnnnnnnnnnnnnnnnnnnnnnnnnnnnnnnnnnnnnnnnnnnnnnnnnnnnnnnnnnnnnnnnccgg

SEQ ID NO: 8025 - DNA, 709 bp, Macaca Fascicularis
  misc_feature (1)...(709): n = A,T,C or G
gagcagcctgaccagcanngtgaaaccccannnnngctagaaatacacaaatattagccaggcgtggtggcatacgtctgtagtcccagctacctgtgaggctgatgaaggagaatggcttgaatccgggaggctgaggttgcggtgagctgaaatcgcgtcactgcactttagtttgggtgacacgacagagtcaatctaaaaaaaaaaaaacccaagactcgatctaaaaaaaaaaaattgtacttatatgagagtttattcataaaaagttttactttgtcagaagtattatagttatcctttagcatattatagctaaagaggtaattgcgagcttcatgctgtatctaaggaaacagtataggcttataaaaacaataataagtcttatcataatatgcgtcaaatgtatgttatgttatttatctttaaacgtgatagccactttacaactctctgagcttttgtcgaaatgccactatataaatattgataattacattcagtaatcttcttagagattacttataaatctcctttatagtaatataccatatggtacatgggacattgacattaattattaagattataatgcaaattttgcctgaaactaagaattagtgaaattaatgtattttaaatatttaaaaatgtatcaagcatatcttatagctannnnccttaagaggaggactttcagtag

SEQ ID NO: 8026 - DNA, 940 bp, Macaca Fascicularis
  misc_feature (1)...(940): n = A,T,C or G
gcactgctaggaggtctnnnnnnnnnnnnnnnnnnnnnnnnnnnntccaagtgcctgtctgtgcctgggagaacaagccagaagcgtcgcgtggcnnnnnnnnnnnnnnnnnnnnnnnnnnnntgaacaactcccctggaccnnnnnnnnnnnnnnnnnnnnnnnnnnnnagagtcagaagctgagtcnnngcaacagcctggccactcccggtcgctccccactggacacccagttaccaaagtcagcaaagaagatgcggtaatccccannngatcnnnnnnnnnnnnnnnnnncagtctcaccaacacctccttgacccgtcagtcttcacacccggggtgggcaggcaggcgttctgtgtttacgagaaccgcacacaggctaagcacaaacatggaaccagagttccaatgagaaaacctcactcgcaaaagccaggctgcaccccaccaggtgatgcagcgcgcctgggccgtgggtgccaggagccgagtgctagggactcgtcatgattgggaatccccacgttcctgtcactgctgtcaaacagaaggtaaacagtcttatgaatgtatttccttaggaaaacttgtaaaaacttttattaggatatctatttatttaatactgaactttggcctactttgtaatagactataaacaaattgaggaaatcactatttctcacttctgtattttctcaaaaataattttgttacagagtcaatatactgtgtactattgattattgtgaaagcaaagaatttcatcaaaacaaaatattttaaatgagtgaaaactgtgtatgttaattttgcagctgtaatattaatcaaactttgtgtaattctaatcacaaaatnnnnnnnnnnnaatgcccctcagctgtgggttggcagtgtccagacagggagggcccatcaccaaaatcctgaat

SEQ ID NO: 8027 - DNA, 1946 bp, Macaca Fascicularis
cagatatttgagcattttttttaaataaaacgtttttgggagctctgtgtgtggtcctcagggtagggttgggcaacgggttatacctgatggagccactggggctacagccaacccagagcctgtgtgttgtggggtcaggatggccccatgggctcttaagcctgcaggtggccatgcctttgcctgcccactgctggcaccagtgtgtgtgtcccaccctcaggaacactggtgagcttgtctgtggttgcatgtagggggagaggtggggccccgcccagctgtggggctcattgaggggtccccgcctgcaaatttctctccagctcagtcctaggatgtccatccatccacctttcagatgaggactgtgaacaggccatacagggggcctccaggggatggactggccaagaagttaatgcccaccgcaggacctcaccccggactccctaggaggtggttaacagagcggccccttctagaacccgcccagaacttctagaacccgtgcgcggtccaccctgggccgctccctggcctcgctgccctgccagtcgcctatgagctcctgctccttcctgggcctgcagccctgaagaatttgttcacccaggtaggagcgtcgctgtgggcagcaggcggtggcagcgggcgagcggccgggctgaccacctctgcctgacgcagatgcctaaggccaggcccggcagcctgcccacgacctccatcggctggcgcttccagctctggtccctaggactctcctctccggagcgccacctggccaggcgcctcaaaaacaatagcttctacccattcatgcagcagcagccaaacggtgcgcgcgaggctgggcggagcggcgtggggcgggtccggggacgggcctgaatagggcggagccaggtgggcagagccagggccctgggcggggccagtcggtgctcctgggggcggagacactgcctcccctagccctgcgccgacccagccagtcagggccaagccctggcaccgccacccctggctgcgggcagggccggggcgtcctcatgcgccgcgccgcccccagtcttcgtgctcgagtactacctggacacgctgtggaaggggatgctgctctttgtcgtctgcgtggtcctggtcagcctgggctccctgagagaggtgtgagcccctgggcccgacccccatcgccctcctcccccaagggccggcctcgtgccgctcagctcagacgctccctgcggcgtccgcaggtacagaaacaggagacctgggtcttcctcgcgtacggcgtgggcgtgggcctgtggctcgtgatctcgtcgctcccgcgacgccgcctggtgctgaaccacacgcgcggggtgtaccacttctccatccagggccgcaccgtgtgccagggccccttgcacctggtctacgtgcgcctggccctcaactccgacggtgactggccggagggtgggccagggacgggaaggccgcttgggaggtcagaggggcggtcaggccggctgagtccactctccccgcagcctacggaaggtgcttcttccagctggtcctcggcggccacaggttggagccgctggtgctggtgcagctgtcggagcgctacgagcaaatggaatacttgggccgttacatcgcccggaaactcaacatcaactacttcgactacctggccacctcctaccggcacgtggttcgccactggccaccccctagcgccgcaccgtgatgcgtaagaaccccgtgggtcacaagcccagctcctctcagtccagcctggaggtgtgacacctggaggtgtgattctgagggcctcctccaccccaggactgcgttctcggtaacctcccagccccactctggggcagatcaaattgtgagacccactcactgtccttcctttcaataaagctgcccta

SEQ ID NO: 8028 - DNA, 1916 bp, Macaca Fascicularis
gtgagattagcataagaccatcttcaaactttctaattcattctaaattcttggcttagacaagaagaatatgttattaagttttaatgattgttttgaaagagtatttatagtatttgcagttctgcagaatgttttatgatttatgattctaataacagacagtacttgaacatgaaagctaatttgtcctcctattgtgtaaataggcttccactttggggagtagagcaagtgttggcctaaaaatgtctgctgattccttgtgccaaacttgaccttctaatttggaaaacagacttcacagcaacttgtctaaaaattaatgaagtctttttacagtgtaaggtacagcaaagaaatgtattgattttgatatgctacaaggttattgcttacaatcataaaattattgtaatatccagaggtttagaggttaaggaaatgaatgcgaagaatgcctatgtgtgtgcacatgtgaaaatattggtgttctaagaaaattgtgtagaaaaactgtacaatcctctgttctgattagaaagaacactaacagatatgaaggaaaccatagacttctagactttgtgctgatatgtacagaaaatacatagaaaatgaagtctaaaagacccctgcgttgacatgtctacaaagaatagcaaaatggactcaattgctattactgaaagccacattattccccaccggttagatgatctgcctatctccagtttcatttcgtcgtatccttgctttgcaatgttgctggagggatactttgttcaacatgagtctgatcatgtcacctcttgtcatatcacatattgtgatgacttgtcttccctttagaataaaatcagaactgcttggatttgtaagcagggctttccacagtgtgtctcccaccaacctttccaatgtaatctctcatcaccattcaatatgcaccctacactcaaacataaaagcattgcttgcatttcctaagtagcctgcaatttccctctatgccttccacgtctgcttttctgcactcacaaattcttatacatccttccaggatcagctctagcaatgcctcctcccagaagatttttgtgaaccaccaccaccctcaccgccagactaatgtgtgtgtctgggtgatgcaggtgcatgtgcagaagtgtgtgtgtctgtgcgtgtgtgtgcatgtacacacacattcacacatgggctgtgctttactcccaaacaccccaagcccaaggctggccatggcatttatcttttaaaattataattatccaattctttattttccggcagatcataaactacttgaagctttttcatttcattttgcacatagtaggccctcgaaaaatattcactgactacttaaatgagtaacacaccaactaaggaactaaagatatggttgatattagtagactagcaaataaaacaacatagcataatgagaatgcttacgggaaaaagaagaaggttttaaagcttcccagcacactatagattaaaatgtaagacatttgtccacttccccctgaaaaaggaagtttatgtgtattttagtttttaccatgggtcttaaattacagcacacttttacaattgttttatttttaaaaacaaaataccacgtggcagaagacacattaaaaaagatctcccaggcaaggcgtggtgactcatgcctgaaatctcagcactttgagaggctgaagctagcagatcacttgaggcgaggatttccagaccagcttggccaacatgatgaaaccctgtctcagcaaaaaatacaaaacttacttgagcgtagtggcatgtacctgttgccccagctacttgggaatctaagttggaggaatcaccggagcccggggaccctgtctcaaaaaaaaaaaaaaaaa

SEQ ID NO: 8029 - DNA, 792 bp, Macaca Fascicularis
  misc_feature (1)...(792): n = A,T,C or G
cagaactagatgatgnttacttagactgaagcgtgacgctttcatcagtagcttcaagaaagtctaaaatgttaatttgtggaattggacacagtattcnnnnnnnnnnnnnnnnnnctcctccgtccctcctgttggcacccttgcatcgcccgggcctgattcctctcggggnnnnnnnnccgccacagggtcatagttcagctaagcaaacagcacnnttatctttgagcttcctctgctgacctctgtcccccttcggatttcatcttctgaccnnnnnnnnnnnnnnnnnnnnnnnnnnnnnnnnnnnncagagctgtggggacaccagggtgggggtgcgcgtggacaccccaaaccccagctgctgtgtcaaggctgaggacgnnnnnnnnnnnnnnnnnnnnnnnnnnnnnnnnnnnnnnnntggcctaaagaagggacttcgtcttactgaggagtggggaattaaagagatttgactccctttagtgttgggggcagtcnnnnnnnnnnnnnnnnnnnnnnnnnnnnnnnnnnnnnnnncggcctttgaagtggaaactgaaagctgcatacctgggaaggaactttctagcaacaggcaatggccttcagtggaagagggagggctagaggtgtgcccagtactnnnnnnnnnnnnnnnnnnnnnnnnnnntttttttttcaaaaaagctaaagctgaaatggattttatcataaaggatcacattgttttcttctacaagtaatacatgttcattgtgtaaaacccaaaaagcagctaaa

SEQ ID NO: 8030 - DNA, 755 bp, Macaca Fascicularis
  misc_feature (1)...(755): n = A,T,C or G
cagggagaggaggcaaggatgagtggactccgcagccccaccaggcactgaacatgtcgacggggacagaccctctgataaaggcagacgggcggtcaaccggtggatgggcacagggagaaccagagaaacagatgagtggaggaacggacacatgggcaccggnnnnnnnnnnnnnnnnnnnnnnnnnnnnnnnnnnnnnnnggccagaaggctcagcggtcgnnnnnnnnnnnnnnnnnnnnnnnnnnnnnnnnnnnnnnnnnnnnnnnnnnnnnnnnnnnnnnnnnnnnnnccgcnnnnnnnnnnnnnnnnnnnnnnnnnnnnnnnnnnnnnnnnnnnnnnnnnnnnnnnnnnnnncacacacgcacgcgctccaagtccacttccgcacgnnnnnnnnnnnnnnnnnnnnnnnnnnnnnnnnnnnnnnnnnnnnnnnnnnnnnnnnnnnnnnccgtgagctcaaagacatcacgtacaagggggcacnnnnnnnnnnnnnnnnnnnncactttggggtcccgtgagtgctcggggcacagcacctggagccgcttacagtatgttttgctctgaggattatacacatcacagaagagtcgtgtggccccttcaatgcgtgtggggtacatggacccaaaggatgtctggctctcatacttggcatagcagcgctccatgtggcgcannncaacacgtngggnacctccgccttaaccaccaaacacacacttctgcatgtcaccctcact

SEQ ID NO: 8031 - DNA, 735 bp, Macaca Fascicularis
  misc_feature (1)...(735): n = A,T,C or G
tgagagcatgggcgtggatgccatcacgctgggcgggctcgtcnnnnnnnnnnnnnnacctgccctgcaccctgcaaccgtggcctcctgccagccataaggagagtggaagccccggcgggcccagccgccccgggagtccccgcgcccctccttccccttgcggagactcccggcccgcagcgccacctcgtgctcacgcatggccagacaccccaggtccccccagggccaggagccaggcccagggcggctgcagaacaaagtgggctgagctgtttgctttatgaggccagtccctccccgcccgccagactaccctcgccccgctgtactccaccctccaggaaccctggtgcttagggcgagggccttcgaatcttacacaatcaggaaaattagtgcaaagaatccgttttggaattcacagaaaagggttgaaatcttgggttcatcactaaccaattgtgtgatttttgaccaggtcgctttatttctctgaacctggaaaatagggatgaaaatatccccctcaaggccgggcaagannnnnnnnnnnnnnnnnnnnnnnnnnnnnnnnnnnnnnnnnnnnnnnnnnnnnnnnnnnnnnnnnnnnnnnnntaagactagcctgcgcaacataatttaaaaatttaaaaattaaccgggcatggtgatgacgnnnnnnnnnnnnnnnnnntgggaggctaaagtgggaggatggctgaacctagg

SEQ ID NO: 8032 - DNA, 747 bp, Macaca Fascicularis
  misc_feature (1)...(747): n = A,T,C or G
accagagaaaaagaagataaacctggaaaatagctatattcaacagaaatnntcaaagactggttttatttttaaaagaaaaaacttgaaagaacacttctaagcctaagnnnnnnnnnnnnnnntgttacttttaagtacattttaataatttcagnnnnnnnnntttttattgaatggttgactgtatctgtcccatcatactgctttacttctgggttgaacagaattatttatgcagaataattcaattgaatatccatcacttaaatacagtgacaggatagcaacttcagggatctgtaaagatcgtttaaatggagtgctcatctcattgaggagcagattaattttgcataagtactttgattatttaatatttgtaggaaaaaactttcattttcctacagaggaaaatagaacaatcttagaagcaaggaacaatcttcttttctaagtnnnnnnnnnnnnnnnnnnnnnnnnnnnnnnnnnnnnnnnnnnnnnnnnnnnnnnnnnnnnnnnctaagtattctcttactgtctttaaaagcttcctgtattagtggtccttgaacaactgtgaatgtttgggaattggtagaaaggcaagaagtagtatattttgacctgactggaaagatggttgtttttattaccaggtaataagtgtgatcatcattgttgaacttcagctccagtgtctctccagaataagacattggcattcaaatnnnntgtatcttgtta

SEQ ID NO: 8033 - DNA, 627 bp, Macaca Fascicularis
ccacacaggtgggtgatagatacagtttgtggcaacacaaatctctctccatggtggagaaacctttgcttatccactgtattctactcagtgtatagtgatgacaaatatgctagaattaaaccagtcaagtatactggcccagagtgagtgttaaatgtgtatctcacctgtggaacctactcagcagcttggtttctggggttggggacatatttatttcttaaagccaaacctctccttcattggtttagtgtacataagtctatttagatacacttatcccactttaatctccaccagcccctaaactctctcctgtaccctctgttgctgaagtggcctcttcacttgggccctggaaaagcccatggaaaaagtccgttcctgcagccaaggcctggggcccaggtgactaggagtagccataggcaggcgaggaaaaagtgggcatgtgctgttgtctgtagtccaaggtctatgtgtctcgtcagtgggtgcaatgccttccccctcaggtgagagtgtgatggactctagactgccttccatgagcgttggtcatgatgggatgtcatcattttccattaaaacccagtgtgtatgatgcctagaaagattaattgt

SEQ ID NO: 8034 - DNA, 627 bp, Macaca Fascicularis
gtcatttaaggcatttcctggtgcttgtgtcccatgaataaaaggacaaaagtcagaagatcactgatgtcttactgtcacagagatattttaaaatagagaagtaggaaaagatcttccttttttgatctacaatttatatagttttctgattatgcacataaaagatatgccttccatatgcataaagcaaacatatggaaagaaatatatccagatgttagcaggggtcatctttgggagtggagtccatgggattttgctttcttcatttttataattttatattactgtcttggaagatgtgtttacgtgtgtgtgttaatataaattgtacctgtgagtctagaagctttaaatgtgttaaaattaaaatattcaagctaaatgttacttctctctcccaaattctgtaagttggaccccgttgccccaagtagaaggaacttctttcttgcgtgccacttttatagcatttggtaattctgctataacacttatatcttgcccctattattatctgtgcacagctacacaaaggtgtgccttctacctgggaacatggattgtgaatgactctgtaatgagacctgagtcttagttatctttccactcactccctatctc

SEQ ID NO: 8035 - DNA, 757 bp, Macaca Fascicularis
  misc_feature (1)...(757): n = A,T,C or G
aggctgcatgaagnnnnnnacancaannncaggtatgtgtggaggtggtggaaggtattattacctggaacaatcttcaccctttaggcccaaatcaacctccannnccaccgggannnnnnnnnnnnnnnnnnnnnnnnnnnnnnnnnnccagagcgcatgcagatttggttctcaattagaaacgtattttgtatttctagttcctaaaggaaatgtgagttttgtacttagcagaagctatagcaccatcttgtggaaatnnnnnnnnnngatcacaagcttgctctgaaaattttagtcatcttaaaaaaaagtaaatcttgatatgccttcgtagctctaaatcactcttggaatacacaatctattagtannnnnnnnnnnnncatatattctaattgtatgagggtggagttagcattctccaccagctgcagctttctttgtttgactnnnnnnnnnnnnnnnnnnnnnnnnnnnnnnnnnnnnnnnnnnnnnnnnnnnnnnnnnnnnnnnnnnnnnnnnnnnnnnnnnnnnnnnnnnnnnnnnnnnnnnnnnnnnnnnnnnnnnnnnnnnnnnnnnnnnnnnnnnnnaattttttgtagaggtggggtctctctatgttgcccaggctggcagtggcaactttcttctttttagaataattaccatacttaggatccaatattcttcccatctcagactcatttcttttagaatgtgtgtcctcaggtttggattttaaccatgtccc

SEQ ID NO: 8036 - DNA, 716 bp, Macaca Fascicularis
  misc_feature (1)...(716): n = A,T,C or G
ggaatggatgtgtgtatgcgggtttcagataagaacttcaattatataatttaagagtaagtctataatttaagcagaaataattaagatactcatcaaattaagtaagcggaaaaatttcctctctctcatgctacgttgctatcatcacatcttttgttggaaggttgctaagcttgataagcctttgaaccattttatttgactttccacgtgccagctggttggtagggagatggtgaaatgccttgggtggtgtaggattagggaagttttcattctgaagctatgaagacttggagaaaggggtttatagaagcactatgaaaataagctggagcctctattttctgctacgttttaaaaagctttttctttagagagtaataaatccattatgtctatcgtatacatgaattcagactattagagagttgaaaatgcaggctatatatatatataaaatctgtgttgtcatgcacatgtcaacactgtcctgatgacaaaattttatttatccccccagataaaaatttgaagaaattttaaatgctttttattcataaacacttttcaaaagggataaaagttaatcatgttaaaatattcattctatggcagatgtcactcctttgagccctccctgctgaattgcttacagtttctgagctgtaaactaacatttgctttactatgtagttacaaagaaatgntgt

SEQ ID NO: 8037 - DNA, 1900 bp, Macaca Fascicularis
  misc_feature (1)...(1900): n = A,T,C or G
taatcagtgtggggcgctggatatgtccataccttagcatttaatttgtccattgtacatagccagtaaaattgcttacatgcagtaatagaaactggcaaccctgaaaacattttcaccaataaaatattcatacatcagatcaatagggatccaatttaaaggttcagaatcaatacttttttgtcagttcactgtgtaccatccctttccatattattaaatgtgcaatttttattataaagtataactacaggagccattaagctgttataattattaaacaaggcacttataatcatcacctaataaagcttcataatcaagatagtctccttatgtgatataattttaatttataaaatgtctcattgatagatctaaatgttgtagcaaattaaaatcacttacatgtggatatagctatatttgaagtaataacagaacaggcatctctttaaataaattaaacacataagcagtagctgtactagctcttttgtgcagcatatcttatcctttaaaattaaaacgtttatagcttattaatgtattcaaatgattttataactctgacaatcactgatgaaacattattttacagtattcagtacaatgcaaaaggaatatactaatctggttataatgtttaggtatgtgtatctgtgtgtacatgtatgtatacatatgtgtaatcaaatacatgctaccattcatcatggaaggttcaccctactgtaccaatttggagactatggtttttatcatagccagagtgacatggaagtagtccttaaaatgcttcaacagcaataaccgagttattgattgcctatcacattagagtgagtatcagatatccatttagcctcgctctaagatatattgctgtgtgctgactgtaagtaagtaggaaggaagagaaccaggaggtttatttcaggatttttgactataatagttggttttagtgctgttgcatattcataatttatagttattccccaatggagctttctaaaatcatctgaatgtaaatatgtgtgcatatccagaaagtggtgagggagaggtgtagagacacagagagagaaagaaaaagagagaagaaatagagattgcaattaaagtgactgtaacagggatttctcaacctgagcgtaaagctcactggttttctgaagaaccccttaggtggtgagaacagacaaacaaagaaagtttttcttttgtcactcatcctcattacccacctcccatctatttacaagtactgaattcccgtgtattttccgccctaagctgtgtgcctactctctaggagttgcaactgagggcagattagaaagtgtgggcaggtgtctataaaggcagtcactctgccatctttctgtacagtggtagcattaagggctggctttaaaaggaatctttaacccacatctttatcagttccccacaagctactataaatctatgtgtattaacctaagtgaaaattgtaagctagctatgcaaacttagttttaagacgaggttcctagcacccctacctatcagctcaccacccctaaggctttataatttaaatatcctggaggctgggtgcggtggctcacgcctgtaatcccaacactttgggaggccaaggcaggtggatcacaaggtcatgagttcaagaccagcctggccgatatgatggacccctnnnnnnnnnnnnnnnnnnnnnnnnnnnnnnnnnnnnnnnnnnnnnnnnnnnnnnnnnnnnnnnnnnnnnnnnnnnnnnnnnnnnnnnnnnnnnnnnnnnnnnnnnnnnnnnnnnnnnnnnnnnnnnnnnnnnnnnnnnnnnnnnnnnnnnnnnnnnnnnnnnnnntgcctcaaaaaaaaaaaaaaaaaaaaa

SEQ ID NO: 8038 - DNA, 704 bp, Macaca Fascicularis
  misc_feature (1)...(704): n = A,T,C or G
acccagagggcgctnnnnnnnnnnnnnnncccgtgtcnttctgacaatgaccaannnnnnnnnnnnnnagggtccaggaagactcaggcactggagtctgtatttcctgagtccgcctctcactggtaagtcctgagcccccttccttcccagcacccactcttggggcagctctccagggctgtgctgtggctgctgctgtcagggagagccccatgctccagccaggggctttaggggctcagtttaggactaacacgccaagcaagtcgtgctgagtgtctgggcttcttctaggaaggtatttccaatcatnnnnnnnnnnnnnaaaaaaaatgcgtgtcagttaagtgtgcactaagcctggaccacatgggacatagttgttctaataaacacaaataannnnnnnnnnnnnnnagagaaataacagtttcttgtagaaatgtggtgcttttaaaagaggttaattaataaacannnnnnnnnnnnnnnnnnnnnnnngtggcagagggtaattttcattttagaggatggaagggccaaatacccctccccactcagcatttttctctaataatcacctcagcttcacctccgcctttcatttttacagctggagctgtttatcatcgctccaactttcactaaaaaggaaaaactatcacttaaacaaagccattgaaaacccagcatcatatggg

SEQ ID NO: 8039 - DNA, 430 bp, Macaca Fascicularis
cttgaagtatgtgacgttaaaaaaaaaaaaatgtttggaagatatttgtgctttaccactttctaagttgtggaacaattttaaaattctattttctgattaatcttttttgctgtcttgtgtctctgaagatattgcatgccggcagatcttctgcagagtattttttgaaagaaaagtgatgtatctcaatgaatgctatctctcttccacaaaatctctcatagtatgtcatacctagtactctgtcatttaatgtcactttattgtattctcgccaacaagggactttttcctggatgaaaggtgcaatattgatgcacagtatttttattatctttggtattcggaaaagcaacataatgtttttcatgtgttcaataattccccccccctaaagctaggggataccatcatcagtgtctgtaaa

SEQ ID NO: 8040 - DNA, 2313 bp, Macaca Fascicularis
cgagccgcaaaagggaagacggattctcagacaaggcttgcgaatgccccgcagccgtcatttaactgcgcccgcagaacaattacggtttgtcacccgaccctcccggatcgcctaatttgtccctagtgagaccccgaggctctgcccgcgcctggcttcttcgtagctggatgcatatcgtgctccgggcagcgcgggcgcagggcacgcgttcgcgcacacccgcgcacacatgaacacgcgcaagagctgaaccaagcacggtttccatttcaaaaagcgagccagcctctaccgcgattgtagaagagactgtggtgtgaattagggaccgggaggcgtcaaacggaggaacggttcatctcagagactaattttctggagtttctgcccctgctctgcgtcagccctcacgtcacttcgccagcagtagcagaggcggcggcggcggctcccggaattgggttggagcaggagcctcgctggttgcttcgctcgcgctctacgcgctcagtccccggcggcagcaggatcctggacccaggcgccgccggcgggcgtgaggcgccggagcccggcctcgaggtgcataccggacccccattcgcgtctaataaggagcctgcaccccagagagtcccgggagcgccgccggtcggtgcccggcgccccgggccatgcagcaacggccgcggcggagctccgagcggcggtagcacccccctgtaaagcggttcacgatgccggggccactgtgaaccctgccgcctgccggaatacgctccgctccggaccagctcagcctgtgatacgctggactccgcgcgcccgcagcaagcaagcaccgaggagtcaagagggccgcaagcgcggggaaggcctccccgcacaggtcggggaaaccggccggtgcagcgtggggacactcactcgggctggcactggctgctagggatgtcgtcctggataaggtggcatggacccgccatggcgcggctctggggcttctgctggctggttgtgggtttctggagggccgctctcgcttgtcccacgtcctgcaaatgcagtgcctctcggatctggtgcagcgacccttctcctggcatcgtggcatttccaaggctggaacctaacagtgtagatcctgagaacatcaccgaaattttcatcgcaaatcagaaaaggttagaaatcatcaacgaagatgatgttgaagcttacgtgggactgagaaatctgacaattgtggattctggattaaaatttgtggctcataaagcatttctgaaaaacagcaacctgcagcacatcaattttacccgaaacaagttgacgagtttgtctaggagaagatcaagattctgtcaacctcactgtgcattttgcaccaactatcacatttctcgaatctccaacctcagaccaccactggtgcattccattcactgtgaaaggcaaccccaaaccagcgcttcagtggttctataacggggcaatattgaatgagtccaaatacatctgtactaaaatacatgttaccaatcacacggagtaccacggctgcctccagttggataatcccactcacatgaacaatggggactacactctaatagccaagaatgagtatgggaaggatgagaaacagatttctgctcacttcatgggctggcctggaattgacgatggtgcaaacccaaattatcctgatgtaatttatgaagattatggaactgcagcgaatgacatcggggacaccacaaacagaagtaatgaaatcccttccacagacgtcactgataaaaccggtcgggaacatctctcggtctatgctgtggtggtgattgcgtctgtggtgggattttgccttttggtaatgctgtttctgcttaagttggcaagacactccaagtttggcatgaaaggttttgttttgtttcataagatcccactggatgggtagctgaaataaaggaaaagacagagaaaggggctgtggtgcttgttggttgatgctgccctgtaagctggactcttgggactgctgttggcttatcccgggaagtgctgcttatctggggttttctggtagatgtgggaggtgtttggaggatgtactatgtgaagcctgcatatattgtgagctgtgattggggaacaccaatgcagaggcaactctcaggcagctaagcagcacctcaagaaaacatgttaaattaatgcttctcttcttaacagtagttcaaatacaaaactgaaatgaaatcccaaaaaaaaaaaaaaaaaaaaaaaaaaaaaaaaaaaaaa

SEQ ID NO: 8041 - DNA, 1550 bp, Macaca Fascicularis
gacaagtgcagaggaggccactccacttagaaccttccttttagacctgcatgaacatgtgtttcacttaagcacattgggtccgaattgtggcgcatgaacccagctgttaaaccaggtaccctgggactgccgtctgcctctcagagtcctgcctgttctggacttgaaggtgaacatcagggaggcctcctcagcccatcttccgccaggagtgcagagccaggatgccgagaggagcagggactgtaactgcggtaggaggcaattttgccggtgtcgctcctgctcagactgactccgtgctccctcccatccacagctatggtagccattatttcccccagcagctctctagtggggaagagtggcgggaaccaggccattctcagtcgcattgggaagaccaagactcatgttcctgacaggacggtcaggaactcatgttcctaagaggcgctcatggcatcactgactcagttctgattcctcccctcctgtttcattttggtttgaacaacctgtgcctgcagctgtttcttccaccttcctggagctcacaatcagagcttcatgttcagtcttgagctcctaatgtttccaaacagggcaggggatagaagagccataatctgtgaaagctgtgaaacaaaccctgggttatgtaaacctcagatggtctcatctgaaggctcggcccagttcccagggagcagtgggtttggggaacaaagaggtagctgaggagtgatggtttttccctgtatcctgattttcagaaagggctttagtctctgggctgcagctagtagctggctgaccaggggatgggggtctaatagggtgtctcaccatagggcacctctcgtgtttggccttccctttctcgtgtatatgtgtgtgtgcacacacacaaatctgtatccccaggagtgcctcctgcagtcactgggggctcttccgtggtgcaccatcccatgagagcacatcagagggctgtggtcaggacttcctcccgagctgccctccctccctgggatgagtttcctcaccacctgctccaaggtgccttacgaggtgcagctcttcacctggccacatggcatccatcaccgtgctgagaaatgatgggacgttgactggatattgtgtgctatcaatccgatttgtccaaatctggacctcagccaagccacctgtgatggaaccttgcaagtcaaggtcatgaatgaactacactgaacaccatatattgtctctcaagctccatcccaatttctttaggacatgttatataatccatcccagaaattgaagatgtgatgctgctcggcctttggaataatttttaaatctgtaaatgtctatatgagcagaaacaaaacattgtgtaacatgttagaagcattattgtaattcctgtgttaacagtttgtgtgtctgctgctctggttttgaaacatgtttgtatatagatattggagttggcatacattttgttaaataaagcaacattttctttgccctttgaaaaaaaaaaaaaaaaaaaa

SEQ ID NO: 8042 - DNA, 659 bp, Macaca Fascicularis
  misc_feature (1)...(659): n = A,T,C or G
atttatacgcctagaggcaggggagtgtattgcacaattacttttattgccttttttccgttcctatctaaagaggtatctcaacagggagggtttagtaacacagaaaaaactgttttttgggaaactttagtttctaatcaaaagcccttatgttcattacacattaatggaatagtttttaaagggttaattgatacgggggtggatgtgtctatcatttgtttaaattagtggcctatacaatgggaaaaaagacaagnnnnnnnnnnnnnnnnnnnnnnnngtgctgcttctgtggtttatcaaaacgtagaacctttaacctgtgtcggtcctaaaggtcaacaaggtcaagtgtttttttatattgttcctatcaatattaatctttggggacaagatcttttacaacaatttggtgcttttttaaacattcctcatatttcctcagctgccaaaaatatgatgttcaaaatgggctacaatccttaaactcatagccactgttcaccagcctcaagttttataattaaagtgaaaaactaccgctcctgtttaggtgaaacagtggccattatctaaaaaaataaacaaaacttaggactttaaaagagtaagtcaaaaaacaattagccgaggggcatataaagccaagt

SEQ ID NO: 8043 - DNA, 688 bp, Macaca Fascicularis
cttcattcccacccccaggaatggcccccagaacatatacaacctttacgagcaagtcagctacaactgtttcatcgccgcgggcctttacctcctcctcggaggcttctctttctgccaagttcggctcaataagcgcaaggaatacatggtgcgctagggcccgggcgcccttccccgctccagcccctcctctatttaaagactccctgcaccgcgtcacccgggtcgcgtcccacccttgccggcaccctctgcgggactgagtttcccgggcgagagactgaatctcttcttctcccatctctggcatccggcccccgtggagagggctgaggctggggggctgttccgtctctccacccttcgctgtgtcccgtatctcaataaagagaatctgctctcttatgccctgtgtctgtgcttcagtgggggcgagcacggggctgaggctggaggtcggcctctgcctggagagtcccgacccctgagcggaagtggagtgaagtggtgcggaagtgaggcgaaggcttcccccttggcctgggcgcgccaagctgtcgaagcgactgcatctgatggggcggggagccacagggttgagcctatccgctgcgggaagggcgggacttcctgcgcgggggcctgagccgctccgtctccctgctctccgtggtcccggctcgcg

SEQ ID NO: 8044 - DNA, 562 bp, Macaca Fascicularis
  misc_feature (1)...(562): n = A,T,C or G
tattgactaataaagaatctgcataattctacttttctacttaaggtgtgtaatctctgttcgagagttagtttttaagtaagcttgttaatctgccacaatgacattttgcttaggatgtcagtagccatattaagatgtgtggaatagcttcagaagaggatcatagtgttttgtaatcgtttaatgtctgcagctaaatttttaaaggtaatttagatctaatactgctctttctgtgtcttattaagttaaaattaatgaatgaattctggaaaaaaattcaaaaggcactctgtgggtagagagtatcatttaagcttattttagtcacatgtagtatatatctccttaaagctgtcactctcactttcttaccattctcttgatttcttcagaaaccatctaatcatctttattctctacctacttctgcaattatatgtcatattatgttttcagagcagttcattgtcaagttggactttaagtgaccattcaagaaaagatgaaatctcacgaacctcaaaacttcattcatgtctnnnnnnnnnnnnnnnaa

SEQ ID NO: 8045 - DNA, 1844 bp, Macaca Fascicularis
  misc_feature (1)...(1844): n = A,T,C or G
aacattaccccctccagaagctgcagtattcgttcattaatcattcattcattcaacaagtggtaatgagtgcctgatgtgtgtcaggcactattctagcttcttgccatacattgatgaacaaaagtgacaaagatccctgcttttatttagcttacattctagcaaggagagacagacaataaaatgagtaaaccatggagtatattagaaggcaacaactgatacaaaaaaaaaaataaaagaaaaaagaaaagcacaccaggataagggggattgcatgtggggctggaggtcaaggtcacggtgtaggttttagtcctgagttgctatcaaatctgaccgccttcttccataccttgctccactgctttcactgcttccctgccaaacctcctaagactctgaggccgggctccacttcccacagccccatctactcagcagtttgactttgatgtccctttcacacaactgaactttgagatttccagttgccctggcctaaatgtcataaacatcacacccctctgcctggcttttgaagcgctctgcaatatgacctggcccatccacttctgtgacacttggttttaccagtttgggtgcatttgctcatgttgccttgagagtgacttgctcatgcatctggaatttcttcagcagataagtgctgtgttagaattggggacagagggattaattaaattccatttctgttcttgagatggccaaagcccagtgtggaaaaaagtttgccagcagttacaagatgttgtggtaagagttgtctcagagttgtcttctccctgccctgcagcagggatggcttcctagagaacacctagtcggagccctgaaggatgacagtctggagtttctcagtccagcggggaaagggcagtcaagacagaggcttttccctcagttgcagtctgtgtccctcaaggacattctcttctcttgttttgtattccccatctgccttacaggccatttgccaagattggttgttaataataatgctacacaaatcatctgaagctgagggagcagtaaaatatgaggcttgacagctctggagaggccagtttttggaagactcgcatgcttttgggagcagtttggccttgctccagccagaagtaagatgagcaaggccaagatgggagaagacattcaaggaagacatttgtcctctgcccacaaagagtccacatggtccgctcctagtgggagctgagaggcactaaaaggggcaaagggcctgggactggaccacagaggcatatgccttttgcactggcattgtgcagagacagtagatcacatgggcagcttataagtgtggggactaggactgatgccttcaccacaccatgtgctcctgccttggtgctttgctgagtgcaagcaaaagtgggatccatgaggggaaatgtttaacagcagtttgaggtggaggagaacatgcattataagggaaacctgattgatctaaaagtcaggaaccttgggttccttggcccttgagcacattatagacattcttgagtagaacctaagatcttgaaagcccttgtagttctgaaaactagtaatatagagaagaggtaggagaaaggcatggctaagaacccaggctccgagtagctgggactacaggcgcccgccaccannnnnnnnnnnnnnnnnnnnnnnnnnnnnnnnnnnnnnnnnnnnnnnnnnnnnnnnnnnnnnnnnnnnnnnnnnnnnnnnnnnnnnnnnnnnnnnnnnnnnnnnncaaaacaaaaaaaccaggaaaaaaaaaaaaaaaaaaaaaaaaaaaaaaaaaaaaaaaaaaa

SEQ ID NO: 8046 - DNA, 709 bp, Macaca Fascicularis
aggacatcactgaattgatgcctcacaattgttgtgctgtcccttccccaatgcccagagatgctccactccacactgctgctggggagttggggagaggtagtgtcagtgattcaagattttcttccacctctgccatctctgagacagcaagaccaaccccttctcttcctcctcctcagcctactcaacatgaagacaaggatgaagatctttatgatgatccatttccacttaatgagtagtaaatacattttatcttccttatgattttcttgataacttttttctctagcttactttactgtaagaatacagtatataacacatataacatggaatatgtgttaatcaactgtttatgttatcagcaaggcttctagtcaacagtaggctattagtagttaagtttttgagaaatcaaaagttatacacagattttctattgcacatggtgtcagtgctcataaccccacattgttaaagggtcaactgtaactacaaaagaggattctgaatgttctcatcacaaagaaatgatcattgttacatctgtgtagtgtgggaacaaggaaaaaaaagaaatgataattgtttgaggtgatggataagctaagtaccctgatttgatcatatacagtgtatacatgtatcacaatatcaaaatgtacccattaaatatgcacaattattatgtgtcaattaaaag

SEQ ID NO: 8047 - DNA, 571 bp, Macaca Fascicularis
tgtgacagcagccagcgagcgttttgtcattcacagctgtctgaaaggaggacggcagtattcccacgcaggaagcttggaccaagagcaggaatgcttaaggccgcatatgacttgccatggtgaaaaaaacaggatgcaaacccaggcctgatgacatccaccccgctaaaagctcaggactaggactttctcctttaaacaaggatccacatgtgggtgttccctgtgggagaggaagagaggacattcgaagggcagaaggttgacctttacaagcacacatgaaccacaccaatgagaaatgaatggatgagccagatgccaaattataaatttcctactgcacagcttcaatgtgaaaggtactcccagagtcatttctctcgtgttctggttaccttttattgtcagggagcctggggacggccttaggtgtcttaggacatttgacgagttccactttgatgggagatgtttaatttgggcctccacatggagatttctctccacctttttagtgtctagaagactcccaccttcaatagcaggattatgatcttttgaaaag

SEQ ID NO: 8048 - DNA, 556 bp, Macaca Fascicularis
ttcaaacaaaaagttcctatcccagtcagctgaccaaaacattaactttcgatttcttactctgctacagcatcatctagaaaggcagcaagataatattgtggcagtgcacagataacatcagggtagacttgactggagaaaaccaaattctacgcttgctcatatgtgcccccatccagctgtgtgtgcacacacaggacacctttctagtatgaagaactttgcatcatgtctgccctctattgaacacccccagaaatacttccaagtattagcatgtgaactgttgactccagcccctggtgctttctgctaggaaagcacacttacgcatccagtgtagtaattgaacttgttctgctgccatggtcatatgcagtgggattgcataaggagcgttatcttagctctgaagataccatggagtagaattccccacccccctgtcttacatccaccctggccctgtaaattcttttttcctttgttgcgtcaacgaccctagccggagactcaagctgccccctgtgataagtgccttctcgtctttctg

SEQ ID NO: 8049 - DNA, 897 bp, Macaca Fascicularis
  misc_feature (1)...(897): n = A,T,C or G
gctccaaatggaacnngnnnnnnnnnnnnngacagctgtgtgggggggacatgaagtgaagcaaggaatagatcggaaaaagataacagaggaatccatgtcagtgaacgcctcacatggannnnnnnnnnnnnnnnnnnnnnnnnnnnnaaatcgtcgtctcccctccagatgggcatccagatctccatctgcaccccctgcgttgcgaagatctacccacaactataccatttttctgcgannnnaagcatcaatggcttaagtctttggcctggactgctatattgcagaagttttagtccacttgtcaaacagagcattctgagcgtttacaggcagacctgttctcttccgacaagcaatttaaatcttaactttccatcagtcttcagtgtttttaatctaaggaataattatcttcctgtattttgatttcttaggtcagaattttttaataccatcctcattaattttccaatatgatataagttgaaacaatgtacaatattgtatattctttcttgcaagtggcagaaagtaaggttatgtgcatggccatgtgtttgtaggtgcatgtgttgaaataggaagtatcctagtatgtatttagataggaaaaacttatgtgctagtgttgactttgaaattataacatgtatacctatatattctttgtgtttatttaaaagttttgaaaatatacagtactgtttatattttgtataccttttaataggtatccacttaaggcatttgcagtacaaatattaattaaccacttccttggcccccagctacattgaaaaagaagaattatgcacacatctaacattggtagattatggcacacataaaaccatataaggataaaataataccattgannnnnnnntt

SEQ ID NO: 8050 - DNA, 1116 bp, Macaca Fascicularis
actctaagatagaaagccactggaatgttttgagtatagggataattgactgtatttatagtttaacatgtctagctgctgtgttaaataatgaatgtagaacatagcagggtcagttaggaagctgctgtggtacaattcaagtaaaaacactgacttggacaagcctggaagcagcagaggcagtgatatgtggctgggctggagacattttttggaaggtggagttaatggggtatacgaggtgaagatggtatagaaagacagaaacccaggctgctgctttgctacatgccaagacacgaaagaatagataactacatggggagaagaattggggaagtaaggtctgacggtgttagtggctggggttcaacgttcagaaagatcacctaccagcgaaggggccctaatgaagaaggcagctggagagaatgaagaggctggacactgggaggacgaggaggaggccctgcccctccaaacgtggcctcctatggacaccaagactcacagccttcctatcacccacacccaactccacagcaactctcggccccaaagccgcagtcagtgcacctgcacccaccactgccagaccttcagccagagttgcagacagagccagcgtggcagccggagccggagttccagccagagcccggctacccaccagaacccaaccggagcccacagctcatccggctgccagagccagagtcccaacgccagcccaccaccaaagcgccacaaaaagacgatgaactcccaccactctcccacgcggcccaccatcctgcacagcagctgccccaagaacagaaagaacttggaaggcaagctgaacaagaaaaaaatggccaagaggatccagcaggtgtacaaaaccaagaagcggagctcaggacggaaatccaactaatgagactgcactccttggcttgttcctgcgtgtttcacccaaatgagaaacgctatcatgcatagaatgctaggacgaagtcaatcttcttgcaggaacatgttactatggtgatttctacgcaacactaattaaagcttgtaccctgaaaaaaaaaaaaaaaaaaaaaaaaaaaaaaaaaaaaaaaaaaaaaa

SEQ ID NO: 8051 - DNA, 1050 bp, Macaca Fascicularis
  misc_feature (1)...(1050): n = A,T,C or G
acatgatacatgtnnanntnnnnnnnnnnnnnnnnnnnttgtacagcaaaaatattatgttggtatattacttacttattaatttgcaaatgattggattaaaaagctcgctgtattccttacnnnnnnnnnnnnnnnnnnataacattggcagtcgaggannnnnnnnnnnnnnnnnnnagcctcactccttctgtgtgtgctgaccacatctctgctgtgaataggatttcaaggagaggtctgttatgggactttgcagtgtggggggctgcagaagatnnnnnnnnnnnnnnnnnnnnnnnnnnnnnnnnnnnnnnnnnnnnnnnnnnnnnnnnnnnnnnnnnnnnnnnnnnnnnnagnnnnnnnnnntgggggannnnnnnnnnnnnnnntttcgttcactttgcccctgggagatctannnnnnnnnnnnnnnnnnnnnnncaaaccctgttggaagtttgggttattcctataactgaatatatnnnnnnnncctgaggctgtggacctannnnnnnntttannnnnnnnnnnnnnnnnnnnnnnnnnnnnnnnnnnnnnagaggtctgtgctacctctgtgaggtatatactaaaatgaatgtaaaataaggatcatattccatgctttaaggaactggtagtcttgtttgggtgatgagacaaagttcttgagacatttaaactgtatttaccannnnnnnnnnnnnnnnnnttggagattaattcattatggaaataaaacattgcctaagcccttgcctgctgagtcacgaccctgtctttgttnnnnnnnnnnnnnaaactcttctggttcgggaaaggttttctcannnnnnnnnnnnnnnnggctttcctatttatgttcttccatttctgtgccttttggatatgtaagtcacgtctccctacttcttctgcagcccccaggagagggactnnnnnnnnnnnnnnnnnnnnnnnnnnnnnnnnnnnnttcacttgttcattatgattttgtttataattttaaatgttttaaacacaagattgnnnataatatgt

SEQ ID NO: 8052 - DNA, 3174 bp, Macaca Fascicularis
  misc_feature (1)...(3174): n = A,T,C or G
gttaatcaaaaatccatgccaggccccgtgtggccaaactaatgaatgacacagaaaaagaaaaagatgccagaaggaagaaaacaaaagcatgatcatgacttaccttttgggaggtgaaacgcagagctgaagcactcaggctccagcagagggagcctccttcggcgtcctggacacggaccttcgtttgctattgattggaagtctaactggttctgttagtccagcttccacattttgacctccgggggtggggggtgggatttggagtgtatcttctctttccagggaataagatggttcttagtgaaagtctcctctgctgtttggacgccgatcctagcatgtctgcttgccttccagggcggtccctctcctgggctacctacctcaggacctgattgagaccccagtgctcgtgcagctccaccctagtgacaggcccttgatgctggccatccacaaaaagagtaggtccccttttcacggtacatcctaaagtgtttggcggaagttcgtgtgtccttggggcttcttcttgggaccagtctagctctgacaggtcagatcagctaaggacaagcaggtggtagacgctcgcctcgccacctcactcctggcactgcagtgcccagtggagtcaagagagaggggtaaactcatgtgagttcctttgtggccaattgtttctcagtccgtggcctgagtccgtggcatctcatgtttactgtggcttcagtggtgcatgggaggaggggagaccaattcatctgtggctaggaaggttctgaccaggccaggggagtgcagtgcatgtcctcatcaagcccagccctcatagacgcaagtgacactctagcagaggtgaaacatgggatgaaacagcttctgctggaaacagcctcctggttgtaatctacagtagaaatgggaggctgaaagcagtggctttgaagaagtgttcatacccctaacgtttggaaatgatgccgggcctgagtgaatcttgacttgtctctgtctactgtttgctcccctgttcccctgaatgctggcttttgctctcctagtcctgcagtcgggcgggcagcctttcgactactctcccattcggtttcgcacccggaacggggagtacatcacgctggataccagctggtccagcttcatcaacccatggagcaggaaaatctccttcatcattgggaggcacaaagtcagggtgtgagtgctccaagggcctgaggtggctcaggggtctcgggcgggggtcttgggctgtccttacctcccagcaacagatggtatagggaggggctgagaggccaagaccgaaacctcgcctcctgccaccaatctggagccccaggctggtaggcaggggtgacctgtcctctgccccaggtgggagggacctcatttaggccgagtagggagtgggcaggcagcagcctggggggctacaggggagaggcagagggcccacccaggcaggcagcatgtagtggctatacagtcacgccagagaggtcctcctgtggggccccatctaacaagatgaattaaaaccacgcaggggccctttgaatgaggacgtgtttgcagcccacccttgcacagaggagaaggccctgcaccccagcgttcaggagctcacggagcagatccaccggctcctgctgcaggtgcgtgtggtgcctgcatgccctcctaccaggtagcagcctgagagccccttgcagaggacataggctctgcaccctggtcctggcatacccactcagacaaacttcatctgtcattctctgaacatccctcaggggacagtttgggcatagactgtgctagtctgagacagtccacagtacccttggctctctccagccttgcattcaacattgtctgaaccgcagccctgagtgagcggctgaaggacatgtgcagaccccgtgctctgacacaggctgcatagtcccagagtgacctctcagtggtgtgggggctcattctaatccagagcagtgggacttagggacgggacattgtactcaaggtcccttaaaaaatcaggcccatcgcagtcaaccccacgcctgagaaggtgtctgcctctcagttcctggaggctgtggagtgaagctgtcatcgcatcttgtttgttttaaacccctccacagaggtgcggctggctgcagctctgcgttgatgagtgggttggacacattcctttggtgccgtcttctcagtgactgcatgtctgggtcggggcaccgcggctggaggccgggagtcaacctctggagctgaccctggggttcaaaccccagctcccctggtctttgtcatgtagccttaggcaggtcaccatcctctctgtgaaacagggtgtgttggcacggggccacatgtgtaactcagcagccctggctgtgtctgtagcactgtctgctgtctccccagcccgtcccccacagcggctccagcggctacgggagtctgggcagcaacgggtcccacgagcacctcatgagccagacctcctccagcgacagcaacggccacgaggactcacgccggaggagagccgtacgtccccttccgttctccctgtgaaaatgagtttgtggatgtccctccagagttagaaagctcactcaggacaacctttggcagttaggagaggcttcatcatcgcagctgtttctgcttcctttctaaactttgttcacttgggacgttttaatctcttaagagttgaaaaagctagaaaccatagctaagtgtttggttgaaaattatttaaaacagacaaaacaaacaaaagtgaagatttaactaggatagaaagaagaaaatgtgggcnnnnnnnnnnnnnnnnnnnnnnnnnnnnnnnnnnnnnnnnnnnnnnnnnnnnnnnnnnnnnnnnnnnnnnnnnnnnnnnnnnnnnnnnnnnnnnnnnnnnnnnnnnnnnnnnnnnnnnnnnnnnnnnnnnnnnnnnnnnnnnnnnnacgggcccctgtaatcccagctactcgagaagctgaggcacgagaatggcttgaacccatgaggcagaggttgcagtgagacaagattgcaccattgcactttagcctgggtaacagagtgagactctgtctaagaaaaaaaaaaaaaaaaaaaaaaaaaaaa

SEQ ID NO: 8053 - DNA, 1092 bp, Macaca Fascicularis
  misc_feature (1)...(1092): n = A,T,C or G
agattatctattttttttgttgtttttgtgagagacagtgtcttgttnnnnnnnnnnnnnnnnnnnnnnnnnnnnnnnnnnnnnnnnnnnnnnnnnnnnnnnnnnnnnnnnnnnnnnnnnnnnnnnnnnnnnnnnnnnnnnnnnnnnnnnnnnnnnnnnnnnnnnnnnnnnnnnnnnnnnnnnnnnnnnnnnntttcttttttggtagagatgggagtcttgctatattgcccaggctggtcttgaagtcctggcttcaagcaattctcctgccnnnnnnnnnnnnnnnnnnnggnnnnnnnnnnnnnnnnnnnnnnnnnnnnnnnnnnnnnnnnnnnnnnnnnnnnnttccaaggccagagacagtaatgagaatggaaaagagatatgggaatactggcagactgtgtaaaatgtaatgcaactacccaaaacaagcctggtaggaaagggcaaggctttaggtctttgtaagaactaaannnnnnnnnnnnnnnnnnnnnnnaccctctgtacccnnnnnnnnnnnnnnnnctctccttccttgttacccatgaaaaactggcaacattccaagaatagcatctgtacaaaggggaaagaacataaaggtaaaacaaaacaaaacacaacattttgagaacaaagatgactgtaaccactgaagggaatcacatcttttaagacaaattcatattcttttatttgttatggcaaatgacaagatggtacaacctttattctctnnnnnnnnnnnnnnnnnngcacagcatctatagtcagccgacaactatttctgccttttgggggtgggtctggccgtacttgtgatttcgatggtacgtgaccctctgctgaagacttgccccctgcccatgtacatagtgcattgtttctgtgggcgggcccagcactttcnnnnnnnnnnnnnctgtatgtgatgaattgcgttggtctctgcatttttctgcagaagaggagtaaccgctctaggtaccttnnnnnnnnnnnnnnnnnnnnnccaacactgtgggtgtgtgactctttagcaaaaaaaaacccatgtggtgatgatgtgtgtatatatataag

SEQ ID NO: 8054 - DNA, 740 bp, Macaca Fascicularis
  misc_feature (1)...(740): n = A,T,C or G
taacaatttagtacnnnnngtgtncttgttgctagtnnnnnnaacgagattnnnnncctcatttttctaattgtagatgtaatctctcacatttatatcagtnnnnnnnnnnnnnntgtgtagcagttactcagcacatatgagagggcagcgaatgaatgagatttgtcatgtgctaataaaagctgaatttttataatctaaaatgatgtattttctactattgctgttaatttgcattgttaaannnnnnnnnnnnnnnnnnnnnnnnnnnnnnnnnnnnnnnnngaccactcattttttcttaaagttgatgacttnnnnnnnnnnnnnnnnnnngtattttnnnnnnnnnnnnnnnnnnnnaaactgtgtatcctcaaacagatgcaaaaagtagtgctttgcaaaatgtttgttttgtgtttatctcagattaacatcctttaatacatgtttcttaagtgtaacttgtatttctgaaaatgcttaaaattattttatatttccctttgggaattttgctctatttccagcnnnnnnnnnnnnnnnnnagatgtaagaagaccaagagttggagtaaagggatattcattnnnnnnnnnnnnnnncttaatagctactgacaaatgtctaaactattgttgtgcccttcaaaactggagttttctaaaataatcttatttttgtacttgtatatcccaatttaagatatatgccattgaaagggaaataaaaca

SEQ ID NO: 8055 - DNA, 1281 bp, Macaca Fascicularis
tctttcctgggactaaggagtgctgcaccccaggcacctcccttccccccacatccctcctcagcctcccctccctagtctttgtgtatttgctaattcacctttcctcccctgcagccatgtggcccccgagccgtcgtcagctctgcctggccttcctgctagtctgtgtcctctctgcgctctccttcttcctccatatccaccaagacagctttccacatggcctacgcctgtcgatcctgtgtccagatcgccgcctggtgacacccccggtggccatcttctgcctgccaggtaccccggtgggccccaacacctcctcttcctgtccccagaactctgcctccctctccggcacctggactatctatcccgatggtcggtttggtaatcagatgggacagtatgccacgctgctggctctggcccagctcaatggccgccgggccttcatcctgcctgccatgcatgccgccctggcgccggtattccgcatcaccctgcccgtgctggccccagaagtggacagccgcacaccgtggcgggagctgcagcttcacgactggatgtcggaggagtatgcggacttgagggatcctttcctgaagctctctggcttcccctgctcttggactttcttccaccatctacgggaacagatccgcagggagttcaccctgcacgaccaccttcgggaagaggcgcagagcgtgctggttcagctccgcctgggccgcacgggggaccgcccgcgcacctttgtgggcgtccacgtgcgccgtggggactatctgcaggttatgcctcagcgctggaagggtgtggtgggcgacagcgcctacctccggcaggccatggactggttccgggcacggcacgaagcccccgtttttgtggttaccagcaacggcatggagtggtgtaaagaaaacatcgacacctcccagggcgacgtgacgtttgctggcgatggacaggaggctacaccgtggaaagactttgccctgctcacacagtgcaaccacaccattatgaccattggcaccttcggcttctgggctgcctacctggctggcggagacactgtctacctggccaacttcaccctgccagactctgagttcctgaagatctttaagccagaggctgccttcctgcccgagtgggtgggcattaatgcagacttgtctccactctggacattggctgagccttgagagccggggagattttctgaaatagcctgatctttctagagccagcagtacgtggcttcag

SEQ ID NO: 8056 - DNA, 773 bp, Macaca Fascicularis
  misc_feature (1)...(773): n = A,T,C or G
gaaaactggcagactnnnanntcacccagtttacaagtcagaacagtattgccaacttctgaattcccacagaggnnnacacaacttggtatgcttcctgggtggcagaataattttggtgaaatgagtgggtgagaagcagtaatttgtcctttactgtgaagggtatatcttggcattcaagcagcctactgggccctaaaaatttcactgatgtannnnnnnnnnnnnnnnnnnnnnnnnnnnnnnnnnnnnnnnnnnnnnnnatgctagctgcttattatttacctcacccnnnnnnnnnnnnnnnnnnnatgtggtaggtcattgtgacattatgtgggatgttcannnnnnnnnnnnnnnnnnnnnnnnnnnnnnnnnnnnnnnnnnnnnnnnnnnncctagggcaatactataaatgggtactgctgtcctatataaacacaaacttaattcttacccagcaccctcannnnnnnnnnnnnnncccgtgctcatggttcctgttggtacatgttggttaggtcctgcatctctttggtcatataagcccatttggaattgaaagtggacacacagaatgagggcaaaacacctgcagaatagctgcttcatcatggtggtgtgggagtttttcatatcaggttttgttacctttgagtttttaaattatgtgtaaagctttgatttaaaaaaaaaactcaattattaaaaagaaactgagacagtctgtctatccacctatctctgtttacctaatgctattgttg

SEQ ID NO: 8057 - DNA, 2252 bp, Macaca Fascicularis
ggttcattttttttttctgttgttttttagttagttcaagatttagagacagaataaccagattggttgggcaataagcttttggaaaaaactattccagaactcactttattcttttaataatcatctctctaaaaaggccctgtcattgcttgacaccctgtgaatgtctgttttcgtatgttgggaatgattcagatgtgtgcataaatgatgtcactgcagtgatgttgatgaatgcattcagcatttccagggattgtggccattccttatgtgctctctgagcccaaagccataatttatgcagtcagtgttttctcttttgctctatctggctggtggatcattgatccctcgaggtttgacagaaatattcaggcttcatgtgaaggcagcattttctttgtaatggaagaacctagttatcctcttcactgtcccgttttaccctatggaatccatgtggccatctaaggtcctgttgatggattggtagtaagaggatggagaagcagaagccagtcccccgagaacagacagtcctgttgcttagatacatgcatattcacacatgtgcccacatctcttcttggaaacatcatgagcagaggtggagaggtctgttctcaatgggaggaatagggataagttccttgagaatagggattctcaaggaatagggataaatgccttcgggggttcaataatttatctgttctctctctctcttctggggtcaggatcaagaaaaatatcaagatttcacctaggcaggaagcaaggagaatagcaaagcatccaggcagaactcttgctgagaaaaacatgaagtagtaaaatcacccttttttgacacaaatgcatttggaagtcaatgagagcacttacagctctgtttcccttcataagcttttcatctcttgcattctttacttctctttctcaatttattcatcttgaggtattcttatcctaaggtggctctgagcagcccaccctcaaaacacaaacaatgttaggatgagaagttgagtgagcacagagctcgaacatgtgcgtggtactgaatgtttccaaacccgagcccaatcagtctagcacagtcaatcccactgcattttaatgactaggatggggcctgctgtacatagctggacatcttggattacagaaaagaggctttgtgtgaagtcagcattttgtgatggagaaacctagttatcctgctaactgtcctattttacctggtggaatccataaggtcctgttgatgcgttggttctaagagaatggagaagcataagtcattctaccgagaacagacagtcttgttgcttagatacatacatattctttacgtcaggattcctcctgagactcttgtacaccttcagtgatcagggcattcactttggttatttcttggtaacaggcacaagaaatgggtcacatagaaatctgaagagtcatttcttgagcatttttagcttaatcccatgtaaagacgcactgagctcctgcagttctagcctgcctcttctcccctccttggggaatggtggagtttctagagtcaccagcaacccattagactccaccacgcttagcctatggtagattctgagtaaatcacagtagttggtatgtgaatacaggagaatttaccataaccatttctccaaataacctcctttgacttggaaataggatcatctttcagttttacagatgagaagtcaaagcatgacaaaattagataattagccaaaagtaagattatacagaaaattcttgacagaatcaaaacttggccgaaccaaaacttgtccaaatttctaactcagcgagtaatgctgcctgaattgtctgtccccactgtaggttttcagcgctgaaaacctacagtcacaaaaatctaggcagctgatttagccagatcttttctatgaaatttccctttgcagacacacacacacacactgcacatacatctacagagacaagtcaaaaagagcaagaaagcaaaaatttgaaaatcagaaaggatagagaggtttccacagtgaagaaaacttggtcaaataaaaatgttttcgaattctatggggtaagatattgtgaataatatttttattattaaaaattttttatgtagcatgtaatccacacaaataaaaagctcaagaaaaaaaaaaaaaaaaaaaaaaaaaaaaaaaaaaaaaaaaaaaaaaaaaaaaaaaaaaaaaaaa

SEQ ID NO: 8058 - DNA, 739 bp, Macaca Fascicularis
  misc_feature (1)...(739): n = A,T,C or G
ccataagcaagtcttaatttctggctccatccgagttgnnnnnnnnnnnnnnnnnnnnnnnnnngcgcatggtgtgttgccatgatttgaccctcaacttctagcagtatatcagatatgaactgagggtgaaatatatttctgaatagctaaatgaagaaatgggaaaaaatcttcaccacaatcagagcaattttattatttttatcgatctgatcataattatgattatcatctttaaaaagcaggaactcctgctttttctttatcagttaaataacccagagagtacgtctgctgtatctctaatagaatcttgtataatatgtaattgtagggaaactgctctcataggaaagttttctgctttttaaatacaaaaatacatagaaatacataaaatctgatgatgaatataaaaaagtaaccagtctcattggaacaagtgttaacattttggaatatgaaacatgttttattagttttgtgatgtactgttttataattttgacttttttcattaattactgtaaaatggtattannnnnnnnnnnnnnnnnnnnnnnnnnnnctgatttgtcttttttttttcatactttcccactggtgctatttttatttccaatggatatttctatattactggtgaggcatttatagtcctctaatgttgattaatatgtgaaaagaaattgtaccaatgtcactaaattattcactttaaaatggctgtttttat

SEQ ID NO: 8059 - DNA, 719 bp, Macaca Fascicularis
  misc_feature (1)...(719): n = A,T,C or G
tcatgccataccatcactgtgcaaagctgtnnnnnnnnngaaggtnnnnnnnnnnnnnnnnnnnnnnnnncgaattgagcatccgactctnnnnnnnncgcnnnaggaatttctcatcagccctgtttcccacacagctctctcctaggcgcagccctccctcaccgccaccaccccctgccccaatcatttttaggtattttctcccctaaagcctcacctattggcatcttatatctttttaagaccttattttaaatgtatgagaaaaattatggaggatgatacaacatgagtgagtccataacggtaacaattggacactaaaaacagtaaaaacttgtctcaagtatttgtgttgaaatctcaattaactgagcgactgcttccgttccattttattctgtaaaatatgtggtatcccttgtgttgaggtggcatttactaaacacccacaaggtgcaagnnnnnnnnnnnnnnnnnnnncnnnnnnnnnnnnnnnnnnnnnnnncctgcgataatgcccaggctggagaaggtgtgtagcaagtttctgttggatgtaagaaggagcgagaagggaaggtgcatctaaaaagcacagggaacctacaaaatacttgggagagggnnnnnnnnnnnnnnnnnnnnnnnnnnnnnngcaaagcaccgtgggggtggccagacaggcttgttggagttgtataatgcaatgaata

SEQ ID NO: 8060 - DNA, 784 bp, Macaca Fascicularis
  misc_feature (1)...(784): n = A,T,C or G
cgagcctctcacnnngagatgtacagtctggtcagcccatcatgtggttgctgccatcgttgctggcctggttctccttggagctgtagtcactggagctggggttgctgctgtgatgtggaggaagaagagctcaaatggataaggagatagaaacagagtgatctactctcaagctgcaagcagcaactgtgcccaacgttctaatgagtctctnnnnnnnnnnnnnnnnnagaccctggggggcctgatgtatgtggggtgttcaggggaacagtgaatgcagctgtgctatggggtttcttcgacttggatgtattgagcatgtgatgggctgtttaaagtgtcactcctcactgtgatggatgtgaatttctccattaatatttttttctatagagtgagacaactgccttgtgtgggactgagaggcaagatttgttcatgccttccctttgtgacttcaagaatcttgactttctttctgcaaatgcacctgaatgtgtctgtattcctgtaggcataatgtgaggaggtggggagaacaccccacccccgtgtccaccatgaccctcttccccacgctgacctgtgctccctccccaatcatctttcctcctccagagaggtggggctaagatgtctccatctgtctcaactttatatgcactgagctgtatcttcttccttccctattacaattagaacctgagtataaatttactttttcaaattcttgccatnnnnnnnnnnnnnnnnnnnnnnntaaaggagaagattcctg

SEQ ID NO: 8061 - DNA, 2233 bp, Macaca Fascicularis
attgaacagcttgtggctcaccccctggctagggtagatgcctctatcccaaaggctttatgctgttcttgatgcctggaactgacttcattcctccccctctctctgttttctgaccctctcgtcttgtatagcaagagttgaaaatgggagtatcttatccgatggaaaggctacgggagcacagaggacacgtgggagccagagcaccgcctcttgcactgtgaggagtttattgatgaattcaatgggctgcacgtgtccaaggacaagaggatcaagtcagggaagcagtccagcacctccaagctcctgcgtgacggtcgaggcccatctgttgagaaactctcccacagaccttcggatcctggaaagagcaaggggacctcccataaacggaagcgaattaaccctcctctggccaagccaaaaaaggggtattcaggcaagccccctgcaggaggtgacagggctgccaagacggtgtcttacaggactacccccagtggtttgcaaataatgcccctgaaaaaggctcagaacgggatggaaaacggggacgccggctctgagaaggatgagaggcactttggaaacgggtcccatcagcctggcttggatttgaatgatcacgttggagagcaagatgtgggcgattgcgacgttaaccatgccacgctggtggagaacgggctcggctctgctctgaccaacgggggattgaacttgcatagtccagtgaagaggaagctggaagcggagaaggactacgtctttgacaagaggctcaggtacagtgtccgccagaatgaaagcaactgtcggtttcgagacatcgtcgtgcggaaggaagaagggttcacgcacatcctgctgtccagtcagacctcggataacaatgccctgacacctgagatcatgaaagaagtccggcgagcgctctgcaacgcagccacagacgacagcaaactgctgctcctcagcgcagtgggcagcgtgttctgcagcggcctggattattcctacctaattggccggttgtccagcgaccggcgaaaggagagcactcggattgcagaagccatcagggactttgtgaaggcctttatccagtttaagaagcctattgtggtggccatcaatgggccagccctgggcctgggcgcctccatcctgcccctctgtgacatcgtgtgggccagtgagaaggcctggttccagacgccctacgccaccatccgcctcacgcctgctggctgctcctcctacaccttcccccagatcctgggtgtcgcactggccaatgagatgctgttctgtgggcggaagctcaccgcccaggaggcctgcagcagggggctggtgtcgcaggtcttctggcccaccacgttcagccaggaggtcatgctgcgggtcaaggagatggcatcctgcagtgccgtggtgttagaggagtccaaatgcctcgtgcggagcttcctgaaatcggtgctggaagacgtgaatgagaaggaatgcctcatgctcaagcagctctggagctcctccaaaggcctggactccctcttcagctacctgcaggacaaaatttatgaagtttgaggggccccagctcacgggcccccaacttctagctctgccctgtgttttggaaaccaaagcacagtgtctgccccggccaaggagtttgtcaaggtgtctctttatacctagggttgtgtccatttcctcgtgtcctttggttgctcctcattggtttgattttgtgtaatggatggaaaatgcagcatacttggcctccccctcctccctgccctacctggccagagagctctccggggctgtatcttcccagggctccgccaagcgccgctgtcctttccccacttgctgaaatgcaccatcacggtccaggaaggggaagaccactttcccattcttctgactcaggctgtgtctacacagtgcctctgacttggagacttggccatcatggctctctccagttgtatttagatcaggtgtcagaggacgatcaatcttagggaatttccagaccaatgagcaaaatgattgtgcacacctggcttcagtctcctctccgatgcaaatctgtgtgactattcgggcttgttcttaaaacccaattgagtgatttacacacccagatattgtacatttagaaatgttttgttaaatatatatttttaaaacaaaaaaaaaaaaaaaaaaa

SEQ ID NO: 8062 - DNA, 722 bp, Macaca Fascicularis
  misc_feature (1)...(722): n = A,T,C or G
gacatgaatgacnnnattactgtatgcgcattacttgattttgaggggcactctaccttggttatgattcagtagaggaaaaagacctcctttcttcaatttacaaattaaatcttcaggaggatcgccatcacaaaacattgacgatgtatgtattataattttttagaaaaaccaccattgtgtcacgtcgacgatgccaaattatgttagcgtgagcagaaacactgtgggggaggaaagcagcagctgaagaaaaaagctcaaatgatctagtcactttcgatactgtacttcagatgcgaaatggatattcgactggaaacctgacaaagtgcgcctgctttgatgtgaactggtatagacaatgaccagtggctgggtcagtgggatgtctctctgcgagcacaaaggcttatcaaatgacactaaaaataagttcaacaaccatcacattggaagggagaaggcgaacatttcatgtttggcgggcatgcgagtgcacaagatggaaagagcgattggagcatcctggtataattacccccattgtgctcttaatggaaatttcaaaggatgggagtattctgttggttggtgtccaggtttgtggcactgttccaagaggccttacacacacacacaaatatataattttctatacatatatatcctctagcttgaaacttttgctcaagtttatttatgtcactggctggctg

SEQ ID NO: 8063 - DNA, 1355 bp, Macaca Fascicularis
  misc_feature (1)...(1355): n = A,T,C or G
tcattgaactttaaaaaaaaaatctccttgcttttaaaaaatacaagtattactcacatagttttcagatcttttttgtctgaagagcattaaatatctgcacttatcaaagggaatatagcagatgttgatcatctgtcagcagttttgcatgtggcacctttatacgaattattttcccaattttcgctttctgtannnnnnnnnnnnnnnactgtaagacttggcaaatgctgtagaaaaggttcgggtttcaggatctctctgaaggcatcgttcctgggcgtccggcacctgcaagggtgtgcgttgcacagccctggaggccagcagctcctctcttctctaggagtttcgagttttcagaggtgcagggaaggcagttttacaggttaccataaaatagaggttccgtctattccatccagtgttccttacaatgcctccccatttaaaaagaaaagagatctgtggaaaaccgggaatgtcacgtggattctgtcagagcttcnnnnnnnnnnnnnnnnnnnnngtttcctttaaagatgtaaaaatattgtataatannnnnnnnnnnnnnnnnaattgtatttgccaagcttagtgcattatgatacctttatttatttgttttgggcagtatttatatatatatatataaacatacagttactgttttatatattcttaggtcattcaaagccatgtnnnnnnnnnatgtgctagtctttagaatgacacataataaataactgacaagatattaaatgtggtcttgcctgattgatcctattgggaggnnnnnnnnnnnnnnnnnnnnnnnnnnnnnnnnnnnnnnnnnnnngcattgcgttgagagctcgggtgctgagtacatatgtttgtaaacatgggaccgtgggagacttccattttataagctnnnnnnnnnnnnnnnnnnnnnnnnnnnncaacagggtcgaggactttgggaacggccagannnnnnnnnnnnnnnnnnnnnnnnnnnnnnnnnnnnnnnnnnnnnnnnnnnnnnnnnnnnnnnnnnnnnnctccgtgtcctcgtgtgcaaagtnnnnnnnnnnnnnnnnnnnnnnnnnnnnnnnnnnnnnnnnnnnnnnnnnnnnnnnnnnnnnnnnnnnnnnnnnnnnnnnnnttacctttccgtccgtgaacatggaccacatcacctccgtgggtaacccagtccttgttgtnnnnnnnnnnnnnnnnnnnnnnnnnnnnnnnnnnnnnnnnnnnnnnnnnnnnnnnnnnnnnnnnnnnnnnnnnnnnnnnnnnnnnnttctaggcacacacgacccgttatctccctggaaaaatcctctcactggaaa

SEQ ID NO: 8064 - DNA, 751 bp, Macaca Fascicularis
  misc_feature (1)...(751): n = A,T,C or G
gaannnnnnnnnnnnnnnnnnnnngcagttcaaggccctttaatttaaccttccaaaaacagcaaactcattttaaagactcattgctgaggtgatagagacaaaccttatcctctccaacctttacattcgcaaaaaccatccttgtgtgcttgactgccccagacagtggtgactcttaggtttcattacgaatgtggaagatcagaatgtgggaaggcccgggcgagggccaatgttgtgtttcttaccccctctggaatgccaaaggcaaggtactaggtgacctcctggtccccaagaaaatgtgatttattctgagggcgaacagccaaaggaggactcagcctggagcaggcttgaccgtcctggcaggagctgagcnnnnnnnnnnnnnnnnnnnnnnnnnnnnnnnnnnnnnnnnnnnnnnnnnnnnnnnncttttgtaaatccacctgttgttctgaggacctctgaactagcagcttcagcaaaaggagtctgtaccaagctgcctctggatgaccaacactggagactctggccttaccatnnnnnnnnnnnnnnnctgaagtctggaactaattttgagaagtttttttctcaacacttttgtgtttctaacactgtatcttgactgtgtaaataccaacaaggctgtaaataaatgcagatgtagataccttctagaaaaaaaaaaaaaaggcataaaaacaaaaccagaagtgatcccgtgtagccttcgtgacaa

SEQ ID NO: 8065 - DNA, 2309 bp, Macaca Fascicularis
  misc_feature (1)...(2309): n = A,T,C or G
aattgtctgatggtcctcctagggcttgtttctcttagattgagatgcatcccttgtctgtatagtggagcccctgaagaaggccttccctgggatccttcttggtagaagggatagtaacctggtggatgagctgaagggcacatgcttggcaaatgatgagactggcggagcagctggagcacaaagcagtgcttcacttgccctgctgcggaactttaggagaatgaagtccacaaccaagcaacaccagaaccagcatctataagaatggtgagattggctctcaatccaagaaacagtctgattatatatggtcaaggacagcatgaaagaatacaaagagatgccaggagccgagtagggataatgccaaggctttagcgatacataccactgaactcagccagcaagaactgctacttccatccccctcggccataggcagatgccatcaacgccctgaggctctacaagctccaatagtcttagaggctaaaaggactcaaattaccaaactttcagaaggaacgcgaaggaaaatcctctttacctgataccataatcagcgaagaaatcattgccaaatccagtgtcatgaagattttcccctgactctaccccttttaagggaagaactactaggttagacggcaacagaataacagcccagccaatagcatgggatacagtcttcatagttgacaagagaagcagaggtttcaaactcatgccaagagattgagtctctgtagatactgagaacttggatctgcatcctctggagtggtgatctccaaatgttatgacagtacatctttattggttcaggcgattctcctgcctcagcctcccaagtagctggaattacaggtacatgnnnnnnnnnnnnnnnnnnnnnnnnnnnnnnnnnnnnnnnnnnnnnnnnnnnnnnnnnnnnnnnnnnnnnnnnnnnnnnnnnnnnnnnnnnnnnnnnnnnnnnnnnnnnnnnnnnnnnnnnnnnnnnnnnnnnnnnnnnnnnnnnnnggcctcacaccatttaaaataactcatcaaatcttttcagttactttggaatatctagatgaaatgatccatcagggagcaagatatttggatctggagttcatgaaagagagctctgatcaagaaagagagagacagagagagaaaaagcttgatcacaaagcttggagtgaatgggtgttgaagagaggagtgcttcatagtaagatctgcgaatggtgaaatcatggattcaggtttataatgccagtgaacagccagaactgatgaaatattagttgcatctggttacagagtatggccatgtacttcacttgaagattcttcattctcctcaacatatcaactcctcattcccctacaaaattcagctctttgtcagcacatccaaagtcttcactgaaccccgaaggcataaacaaaaatcttaaaggctatttgggatgcctctaactcacctaaagcaggaataacgtgatttcctatcacgtgggaatggtgagaggattaagaagacacagtgagtgtccaacacatagaaggccttcagtaaagatcaattagagttttcaacacaatcatgaagagttccttcactcctgtgttcagtggacagaaaaagcttctaagacctgggacagactaagaccggtgcaaaaggagaagaactgaagggtgcagagacaatagagtcgtacaaagcatgctgttcccaccaccatcactactccaccactcaggaactggcgatgatctgttgtatgagtttctggtctgctgaaccaacagagagaccattgctgatctgtaacaaaaggaaaagacccaaaaagccaagaaagaaaagccaaggggaaccctcactacctctacctggaagagatgacatttccacagtcagagctgatacaacaggagttgtcttgaatcatctcaaaccatcttaccagtatcttccaagagagctgcatgccagtctagagagccccagcagccagaggctgtgagcttgaccacccatgaaggtgggaagtgggaagagactaagcctcaaacaggactcttgcaaggaagctgactatataagatgggtgcccttgagatcttccccaaaatataatccatatatgtcctcacaagacagtcagtatttatagtcctatgacacagaagggactacaagccagaataataaaatcaagtccaaaaggtcaagaaaaaacaactatgaaaaaccataaaaggaaataccttttaaaaaaaaaaaaaaaaaaaaaaaaaaa

SEQ ID NO: 8066 - DNA, 563 bp, Macaca Fascicularis
  misc_feature (1)...(563): n = A,T,C or G
ggctggagtgccgtgatgcgatctgtgctcannnnnnnnnnnnnnnnnnnnnnnnnnnnnnnnnnnnnnnnnnnnnnnnnnnnnnnnnnnnnnnnnnnnnnnnnnnnnnnnnnnnnnnnnnnnnnnnnnnnnnnnnnnnnnnnnnnnnnnnnnnnnnnnnnnnnnnnnnnnnnnnnnnnnnnnnnnnnnnnnnnnnnnnnnnnnnnnnnnnnnnnnnnnnnnnnnnnnnnnnnnnnnnnnnnnnnnnnnnntgtgcccagtctttttatatcattttgaaattaagtttattaaaacattaagtagaatattcaaagtttacattttaaaacctttttttgtttaaccctcgactatatttctaaaactgaacagacatattttttatttcctgaaagtattaaatattcaagatcttggtagtgcctcacatcctaattttgaatatgggttgagtgaaataattatgtaaaagtactgtgtcacctgtaaagaaccaaataaatgtaatttgttggattttacgtgttggaagtatagaagattccctgtttattctgatt

SEQ ID NO: 8067 - DNA, 735 bp, Macaca Fascicularis
  misc_feature (1)...(735): n = A,T,C or G
aactcaagacaaacatgatttttacctctaatagcctaacatttcatgtgggccgaagaataaannnttccagtcaaaaatggagaccttacctcatttgggcnnnnnnnnnnnnnnnnnnttgaagatttactaataaatgatctattaaggaatttagttttttctgaatatgttgttttggttgttgaaacctaaggtataatagttattttttgaagatatgtttggctagccatcaattagaagttagagtttgtcctaacagataagctataaccctcacattttaaaacatacataatgaacaatgaacaaaaacaaattttaaattttactaatgtggcaaagctgtatattgtgattgttaaaacactgtttttgcctaggagttccannnnnnnnnnnnnnntctacacttcccaaacctcannnnnnnnntgtagcctctctaacctgaatttttttgtttgtaacatagggacatttaatagtacctacctcagagttgtgaagactaaatgaagtaccacttgtaaagagtttattacagtgcctgacatatactgtatggttagtactgctaaaatnnnnnnnnnnnnnnnnnaaaaggaaaattccacaaactgaccacctttcctattgtgaaggtcactggtatttcaactatgatcccttgttgtgtatttatccagactgaaagatgtttttctagtaaccatcttgcatagtctt

SEQ ID NO: 8068 - DNA, 668 bp, Macaca Fascicularis
cacccccgacccccaccccacaccatttcctagaatggacatatctttcaagggaaaaaaaaaaacatgtctctggggtatttcacaatatattttctttgtataatgttctttacttaaagaacaagaaatagttttttataaaactttaaaaaggaaaaaaaaacaggcatttataactgagggtatgaacttatatccaccaggtctcttgtccctgcacttcattttctttggaagaaaatgatgtctaaataacaatatagaggcatttttacatacgtatttaaatgaaaaggaaaatcgtggtttcttaaattgataaggattaagaatattttattataaatataatatatgattttttaacctgttttgttgcctcatatgctgtcaggttaatttgttttccttcgtgccagagtgggggaggaagacactctgtctgctgggtaaatgcctaaattcactcaccttcatggtttgggggcagcatggtcattgtggatattggttttgtggagttgagggaacttaggatataagttcactccctctatttttctttgtgattcagtttttcaaaaatctttttttcttccctttctccccaatgtggaaattacaaatcaaaggcctttttctttaatgtaaagtgtatttattaa

SEQ ID NO: 8069 - DNA, 570 bp, Macaca Fascicularis
  misc_feature (1)...(570): n = A,T,C or G
ctaccaccccccaccaccaaacttggtctcttcctgctacccactccccccactccagctgttnnnnnnnnnnnnnnnnnnnnnnnnnnnnnnnnnnnnnnnnnnnnnnnnnnnnnnnnnnnnnnnnnnnnnnnnnnnnnnnnnnnnnnnnnnnnnnnnnnnnnnnnnnnnnnnnnnnnnnnnnnnnnnnnnnnnnnnnnnnnnnnnnnnnnnnnnnnnnnnnnnnnnnnnnnnnnnnnnnnnnnnnnnnnnnnnnnnnnnnnnnnnnnnnnnnnnnnnnnnnnnnnnnnnnnnnnnnnnnnnnnnnnnnnnnnnnnnnnnnnnnnnnnnnnnnnnnnnnnnnnnnnnnnnnnnnnnnnnnnnnnnnnnngccactccagctgttttgtgttttacaaacacatttgacacatttctgcttcagggcctttgcactgggtgttcctctgcctagacaaatactctccccctggatatccacagctctctccaagtcatttcagtgagaccttctcattccctcctatttaaaattgcaccctccacccttggaattccccttttctgttt

SEQ ID NO: 8070 - DNA, 1885 bp, Macaca Fascicularis
  misc_feature (1)...(1885): n = A,T,C or G
cttgttaagtgtgggtgggacttgtgacttctaaccaacagaatatagcagaggtgatgggatggcactcctgtgattatattacaattatacatcaaattcttgtagccttgagacaaattagtgctagtttggttttggttttgctacctaaatggaaagatcctaactgaaatagcagcatgtttgtcacgtaaaaccagtgagtggtgtactatcaacactctgattttccttgagccactaaagtggacatcatggtctcctttctggctaggtatcaggctgaggtttttctgggcaatggatatgaatgtctcctggccttcctgtagcactaatgctgaaagagctggctggctcatcttggtcaggcacttaattttctcgtggttggcctcagaatgcgaggtctttctgtcaagatcattgcctctattgctttgagatttccttttgacatttgagctcctttggagcactaccttgctttctggaagattttgaatagtgagtgatatctcttagaagactttggtctgccaacttgttcatgacaaagtttgcagatagaggagataatttagcaaaattttactatttcaaactccaacatttaccaaaaattaagtagtgtgatttggtctaaattttacttcaaattatgcctcattcttttattcttaaatattttctggtatcttaatattttcaatagttttatcagattaaatgtagaccaaattcttaaagttggtctttagctttcaacttattgtatgtgtttggctgtaaagagtaaacctatgatatcttctttctgaggctccaatgtgcacattgtgtcttagtttagaaagtgagatgatatttaattttccaaataagtattagttgttggccgggcgtggtggctcacgcctataatcccaacactttgggaggccaagccaggtggatcacaagatcaggagatcgagnnnnnnnnnnnnnnnnnnnnnnnnnnnnnnnnnnnnnnnnnnnnnnnnnnnnnnnnnnnnnnnnnnnnnnnnnnnnnnnnnnnnnnnnnnnnnnnnnnnnnnnnnnnnnnnnnnnnnnnnnnnnnnnnnnnnnnnnnnnnnnnnnnnnnnnnnnnnnnnnnnnnnnnnnnnnnnnnnnnnnnnnnnnnnnnnnnnnnnncaaaaacaaaaaaacagaagaagaagaagcatttgttgttaggaaaacaaggaacccctgaagaactcctttcttgaactttctacattagtaaagagaaactatttaagcaaaaatgcaattttgtttatagcgttcatccagcacagttaattttgatcactttaaacattctagtcaatatattttctagattctagaaatcttgttcaaatactaacactggagtaaaccagaaatcttaattaatattgataaccaaaggtgcatgatctgaatattgctcatgacatccatatattgtataacatcacctagatgcaaactttgcaaaatttgttttagctctaacaaattctgctaggaagtgattttgattttcattgctatttttgcagagtaatctataataaaggatttgttcttttgcactgaggatctggagtcataaagctttttgtcagctgtgggactatcaatcaatgtgtttcaaataagtgaccactaatggagctcagttttgcaaagggtgtgctgctttgccacagagaaaaactgattgtggccgggcgaggtggttcacacctgtaatcctagcactttgggaggctgaggtgggtggatcatgaggtcagaaggtcgagactaccctggccaacatggtgaaccccagtctctactaaaaatacaaaaaaaaaaaaaaaaa

SEQ ID NO: 8071 - DNA, 751 bp, Macaca Fascicularis
  misc_feature (1)...(751): n = A,T,C or G
gacgacacagtgatgatnnnntaaaggacccgtatgtgacgcagaagaagcatgnnnnnnnnnnnnnnnnnnnnnntgaggtaaagccggaggaggttcgggagaacaaaggcaggtccccggaaagagccaaggccaggcaggaggagcnnnnnnnnnnnnntgagagccggggccggacagcctcagaccagagagccggccctgccaggcatcggcggtcggannnnnnnnnnnnnnnnnnnnnnnnnnnnnnnnnnnnnnnnnnnnnnnnnnnnnnnnnnnnnnnnnnnnnnnnngctctgcagcccggaggacatgtggggctcgccctcccctcccaggccaggctgcgggcaggcgttctacagcctccccgtctcccacaccacccacgcgccctgagcttgcaggagccgcctgcctcctggagtcctnnnnnnnnnnnnnnnnnnnnncacacgccctacatacacgctggcgttctcgccttcccagagtgggaaggagctagaaccaggggaaagatggcgggccagagcgtccctctgccgtgtggctcaggggaagcagctctgctcacatctccaggatctgccttggaggctcaggaggaggtgggtccggagccagcggagggctttgcatcccagacccgcnnnnnnnnnnnnnnnnnnnnntaggaannnnnnnnnncctctagagtctcagttccctcatctgtaaaatggggatgattgtaggacctgaa

SEQ ID NO: 8072 - DNA, 382 bp, Macaca Fascicularis
agagaccaggtatatgcctcccatctttgagctatgagcaagctaaaagacgacactatttctcaccatttgtgggaaatggcatggggaacaaagaatgaaatgggccttaagcccacctgctaccttgcagaaccatctgaagccccatggtgagtagatccttataggacctcgacaggctatttcccaccccccagccaaaaatagctcagaatctgcccatccagggctgtattaatgatttatgtaaaggcagatggtttatttctactttgtaaaagggaaaagttgaggttctggaaggataaatgatttgctcatgagacaaaatcaaggttagaagttacatggaattgtaggaccagagccatatcattag

SEQ ID NO: 8073 - DNA, 428 bp, Macaca Fascicularis
cagatatggttgttacgcactcccgcacccacaaaaaaaaataaaaaaaaaaaaaaggtcccacctctacatattgttacaatggcaatcaaatttctttttttaatcctgcaaactactgggatggtaattaaatttctacgtgtgagtttaggggggaacaaacattcaaactgtagcagtgtttttccatgcacatttaccaatcggtacttcctcctcttctcaccctgtattttccatgcctcaggcaagtctgagttattctcagccaactgaacaatccgtaagtgtttatttgttgaaagctcagctatgcacctagcactgtaaatagaaaaatagcaacatctatatatgaaaatatgcaggactagaaattacttagtagaaatatattgatgtatttttttttttaatttttaaaa

SEQ ID NO: 8074 - DNA, 650 bp, Macaca Fascicularis
  misc_feature (1)...(650): n = A,T,C or G
cccaaagtgttgggattacaggtgtgagccactgtgcccagccaaggaaaatcttaaaagcaaagaaaagatacagagagaaaacatacagaaagataaaaataagaatgagagcatgttttttttcagtggacatattaaagcaagaagacagtggagcaacattttgaaagtactgaaaaccctttcaacctagaattctatacccagcaaaactatttttcagaactgacaatgaaataaagacattttcatgagtttcaagttcaaggttaagtggaaaaaaaattaaaaaataaaaaaagacattgtcagacaaacaacagctaaaataactcagataactcatcagcagcagacgtgtactacaagaaacgttaaaggaagtctttcaagctgatagaaatgtgaatttacacaaggaatgagaggcactgggaatggtgagtacacaggaaaatacatgattttctgttgctatataaatgtctcccagtgataattgaccatttaaacaaaataataacaatgtttnnnnnnnnnnnnnnncaagtataagtaaagtgaatgccgacaatagcaaaaaccccatgatgggagaaatgggagtatttgtacaacagcaattccacaaaaactgtccaagggat

SEQ ID NO: 8075 - DNA, 719 bp, Macaca Fascicularis
  misc_feature (1)...(719): n = A,T,C or G
tactgtgctgtgnnagctgataactgttgtcccatgatgaaaccctagcttgagaatccccttgaacttggaaatccccagcggggaccaattacttactgagcagtcacttcacattaattttcgagggtttggtccagatccgttgcagtgttcctcacactgggcaccacctgccagatctgtcccgcagaccctgactgactgactgactgacggatggaaagagtactcacacacaggtatgcagtgtgtaagagcagctaggagtcacctggctcaagtggccaaagtgcagccccgagaagctggagctgcttgcttttattcaatgcaggcagaatgctgaaagcctggggcaaacacagtctgtgggtaattaacatttattgttcccctttcagggaatgtcacacacatggatgttcaaaggtgaatttcaggataacttcaaacaaacaagcctgatcaagataatttccccttgctcccttgcacatactcctcactctctgcctcaaggttaacagctgccttcagctattctcctgaagttgtgcagagcattgctataagctcctttaactctgcctatataaatgaaatctgaacttccctatttcagaattatatctctattactttggatttggtgtttccaggtggtccatccttatgttttgtgcttgaataaattctttatattcttcatggtgcaa

SEQ ID NO: 8076 - DNA, 142 bp, Macaca Fascicularis
tacttttacatacgcctaatgtacaccacctccgtgacactatgccctacatccaacaacacaaaaataacatgacaactcgaaaacacgaaacccataccccttatccccccgctcatcatcacctctacccttctactac

SEQ ID NO: 8077 - DNA, 4521 bp, Macaca Fascicularis
agaaacaaagttggtcacaaatcacattagctttgcccgaagtttttccccacactcttctttagcatgctattatggggaaagtgacctctcgtgggagcgggggtggtcggggctgttcggtggcgggggagcggctgtaacttctacgtgaccatggtacctgttgaaaacacggagggccccaatctgctgaaccagaaggggacagccgtggagacggagggcagctaccgagccagcggcagccggcatcctccctgggcgagaggttgcggcatgtttaccttcctgtcatctgtcactgccgctgtcagtggcctcctggtgggttatgaacttgggatcatctctggggctcttcttcagatcaaaaccttattaaccctgagctgccatgagcaggaaatggttgtgagctccctcctcattggagccctcctcgcctcactcaccggaggggtcctgatagacaggtatggaagaaggaccgcaatcatcttgtcatcctgcctgcttggactcggaagcttagtcttgatcctcagtttatcctacacggttcttatagtgggacgcattgccataggggtctccatctccctctcctccattgccacttgtgtttacatcgcagagattgctcctcaacacagaagaggccttcttgtgtcactgaatgagctgatgattgtcatcggcattctttctgcttatatttcaaattacgcatttgccaatgttttccatggctggaagtacatgtttggtcttgtgattcccttgggaattttgcaagcaattgcaatgtattttcttcctccaagccctcggtttctggtgatgaaaggacaagagggagctgctagcaaggttcttggaaggttaagagcactctcagatgcaactgaggaactcactgtgatcaaatcatccttgaaagatgaatatcagtatagtttttgggatctgtttcgttcaaaagacaacatgcggacccgaataatgataggactaacactggtattttttgtacaaatcactggccagccaaacatattgttctatgcatcaactgttttgaagtcagttggatttcaaagcaatgaggcagcaagcctcgcctccactggggttggagtcgtcaaagtcattagcaccatccccgccactcttcttgtagaccatgtcggcagcaaaacattcctctgcattggctcctctgtgatggcagcttcgttggtgaccatgggcatcgtaaatctcaacatccacatgaacttcaccaatatctgcagaagccacaattctatcaaccagtccttggatgagtctgtgatttatggaccaggaaacctgtcagccagcaacaatactctcagagaccactttaaaggaattgcttcccatagcagaagctcactcatgcccctgagaaatgatgtggataagagaggggagacgacctcagcatccttgctaaatgctgtattaagccacactgaataccagatagtcacagaccctggggacgtcccagcttttttgaaatggctgtccttagccagcttgcttgtttatgttgctgctttttcaattggtctaggaccaatgccctggctggtgctcagcgagatctttcctggtgggatcagaggacgagccatggctttaacttctagcatgaactggggcatcaatcttctcatctcgctgacatttttgactgtaaccgatcttattggcctgccatgggtgtgctttatatatacaatcatgagtctagcatccctgctttttgttgttatgtttatacctgagacaaaggggtgctctttggaacaaatatcaatggagctagcaaaagtgaactatgtgaaaaacaacatttgctttatgagtcatcaccaagaagaattagtgccaagacagcctcaaaaaagaaaaccccaggagcagctcttggagtgtaacaagctgtgtggtaggggccaatccaggcagctttctccagagaactaatggtctcaacaccttctgaacgtggatagtgccagaacgcttaggagggtgtctttggaccggtgcatagttgtgactcctgtgctttcttttcagtgtcatggaactggttttgaagagacactgaaatggtaaagacagcctttaatcccctcttccccaaaaggaacctcaaaaggtagacgaggtacaaggtcctaagtgatctttcttattctgagtaggatatcaggttaaaaaagaagttactggctggtttcatactttctaccttcacagagcagcctttgaatagactatgtcctagtgcagacatcaacctctgccttaagctatgtatgtacggaggccagtcacagctttattattcagacacacaagtggtctggacgtaagggtacaggttttgcctaccaagacactgcttgcagtgggtcctacgcaaaaaagaaccagaacacacagtgtggacaactgcccatgtattccatctagattaggagagggtcctggctaggattttagtggtaattcctagttacattcaacaagtataaagattatagagcttattttatgaactataaactacaatttaatgcaaaatatccttttatgaatttcatgttaatattgtgaaatattaaaattattctgcaatagttgagaaaaatgagcatttttttccatttttaaaaaatgcatagaaaagacaattttaaaatcctgggaccatatttatttagaagtagctgctagtaaaacattagaaaaggagtcaggccattaggttatttatccaaatctctaagcaattaggttgaagttattaagtcaagcctagaaaagctgcctccgtgtaaggctttcatgacaatgtatagtaatccacagtgtcctgcaattcttcacactcctcaggaatatcaatacctcaggttacggcacacaggctacactcgatgatgactttcagtgaccgaagacacaataaatgacattcagacatcaggacaattccctcgtatgttcttctctatgatggcggcctgtacaagcaatgtgggtttcacccacacaacgatgaactgttctctacttctccagctgattttaaagacttggtaagaggtctcactaataaaatttgggtatgatgatagaaaatccataatcaaatcttgaaccaagtaacatattaaattactaatactgtaagtgatggaagacacagaaaaaacgtaaaagcacgaacaacctaacttgaaaaagaattttaaaatatgattaacctaaagagaatcctaagagccagctccttcttacttagcttggaattttcccattggttcccaataaactgtcccaatgtcatataaggcaacatgatctactacattcctttataacaatgtggagagactataaacctatgtaagtagtaaaactataagatcagagactcaggagactgactaaaaggcctgatctgcagtgtattatctgtattaaaattgcaggcgaagctaaaaggaaaggagatttgagatctcaattctatcacagtgtatttcacatgcaagtcagagcatgcattgttgtttgtttttggaaagagaagggaagtgtgttctgccccacgtttccttccgtgtttatagttcaaacactatatatactttagttattttttggtttagccattcattataaatgggcaggaaactgtttatcagcctagccggtttattactagtgacctcgacttcagtatcttgagtattcttttgcatttttattttaatatcccgagtctgtaactaaacaattttgtctctaaatttgtatccaatgttcattgccccacaccaaatcaagctttttgattttcaaaaatgaaaagggggaaatacttacaacttatacatatatattcacagtttttatttataaaaaaaatttacagtacttatggagagccagcagaagacatcagagcactcacttcttcccatcttcgttaaggttagtgaattacccatggacactgctaggtgaggctcactcagcagccctgaaaacagacccggtcacactgtctttaccctctcccttcagataaagcacttcgattagctattgatctgcacagttttcaagtcatgtgaatactgaaaaggttgtatcatctggatctgtaccttggctatataagcatgttttcccccattctacatttctttttttggtgaacattgcaaaacaggaggtgacttattacggttaattaaaactaaatgaaaatgtcaaatctttaaaacagtgagcttgtaactctttcatgtaattttattctctatatgagtttggctatcctactgaatcttaaaataaaggaaataaacattttttttttttaaaaggaaaaataaaagtctaacaattccaatgaaaaaaaaaaaaaaaaaaaaaaaaaaaaaaaaaaaaaaaaaaaaaaaa

SEQ ID NO: 8078 - DNA, 731 bp, Macaca Fascicularis
  misc_feature (1)...(731): n = A,T,C or G
agtcnnnnnnnnnnnnnnnnnnnnnngccatcattgtgggtagcatcatcaccaagtgctccatcnnnnnnnnnnnnnnnnnnnnnnnnnnnnnnnnnnnnnnnnnnnnnnnnnnnnnnnnnnnnnnnnnnnnnnnnnnnnnnnnnnnnnnnnataannnnnnnnnnnnnnnnnnnngggtgctggatgccnnagtcttccacttcctggggttccggacagagaagcgtgaannnnnnnnnnnnnnnnnnnnntgcctcctgactttggtcnnnnnnnnnnnnnnnnnnnnnnnnncagaccagaaagaggccctcttagaactgctccggctgcagccccatccacagctatccccnnnnnnnnnnnnnnnnnnnnnnnnnnnnnnnnnncgagatgtggaagatgttcccatcaccatggagtgagaaaacagtcagttgtcctggcnnnnnnnnnntggaaggacacnnnnnnnnnnnnnnnnnnnnnnnnnngacaccaaaccttaatggctaaagacccagatcagggcagtgacagatcannnnnnnnnnnnnnnnnnnnnnnnnnnnnnaggaaggactgagggtctggctggttccctcttccattctaggcccttacccctgttcagttctgagagccgacttataccatacactggcattcccagtccccagctggggcttggtgtgagtactttttctatggctattgtgtcaggtcac

SEQ ID NO: 8079 - DNA, 680 bp, Macaca Fascicularis
gatatgctagatgtgtattgaatcacagattaaaaataaaatatgtaaggcttaaattccattttagagtactgactctgtaatgataacgagtggtattactttttaaatacatggtgtacatatggtataaatatgataacattctaggatattaattataaaccagtagtgggagtagggactgtgcccatattcattagcctatcagacattgagttttttaattttagtgtatcttgcaagtgcagctgcaacattagtcttctaataacctactctttctactagattactgcccataaactcctttaatacagaaattctggaactgccctctcttggttagtgctggagatgggtaaatcattagtcaaactaggctattaaaccattaattgaaataaatgctcttgaaatagttcagtctatccaatcttattagccatatccttcaaattggttaatggttcttttaccgtcaaatcttattcatttgatttgcctttctttgatgtatcaagccaatcacaaaattctcttgatgatgttaacagaattatgtcagccatcaccgaagtaacaaaagccctcatattatcatttataataagagcctatagtctttccattttatctttcatattgttgctgtaatgaatttttttaatgcaatgttt

SEQ ID NO: 8080 - DNA, 726 bp, Macaca Fascicularis
  misc_feature (1)...(726): n = A,T,C or G
aacagggatatacatccaaggtgggtatatggtaatgtgggtgaaatactagcattgactaaaatagaaagaggtcctcggaagaaagtctaaggcaggatagaacagacccagttaaaataagaaaccaaaatcttcccatatctgggataaaatagagaaacaaggaggaaaaatcatcaagcttcccagagggatggatgggcttgagctctctatgccagaggaaaaaatggtggaaaggtagttagacccctgtttttgtatcttacggctttgcttctaccannnnnnnnatggatgtggataaaaccaataacaagttaaatgaatactacaggtttgnnnnnnnnnnnnnnnnnnnattgagtgactaaggtgatcaatttcatctggttgacagtcatcattcgaagttttttatttcccacaattatatattctttgctgctcattcttgagaaagaagtataaactctaattgaaaattcatattataagcaaactttgttgtgtgtttgcttcataatgacacatgtataaaagttaggattatagctttttatttgtatttggaaaaaatgtattaaggtagcccttgtttttaatgctaatatgggattatggataatttctttaataaatgtttattttattaannnnnnnnnnnnnnnngctaaataaaataattagatacttaatatatctaagctgtataacagaatg

SEQ ID NO: 8081 - DNA, 764 bp, Macaca Fascicularis
  misc_feature (1)...(764): n = A,T,C or G
atggctgtacntttttgttactgtgcaataatgtaaaatgtttaccttacatagccaagggccaagtgaaattatatcaccttccacagtgttctaactccaaggacccttttctacatggaacttcnnnnnnnnnnnnnnnnnnnnnnataaaatgaacctgaatgttcactttaattacattaagcctaattgtttcctgtgaatacagatatgttttcagcatatttctgccgtggctctttttccttctgggcccagagtccttgggccaggcttgatgtggtaatgtgcattataaatcagtcgtagctttgtggtgacttactattaacgtctgcaagctctgaagttaaatgagatgatgtaaaccattttaagaaatcatgcctaattaataatgtattttgatgttgtttgctgttttattacatttataaaagagtagaattcaatgcagctcagccagggatgatgaatatcctctcagtttttattacaaagacaatcaggaaaatttcatgtatagaaataagtggctttctattcaaattatcagctagcctatgctgtaaaaagggacttttttctgtttttaaaaaatgtttgctacaagagtagaaaataatatgtatttaaattttattaagttagaatagttatgagtgttatatattttaaaccactatctgaggttgtaagctaaattaggagtaatgctatataatcaacctcacctgtgaaatggaccgtgcaaaacatta

SEQ ID NO: 8082 - DNA, 666 bp, Macaca Fascicularis
  misc_feature (1)...(666): n = A,T,C or G
gggatgtgttaaatagcagatgagacatagctagagggannnnnnnnnnnnnnnnnnnnagannngaaggaattgattctcacacccccactcattcacttttccaataaacatatagtacctattatatgctaagaaatgtgccaggccatgggaataaagaggtgaataaagacacattcnctgcccttgaggggaaatcagccatgtgtatactaaaagatataataaagaatcctgggtgccatattagattttnnnnnnnnnnnnnnnnnnnnnnnnnnnnnnnnnnnnnnnnnnntttctgggacattaggaaagacttcttgtaggaggttacctaatgccattagtataaaatccaaactccttcccaagcctaccaggccctgtgtgatctatcgctgcctatctcactccagcttcatatcatgcctctcttgtccacacttactgagtgctagtcacatgaaacttctttaagtttcaggaaaactctgtatttagatctgtccagtatgatagtcattagctacatnnnnnnnnnnnnnnnnnnnnnnnnnnnnnnnnnnnnnnnnnttacgctatgcatgtgaaatatattccagattttggtaacttagcacaaaaaagaatgtaaaacattccattaataaggcttttgta

SEQ ID NO: 8083 - DNA, 719 bp, Macaca Fascicularis
gtggatattaataagcgtacacttctggaaacagaagttgtaaagagctgtctctctcggtccaatgaacaatgctctttcattgaatataaggattttaagctgatatatcggcagtatgcagctctcttcattgtggttggagttaatgacactgagaacgagatggctatttatgaattcattcataactttgtggaagttttagatgagtatttcagccgagtgagtgaattagacataatgtttaatttggataaagtacacatcattttggatgagatggtgttaaatggctgcattgtggaaactaacagggcaagaattcttgcccctctactaattcttgataagatgtcagaaagctgaaaggaagcctcttccagacaacatggatttatcagaaatgcgagtaccgtggaatacatctcaacatctgtaaccaagaagaatctggaagaccacaattacaaaatggggtatccttccaaagacattataaatcggcgtttcccacagttcctaaaaagaaaacaaagctgtactttaaaatatgtaaaagaaaaaaaatttttttaaactgagagagaagttttatattctaattgtaaacatatctttcccacttctttaaattctgttgacccttattggtctatgcttctttttgcaaatcaaattcaggaatagcaggatggtagtggaagaaagtatggcag

SEQ ID NO: 8084 - DNA, 743 bp, Macaca Fascicularis
  misc_feature (1)...(743): n = A,T,C or G
tccaatggttccccccaaaatacacaaagcaaataaggccaaaatgttcattgttgaatctgcagtggctggtatttcagtgaacagtgtacttgttctttcaacttttctgtatgtttggaatttttcttaataaaagattgtgggaaatggtcatttgctgagcgcctcctagttgccaggcgctggagggcnnnnnnnnnnnnnnnnnnnnnnnnctgctgcaggattcccacctggaggagtgggtgactggctggctggctggctggaaggggaggggcgagagggctgtctcggtgatgagcacacgtgtgctggggtggtttggggagagggctgagatttgtcaccaatcagcccttggcacggtctctgctccccaccagggcagcacgggacagaaatgtcacagagtgnnnnnnnnnnnnnnnnnnnnnnnnnnnnnnnnnnnnngagcccagtgttagcatggagcggggggttccgagaactgaagttggactgaggcgtctcgctgcagctgcctctgcctaaggcctagcagcctgcctgagcactgaacagctgatgggaggaggagaggggcggaggccatggagggcatggggtgtggcatgcccctttccaaaagggaccgaagactagaggggcctggaagatgagacagcactacaggttcctgggatctgcgggggtggaggacntagcttggcttctgggctgccaggcctttccctgac

SEQ ID NO: 8085 - DNA, 760 bp, Macaca Fascicularis
  misc_feature (1)...(760): n = A,T,C or G
tacagcaggggcagagctgctctcatccactggagtgctgcgggaagaattcatcactggtcattctaaccctcacccaggaatgggggtgacttgcacaagacctcatgaaaagggtgatgtctagagaagagagggtgcagggcatggccgctccccaccaccaggtctgcatttgttcatcatcaccaggagcagaggcaaccagagggttcagagtgggaggtggggccagcccagggcaggagctcctcgtcctcccaggcctcagcgacccagggtaaaaggtgccagggaagttgggnnnnnnnnnnnnnnnnnnnnngtgttgaggaccnnnnnnnnnnnnnnnnnnnnnnnnnnnnnnnnnnnnnnnnnnnnnnnnnnnacacttactgtccccactccacagagcccagctgggcctgggccccagagccacagctagcctgcatgtgtgcactgcactttacggtttgcaaacctcttccatacccactctctcaccgaagcctaattgaggcccttgaaaggagctgggcaaggattgtgcttcccccattatacaggtgaggnnnnnnnnnnntggggaaagtgactggtccgtggtagagccgggatccaaccccatctccctcctccctgtaggtgctgttcttcctgcccaacacctgtttctgttttcctcaaggggttcggggcaggagccctgggcactcactccccctttttgctgtttctccttcggaccctgctcttg

SEQ ID NO: 8086 - DNA, 146 bp, Macaca Fascicularis
ctttacttagttcaagccccagcctaggaaagccagttacataaaagttggctcaggagtcttagagctttgcctaatatgagcccggaaaagggaggatggggatggggtgcttttcctggaggtgacacttgacgggggtgtgt

SEQ ID NO: 8087 - DNA, 731 bp, Macaca Fascicularis
  misc_feature (1)...(731): n = A,T,C or G
gaacnnnnngctgccagccnnnnngctgccaaccatcctgtgtgacnnnnnnnnnnnnnnnnnnnnnnnnnnngccaacctgcggtgggtccagctgctgtagccaaacttgcaacgagtccagctgttgnctgccttgctgccgtcccacctgctgccagaccacctgctgccgtcccacctnnnnnnnnnnnnnnnnctgcaggaccaccnnnnnnnnnnnnnnnnnnnnnnnnngtccttgctgtgtctccnnnnnnnnnnnnnnnnnnnnnnnnnnnnnnnnnnnnnnnnnacccaccacccaccagagacatatttcctgaaacattctgtcaaaattcctatgcccccaagaaacattccctaagcttttctgagaaacaacattctgacactgaactttgtgatcatcttcttcctaccnnnnnnnnnnnnnnnnnnnnnnnnnnnnnnnnnnnnnnnttttattcttcttcannnnnnnnnnnnnnnnnnnnnnnnnnnnnnnnnnnnnnnnnnnnnnnnnnnnnnnggacacatggtctcagtcacaggaagtggnnnnnnnnnnnnnnnnnnnnnnnnnnnaaaaaaaattcttaagactacacatctaactctctataatgatcnnnnnnnnnnnnnnnnttagatatgtgcattttatttagtagcctctgccagattactaaactctttcatgatcacttttaattgtctccctacct

SEQ ID NO: 8088 - DNA, 752 bp, Macaca Fascicularis
  misc_feature (1)...(752): n = A,T,C or G
tcactgatgatggaatatatgacttgcannnnnnnnnnnnnnnnnaattcaagaaaagagctgcaaatgcattttttatatgtttattcaggactcacatgttttaccctaaagaaannnnnnnnnnnntaggggaaatgaaagcaagcctgaagactgactaccaaaacatgcagtatacttattcactgtgtaagtctgtagtataacatgaactggagtctctacccttttttaaatcgcattttgtaagaaaagaaaaaaaaaaaaaagaatgtagtcccacaactcctgatttgaaagaaacaccttgtattttttatatacatctcttatnnnnnnnnnnccactgtgacttttcttttaaactgggctctgtgattccagagtttagaatgtagaaatgaaatgcttagctttaccttttcttgggggtgtggaccctgccagaaatgtaattacgtatgnnnnnnnnnnnnnnnnnnaggcactgtgcacaccattggactgctgaccacagttacatatccagtaaaattccatatctggtcacggctcattcataatcactgtatnnnnnnnnnnnnnnnnnnncaattattttgatggtgttctggtactgtaagtggtatcctttaaattatttaaaacttttgggtgtggggcagacagagagggatggtgtccagagatacattacactttacatcctatcttactctcccctgtttttctcaccctccttacatcct

SEQ ID NO: 8089 - DNA, 1009 bp, Macaca Fascicularis
  misc_feature (1)...(1009): n = A,T,C or G
aaggtggacagtaccnnnacccatccactcacccctgagagggctccagcccaggatgggaacctcagagaagagctctaaggagaagaaaccccatagcatcagagaggacacatctggcttccaagagaaaggaggctccgttttgcaaagtggaggagggacgagggacgggggtttcaccaaccagcaacccgggccttgtactgtctgtgtttttaaaaccactaaagtgcaagaattatgttgcactgtttctccactttttattttctcttaggcttttgtttctattttaaaacatattttcttggttttctaatggagtatatagtttagtcatttcacagactctggcctcctctcctgaaatccttttggatggggaaagggaaggtgggggggtccgagggaaggggaccccagcctccctgtgcccgctcaccccactccaccggtccccagtcactagccggagtctcctctccactgccactgtcacacagtagcccacatggatagcacagttgtcagacaagattccttcagattccgagttgcctaccggttgtttgttgttgttgttgttttgttttgttttttttttgaagacagcaataaccacagtacatattactgtagttctctgtagttttacatacattcataccataactctgttctctcctcttttttggtttcaactttaaaaacaaaaataaatgatgataatctttactggtgaaaaggatggaaaaataaatcaacaaatacaaccagtttgtgagaaagaaaaaaaaaaagcagaaaaaaaaaaaacgaaaaaaccatctgaatgcggaagagcttaagctcggctcctgtttagcattttgtacttaaggaaataaaacaccaacaaaggatctcacattttcttaaaaagtgaagattgctgtatactatttattcaacgtataatttatgttactccttgatctttgtcttttgacatgacaactacagtaat

SEQ ID NO: 8090 - DNA, 705 bp, Macaca Fascicularis
  misc_feature (1)...(705): n = A,T,C or G
atnnnnnntgcccagtgagccatnnnacagttctccaaagtctagccctgnnncagacctgcacttcacctnnaagttacgtacaactcaacttgcatccctctaaaagtcctatatccatattcacctttgggtgattggaggccctgagtgggtcttgaatgctaaacagaagcagggtacacagggctatatgtagatacctcaccaaagctggaggctggtctgttgtaagacagaaagaaagacagctgggcccaattttgacttggccaggggacaccttggtgtgtttgttatctttatctgtgggtaggctagctgacccatctccttgagtcattccctttgggaaaccccactcccagtattgatctcctttttgccttgtactaaatgacatattacctccacgctctcctggactaggcggtcaacagggccacagggttgctttctgtctttggtggggcaggggagttgacagggatgagggtccaaggaataagcatgaatgacaagaaacaagggaaagagttaacctgtcacatagtaggttaacttttccagggtttgcagttaaaggtattcgnnnnnnnnnnnnnnnnnnnnnnnnnnnnnnnnnnnnnnnnntttnnngtgannnnnnnatgtaaaaaaacaaannnnnnnnnnnnnnnnnntttatatgatttgtataaagcc

SEQ ID NO: 8091 - DNA, 754 bp, Macaca Fascicularis
  misc_feature (1)...(754): n = A,T,C or G
aggacaagcgcnctgcgcggaggctgcgcaggggccagcagnntgccgnnnngcgggagggtgtggccaaggnnnacgacacagtgcgagagggcatcttggacacagctcagaccatctgtgacgnnnnnnnnnnccatgagcaaaaaggggctggacgggcgccgnnnnnnnnnnnnnnnnnnnnnnnnnnnnnnnnnnnnnnnnnnncgctcatcctggccacagaggccacgtccagcctgcttgggggcatgcgtaaccagatcgtccccgacgcccacaaggaccacgccctcaannnnnnnnnnnnnagtgcccaagactgagcttggggcgcccggcacccagaaggtgctgcccaccgtgctcctgagcctcccaagagctgcagcacacgggtccggcccggcccggcccggcccctcaggggatggccactgtgaaggacgccttcccggcctgcccgttgccaatctgctgtgagacgggggcctccctgccttggggccttnnnnnnnnnnnnnnnnntttcctccggggagaaaggacactgcccctccccccacctgggcccacaccgctgccttctcccaggacggaggcttttgtaccctcggaccccannnnnnnnnnnnnnnnnnctttctgtgtctggggggaggaggggatgacatccgtgtggttcgatgtatcatttttaagctccgtgagcgcgtgnnnnnnnnngtctgcatnnnngtggaataaactg

SEQ ID NO: 8092 - DNA, 773 bp, Macaca Fascicularis
  misc_feature (1)...(773): n = A,T,C or G
gatttcgctctttgaaaatgtggtttgtatttaggatgtatggagtcaaaggactgcaggcttatatcttcaagcacgtccagctgtcccatgagnnngagnnnnnnnnnnnnnnnnnccccgctttgaaaannnnnnnnnnnnnnnnnctggggcttgtctgctttcggctgaagggttccaacaaagtgaatgaagctcttctgcaaagaataaacagtgccaaaaaaatccannnnnnnnnnnnnnnnnnnnnnnnnnnnnnnnnnnnnnnnnnnnnnnnnnnnnnnnnnnnnnnnnnnnnnnnnnnnnnnnnnnnnnnnnnnnnnnnnnnnnnnnnnnnnnnnnnnnacgtgctgcaagcagagagggagtaggagtgaagccagctgcaggaatcaaaagttgaagcgagatatacctgaaaactggaataagaagcaannnnnnnnnnnnnnnnnnnnnnnnnaccgagtctgtctgtggcttcccatgtctttctccaaagttatccagagggctgtgattnnnnnnnnnnnnnnnnnnnnnnncaaagaaatattatttgctatataaaaagttaatcttcgtggccatagcttttattcatcagctgtgatttttgttgattaaaacatcatagattttcnnnnnnnnnnnnncatcagaagtggcaggaaagccnnnnnnncatattnnnnnnnnnagtctatgttcatnnnnnnnnnnnntatatctgtggtctttaaattgtcctttgtcatgtggctaaa

SEQ ID NO: 8093 - DNA, 740 bp, Macaca Fascicularis
  misc_feature (1)...(740): n = A,T,C or G
gcacgccgcgtttgtgtgcggctccgggcctgagcattcacaaagctcgcttctccagggagcctccccttggctttagaaaagagcccagggacttacgtgctgcctgttgtactctgtcccctcattacttttttagacacagggactaggacatcgaccaccctctgcccctcttgcagtcaaaacctgagtagtgcaagaagggccacccgatttnnnnnnnnttgggggtctcttttcagctgcctcacagacattcccatcctttctggttggtgnnnnnnnnnnnnnnntcactctaccctcccacgtccttagcattgctgtgcgtgtttccaggcagttaggacacccttccccnnnnnnnnnnnnnnnnnacagttcaaatgaccctccttttctgttcgttagtaacagtcttcatttgacaccttaatacatttctgactgttcttaaaacagtggggatgcctatattttccttgagtttttgtgactgactttggctatgtatacctttctggggttttgttttttttatttttattttgcatatcgagggtatttggggtggggttgttttttgagatgtgtaattcttttatggagtttttaaaaagaattttcatattgtttttctaacatggcttcattaaacgtttaagtattttaaaaatatgtaatatttggaccagatgttgtgaataatagtagagataaagctattttattctgta

SEQ ID NO: 8094 - DNA, 186 bp, Macaca Fascicularis
ttcttttatttccctagtacctcttaatatttaaatattgtcatattatcttcatattatcgtgtatgtgacagtagaagaattagagaaagggctttctgtggttatcatttttaatttcagaacaaaagacaccatactgtgctcactacaaagagtgcttttttctaaaaaagtgtattttaa

SEQ ID NO: 8095 - DNA, 179 bp, Macaca Fascicularis
aaaaaaaaaacaaggcaagaaatatacgggattttcttaattcagctccgacccattgctaagttagggtttgatgttattactgaatattcggaggcagaaagactcctgattttgccaaatgattagtcacagtttggcgtaagtcggatagacccccctaatatccatcatgtaag

SEQ ID NO: 8096 - DNA, 636 bp, Macaca Fascicularis
  misc_feature (1)...(636): n = A,T,C or G
ccacagaaagcagttggtgacacgaggttctatacttttcntnnnntctgttgctctcttgacttaacgtgaaaacagggtatatttgaacaaactgtctgtcccaggcaggggctgggcagggcctgcgtgccttgctcagcctcctgacaggacacttttgttgcacttagagtttacattttaatggatgtaaaaacaactgtgagagatgtctgggcctgcagaagtccagcatnnnnnnnnnnnnnnngtgttctagtgaacattttcatatatatttattggttatagcctgttaaaatattttcttttttgtattatttatccccctacattatgtatttatatgagggaaaaaaaggaaaaaattgtacttttttagtatttacttgttataaaggacattgtgtttcctgtcatgtaaaaccagctattttagttactattgtactctagaaaagagctgtagatttatgttaaactcgtacttatgagcaattgtaattagttctaaaaggcatgaacnnnnnnnnnnnnnnnnnnnnnnnagtcctgaatttgtagaactagagttaattccctcttggaactttctttgttcttcnngtagttacttttttccttacctaaaag

SEQ ID NO: 8097 - DNA, 702 bp, Macaca Fascicularis
caccagctgactggctttccggaggcttgtgggtgagtttcaagtttgtggtggcaacagcagcgggacagggcatggagggagcgagggagagaggaccagtcccagcttttagatattttgggttatggggaagcaggggccaaacgttctttatccctcccaccccagggaaaacatttggaaaatagtcctttttcttggaagcagtgacatctcctctacccaatctttcccatcctattaatccatggggcttgagactgcaaggcaaccaccaccacaacagcccttcctccatcagaagagaggagcaaggggcccgggcagcagtggacgacccggcttccctataccgggcctctggccgagatctaagccccgcccacaaagactaatggatgccagtgctgtcaccacagaaggccggatggcaggtgcctgggacaggggcaggtgccccggggagggcatgtacagccactgtaaataaccctcatccctgcccaggaacccagactggacttcagtctccctccatggagacaaaggcttcccagagccaccaaaaatcttagcaggacagctgtgagaggcatcagagcctcgcgttcggactgccttcatcgagacaactctaggggactattttgcctggggctcctagcaaaccttttttatttatttatttatctgtttatt

SEQ ID NO: 8098 - DNA, 691 bp, Macaca Fascicularis
  misc_feature (1)...(691): n = A,T,C or G
gattcattaatggcccagaattttgtgtttggtctaatagttgtgtcaacattcttgttgctttttaaaaatcaggctatgcctgtggtccatgtctattcaaagcttgacctgcacaaatgccgtatttctgtttggaccacatattctccattttgcattaagcagtagagtacagtggaaagggaataagaatactgattattctggaaaaaaaaaaaaagatttggaatcattgtgggttatttatttttagtgggatggaggatcttaaaaacacctagttgtgagagaatcaatttctgaaagtattaaaatttctgaaaataaatgcttaattacacatacaggaattaaacagtttggaagagggttggactgtcattacctttataatactgtataatnnnnnnnnnnnnnnnnnnnnnnnnnnnnnnnnnnnnnnnnnnntgttttctttataggatgttgtttggtttgtttctgagtgtttaaatttttgaaaaacaaatgttaaatttgtgcttcagtacctagataaattggaaaggttaatgttctagtttctggaagataagtctggaagacacataagcaattcactgctataatttagttgatgtaaaatggcagaaactgactcaatatttcaggtttagctctacccaaaagcagcagacatgtaagcaga

SEQ ID NO: 8099 - DNA, 744 bp, Macaca Fascicularis
  misc_feature (1)...(744): n = A,T,C or G
catgccccannnnnnnnnnnnnnngnnnncaggacttnnnnnnnnnnnnnnnnnnnnnngtggtagtgaaactcgtcaagagagtggatgatcgcctgannncttcgggctggccgccaggaaacagannnnnnnnnnnnnnnttccaaagtcttgccaccctcaagcacgactgggagcctagcgagcccnnnnnnnnnnnnnnnnnnnntnnnnnnnnnnnnnnnnnnnnnnnnnnctgagcctcccactccagccactaggcagctaccaccctggagccctcgcccaagcctcacccaagccagggacaaaaggggcaggggctggggtggnnnnnnnnnnnnnnnnnccttcttagggtnnnnnnnnnnnnnnnnnnnnnnncctgccatcccacaacccctagaccataatagcatttattccnnnnnnnnnnnnnnnnnnnnnnnnnnnnnnnnnnnnnnnnnnnnnnnnnnnnnnnnnnnnaggccaggcatggtggctcacgcnnnnnnnnnnnnnnnnnnnnnaaggcgggaggatcgcgagnnnnnnnnnnnnnnnnnnnnnnnnnnnnnnnnnnnnnnncccgtctctactaaaaatannnnnnnnnnnnnnnnnnnnnnnnnnggtgggtgcctggaatcccagctactcaggnnnnnnnnnnnngagaaccacttgaacctgggaggcagaggttgcagtgagccaatatcgtgccattgtactccagcc

SEQ ID NO: 8100 - DNA, 849 bp, Macaca Fascicularis
  misc_feature (1)...(849): n = A,T,C or G
tgtatgtacatctctgtgnnnaagtttcccctttcattaagacaccagtcatactggctcagggcccaccgctaatgccttaatgaaatcattttaacattatattctccacaaagaccttatttccaaataaggtaatatttggaggtattgggaataaaaactccaacatataaatttgaggaagtcacaatttaacttgtaacaatcttaccctttcttgcaagagatgcttgtacattattattcctagtatcttggtttcactagtagtaaataatatatatattttttgtatttgcaagggaaatacatctaatccctcctatagaaagaacagtattactgtaattcctttgcaatctcttttcttcctcatttactctgccccttaaaagattgaggaaagagaaacttgtcaactcatatctagcaaagtacataagaatccgtcactaaataatgtatccttgagaatgtgttggtttaccagtgacaccccatattcatcacaaaattaaagcaagaagtccgtagtaatttatttactaatagtggatttttaatgctcagagtttctgaggtcaaattttatcttttcacttacaagctctatgatcttaaatagtttacttaatgcttttggtgtattttcctcaaattaatattggtgttcaagactgtatctaattcctctgataactttgagaagcaaacttttattaaatgtaaggcgcttttctatgaaatttaaatataaaaataaatattgttctgattattactgaaaaaatgtcagctatttcaatgtcttgggaaacaattttttgtttttgttctgttttcttt

SEQ ID NO: 8101 - DNA, 588 bp, Macaca Fascicularis
cacacattcatcatcaactgcatccaggtgcacggccaggtgctctacaccgcctcgcacgacggcgccctgcgcctctgggacgtgcgcgggctccgaggtgccccgcggccccttccgcccacgcgcagcctctcacgcctcttcagcaacaaggtgggctgcgccgccacgcccctgcagccggcctgaccccgcgggggccctgccgacgccagcccagacgcccatcggctcccagagcgccctgccctgctccccgcggctgtggcgcccgatggccggggaggagcgaggaagcccgggcgggaggagagcccggcgcaggcgtctggtttttctttggtggccaggaggcgctgggagcgggagtgctcgccctcgggaccgccctcttttcccttttagggtgactcctgccctccctcccccatccctgacctggcaaaaggcctagtctcagggaccctcccaccttaggggctgcaggcggactgccccagctcccccagccccaggaaacagggcctttcctgctgagaggaagtgactttacagaagccactgaatctggttattttggcaaat

SEQ ID NO: 8102 - DNA, 731 bp, Macaca Fascicularis
  misc_feature (1)...(731): n = A,T,C or G
aatgcacantnntgnnnnnntactggtnncntccattgattgtnnnnagtcagnnnnnnnnnnnnnnnnnnnttaggacagtatatatgtgttttatatagtgagaagaaaaaagaaaagatgtgtattttaaagggcttatggatatatatgtcctacttcnnnnnnnnnnnnnnnnnnnnnnnnnnnnngaacaacatagtcattgttttttcctgtggtaatggtttccaagttggatttttttttccctctannnnnnnnnnnnnnnnnnnnnnnnnnnnnnnnnnnnnnnnnnnnnnngaaagtaatctcttttgtgccctcatttcacagagcacaaaggtttgtttcgatgtcnnnnnnnnnnnnnnnnnnnnnnnnnnnnnnnnnnnnnnnnnnnnnnnnnnnnnnnnnnnnnnnnnnnnnnnnnnnnnnnnnnnnnnnnnnnnnncagccagggtcacatcctgtcctcggggggcccagggctcaataggagattctgcgggagtggagaagcgtcagtggcagctccgctcccttggcaagtgaggggtttggctgtgatgagcctcagctccaagctcttaaannnnnnnnnnnnnncatccgcctnnnnnnnnnnnnnnnnnnnnnnagaggcaannnnnnnnnnnnnnnnnnnnnnnnnnnnnnnnnnnnnnnnnnnnnnnnnnnnnttttaaacgtaggtacaattaaacatgatc

SEQ ID NO: 8103 - DNA, 669 bp, Macaca Fascicularis
  misc_feature (1)...(669): n = A,T,C or G
cttggggnnnnnnnnnnaggggacgcggcggaggagggtcgctgtccacccgggggcgtgggagtgaggactgcaagatggaggaaggcgggaacctaggaggcctgataaaganngtccatctactggtcttgtcaggtgcctggggcatgcaaatgtgggtgaccttcgtctcaggcttcctgcttttccgaggccttccccgacataccttcggnnnnnnnnnnnnnnnnnnnnnnnncttctacttccacatctccatgggctgtgccttcatcaacctctgcatcttggcttnnnnnnnnnnnnnnnnnnnnnncacattctgggaggccagccagctttacctgctgttcctgagcctcacgctgnnnnnnnnnnnnnnnnnnnnnnnnnnnnnnnnnnnnnnnnnnnnnnnnnnnnncctgcaaaccgtggagaaggagcgaggcctgggtggggaggtaccaggcagccaccagggtcccgatccctaccgccagctgcgagagaaggaccnnnnnnnnnnnnnnnnnnnnnnnnnnnnnnnnnnnnnnnnngggctgtcctctctttgcaatctgggctgcgtcgtgagcaatgggctctgtctcgccggccttgcnnnnnnnnnnnnnnnnnnnnnnnatgggccnnnnatgctaataa

SEQ ID NO: 8104 - DNA, 211 bp, Macaca Fascicularis
gtcctgtttccttcccctaaatctatgattgggaagtggccaaccccagccccgttctcttgtcaagtacaggtcgtcagagtcagccctataatgttcatttcccttctcggttgggagattagggatctgagctgacatgtgcatgccatttcacccatttctaaagctgaatccatttcgcatgtcacaatcaagacgtgctgggcaa

SEQ ID NO: 8105 - DNA, 2019 bp, Macaca Fascicularis
caatattcatttacttagagaaacctttcttcataaatatatgaagagaaaaagctgcccaaacttcaaaattattataaacttaagataatgacatttggattgactttctggttattgctgagaatttggctgtgtaaaaatgaaaggttagaaaaatattatcaaagcaaaaggagaattcttttgataaatgatttgaattaaattatgtctccctctcagttattttctgtgcacacttacagtttttacaagatgttggacaagtgattttgttctatgcctcagttttcctgtatgcataatgcagtgatagttattcttgcagctaatatacttcctgagaccatgtcagcatgcatgttgcatacatactgaaacagaagactcaaaggtctttgaagaagagcaccaggatcacaaagtttcatcgttttattttttaaaaccgaatatatcttttcatcatttcacagtttgaagactgatgaagaaaatgtcagaaacttacaattatggaaattaaaatatttaaagttaaaaactgtctatgtagcagaaaataaagaagagagattagtttatgctctctttttaagtttgaaaacccacatcaaaaaatgaaagaaaatctaatcacagatgccagagtttgaagactataagaaaagccgcgtggaggaagaaatatggacatactttaagctcttttaaaagatacagagattagccaggtgtggtgatgagtacctgtagtcccagctacctgggaggctaaggtgagaggatcacctaagcctaggaggtcaagactgcaatgagctgaggctgcaccattgcactcctcaaagaaaaaaaaagaaagaaagataaagatgtcatgagatatagatatttctaccacattgggagagctagtatatatgattttaatatggttgttttaagaaagtagatcttcagtagaaactaacgtgcatgcttgctgctttcccctaaaaaacacatatttcaatattgataagaacatatatagttaaataacattaagagcaatctttaaaatgtcattgtattgctatagttgcaccatataaaggagatgtacatatgtatcacattggatgtgaacacctcaactgtggtcacttactacactgtccaataaaatgtatgtatgtatgtacatggcttgtatagagaactgtttaataaatatgttgattacttgatagcatgttttacaatattacttttcataaaaatgagagacgtgatatttgctgctgttaaacagcatgttcacaatatttgcatttactgagcaagagctaatggtaacagaatttctgtgttaacacaaatatctgggcagcttatttcaagcacagtttataattatacattctaaagataaactgaagactctgcaaaatgtcatgtctgcttttggatggcctttccttaaacatttttgttggcactactataaagcgttaagactctggaagttgtacaatataggaaaaaagaacgttatattaggtatggttataaaagatgctaatattatccaatatagggactcagcacatagagaatgcaaagaaaaccttagctctgatttctcaaaaggaatgccattgtaagagacgtttctagtgtcacgagagaaattcagtactttccttcttaacattattagtcaaggggtgaaagtaaaatcttgaaaattaaatgatccattggattatatttttaatgtgcattggaattttgtattgttccaagtgctaaacaagtgtaccatgtttgctttttaagtttactacttttccctcttttaattgtaacaaagttttcaaagacaaaaaatgaacaaagaccagcagtcccaattgtgctaagaagcaaggtaggaagcttggctagtttccactacagcatactttgtaaatgtgttccttaaatccttaaggtaagacttaaaaaaaaaaaaaaaaaaaaaaaaaaaaa

SEQ ID NO: 8106 - DNA, 2012 bp, Macaca Fascicularis
atgccgggatggctgtggaggccgcggagtttgtggcgggcggaagctacgccttgttgatcttgccgcatctttactaggtgtcggctgattaggacctgcacgggctacatcagtaggaagattgattaagttcttcctggtggaaaggattccttcctgcttggtgtataaattgagtatgtgatccctcaatttgtagcgagaagataacatctctaacatcattgacttcttctgcatatctaacagaagctctaagaagaatggaagagataacagaacacatctggaagaacaatctgttacctctggacaagcccagctacaggatccttgggaccgaacacaaatgaaaatgcagaatcctttgttcaaaaattactgaaagtttcaagatggcagcagcagaacattaaaccaagtgggggattcttataggtgcagggcactgtttgactatacatgtctcccacccacgaagctggccctgcctccggctgcgctccccaccttccttcctattctactactgatgtctgccattctgtcttttacacttaaaccctttccctggtaagcttcaattgcccctcagttatcagtcactgtaatctcagtgaatgtgagtcccatggaagctcgcatctgagagcaggtttgatgtatggtaggatagagataaatcagggttgggagaaagatgaaggatggcaggctacaggaggctgacagggtatggcacggggatcttgagtaccttatcaggaaaatgcctttattcagagtaagattcttggaatgacctagtagaagtgcgctgaagaagaaaagcttttatgttttgctcttatgtagattttgtgttgtggtggacctttttagatagagtagatggtggtgggctaagctgctgatgtaggtaagtttggacgtctctatgaatgtgctgaggacttctaaactggaggtattaaggatgaaagaaaccactcctctagcctgcaaatgctagggtcctcttttatgccttaacagattcattagcagtttactcatgctcatgtctagcaactccaaagatggtcctgggaaaagttttcaccctgacttacagtatacctaaccattacctagaagctgaggttggatatttttaatgtgggaaaataagaaggaatctgagctttcatagtaaaacatctgctacccataaacctgtgtggtatacaaatcatgttgctttcatctattaatatatagaaggaaagtgtattagttaacacgaattagtgttgttattgtaatgctgtgtaataaacaaaacatctgtgtagtatacaacagtaagcatttattcaccttatactctggagttcccctcatctagtctggtcatggcagggcttgctcatgtatctgtcagctaggcagctctgctgttcttggctgggcttgcttccatgactgtgtgccagcaggctgttggttgatctagtcattcttgcaaaattggatgacttggtttcactccatgtgtcttatgtcctccggtaggtcaaactggacatgttttcatgacaatggcagtgggcaataggtaggcagagacatataaataaaatttcaggcttctgcttgcatcacgtctgataacattggcttgagcaagttgcaaaaccatccaagaacaggagagctttccaaattcaaaaggtaaggaagtggaccctgcctttttaggggtcagaactgcaaaggcatgtggcaaaagatatgggtaaagggaggaaggaaggattggagtcatttatgtcatccatttgctatagtctgtcaaaagctctgctaagacttgatgtttagattacaaggatatgctaagtttttgttcctttatatcattaaataaagctgaatcaccagaaaaaaaaaaaaaaaaaaaaaaaaaaaaaaaaaaaaaaaaaaaaaaaaaaaaaaaaaaaaaaaaaaaaaaaaaaaaaaaaaaaaaa

SEQ ID NO: 8107 - DNA, 506 bp, Macaca Fascicularis
ttttggcatacaccccctgtggacttttgcctcttctgtaatggctggcaatgacatttctaacttagcaatctggaattgcatttggtacacatggcattgcttgttccactgggatggggaccagtgttaagatgcctgttagacaaactgcccacctctactttctctactttttctttacagcacttaacaataacaaagtcttgatgatgtatgatatacagtattcagactttaggttgaaatacattactctttgattcctagcccgtatatcttatctacacttcaatgggacataatggtggtgtgtgggtaggcagaaatttatgtaaataccgctccttctctttagtgtgtttgctttgggggtagaaaatggttttaacaaacactggtttccatcaaatgaatgacatcttctccatcctgtggagacaagaatctgctataaggacatatgctaagtttcttatgagacataacacaggtgctttgcctgt

SEQ ID NO: 8108 - DNA, 765 bp, Macaca Fascicularis
  misc_feature (1)...(765): n = A,T,C or G
ttcaagactgtaaagatacnnnnnnnnnnnnnnnnnnnnnntgactgaagaagaacttgatgtccaggatgaggctatgcgtacacttgcatcctgaaagtgggctcaggaggtctctatgagcaaggaacacaagacaaaacttcctcactaacgtcctcctatnnnnnnnnnnnnnnnattgactatttcttcagactcgaaacactcattcttttttctnnnnnnnnnnnnnnnnnnnnnnnnnnnnnnnntttctaggatttatttataaaataaacaccttacccctaacatgnnnnnnnnnnnnnnnnnnnnnnnnnnnnnnnnnnnnnnnnnnnnnnnnnctggtgttatgatacgctgctgatccatgtcacagatttgctaannnnnnnnnnnnnnnnnnnnnnnnnnnnnnnnnnagtcagagtgagtgctgaccnnnnnnnnnnnnnnnncaggtgagtcatgaatgattaatcataaagaaaaatcaattttnnnnnnnnnnnnnnnnnnnnnnnnnnnnnnnnnnnnnnnnnnnnnnnnnnnnnnnnnnnnnctgaaataaaattattaatgcatttatcaataaaannnnnnnnnnnnnnnnnnnnnnnnnnnnnnnnnnnnnnnnnnnnnnnnnnnnnnnnagtacctaataatgaagtgttattacatgtaaccagaattgaggatctctttgnnnnnnnnnnnnnnntaactaaaagctacagaannnnnnnnnnnnnntttgaaaca

SEQ ID NO: 8109 - DNA, 714 bp, Macaca Fascicularis
  misc_feature (1)...(714): n = A,T,C or G
tgtgctgcactggagcctggccctggcactgtcctcaggaccttgcccaagggcccaccgcagagcatacctatgttatggggagccccgctggcagccccgagagccatgccacggcctgcagaagccaggctcctgtgtggatgaagtccctcttcctctgtgccttgatcccttgggggtgcctttggtcatctcttccgtcctttcctgtctctgaagtagtcatcactccccttgactctctctgttcacatgtcttctcagtctgcagagttaacttctgtaaggagtttaatctggggttccaggaaaacaagttccttgttaacatagcactgactttgcaacaataggaaactaacaaatgagcaacaatataaagagtagaggtagttctcattgggtgtaacttcaacccattctgcttgtggttagaatttataactttgctaacgatgtaatttactaaggtttgaaatggtgttctaacagcgagtccattgtcttgaggattaatctgatttataagtaatactgatagacatattttcgtacatctgagcagaaataaatgcatgtttctagcatatgtaatataaaaactccagaggataagtttacacttaacaagatgttgttttctatttttgaatttcttattatttccccctttttggtagnnnnnttgagngnnngngcatactatttgta

SEQ ID NO: 8110 - DNA, 724 bp, Macaca Fascicularis
  misc_feature (1)...(724): n = A,T,C or G
caacggcgctnnnnnnnnnnnnnnnnnnnnnnnnnnnngcagcaacggccccttnctgtgtgggaagcagaccacgtttgaaggagggatgagggagcctgccctcgcgtggtggccggggcacatcgccgnnnnnnnnnnnnnnnnnnnnnnnnnnnnnnnnnnnnnnnnnnnnnncaccagcctggcgcttgcgggcctgacgccgcccagagacagggnnnnnnnnnnnnnnnnnnnnnnnnccgccctcctgnnnnnnnnnnnnnnnnnnnnnnnnnnnnnnnnnnnnnnnnnnnnnnnnnnnnnnnnnnnnnncctcgggcagcacaaggctcacttcnnnnnnnnnnnnnnnnnnnnnnnnnnnnnnnnnnnnnnnnnnnnnnnnnnnnnnnnnnnnnnnnnnnnnnnnnnnnnnnnnnnnnnnnnnnnnnnnnnnnngaagctgcccctgattttccacctgggacgggacccgggggagcggttccccctgagatgtcctcagagcccggcacgacagcgccatggaccctnnnnnnnnnnnnnnnnnnnnnnnnnnnntcacggcaccttgtcgagttgtgtaatcgtnnnnnnnnnnnnnngaaaggaatccagacactccacgtgtttgcattggaattttagaaccacagatgctattcctctccatttcccgcttttttgggcaatgggatgatattgctttgtaagaaac

SEQ ID NO: 8111 - DNA, 1378 bp, Macaca Fascicularis
  misc_feature (1)...(1378): n = A,T,C or G
agaagatgaagctgaggcttggagaggttaagtcacttgccatgtggtcacacacagctgggaagggttgttgccagggtctgaatggggtctgcccaactccaacactcttgcccttacctactcctccacgcagccagtgcagagcacatggacaacatgtttactgtgtgtgcccagcagcacccattcaggagctttcgttcatcgccccaaaaggctgggggccaggaaaggtcccaaactgacaccgcagctgtgattggtgcacatcagtggccctaagctattattgggccttttccttagctctccctcccctgccctgccccctcaaagctaccttcctctctggcatagatctcaagcctaggagtacaaggctcccagggctacagcccacacagtgccacaccctacagcagacccaggagatgcctggctctctccccagccctcccaccaaaggcccacacatgggcgtcacctcggttctactcatcttgtaaggttctaatgaatagaaattagcagctgctgagtgacagccccctcctggctcccctgcctcccccagctcttctccctgtggggagggagatctagcagttaggccctttatgcccacacccccaccgtggaagaagggcagagcctgactcattggaatcccattgttgccagtttctctggtgggtggtgacattttagatcaccctgcttatgtgaagctgttttcagcatgatgccctcccagggcaagcttgctgcttcccaggaggtatgacccctgagtgcagccccctggggcacagacatttgtctcccagatgcatgaactaacacacctgtcgcatgcttgtgctgtgagtagctggacacctaggctgactttgaatggattataccaaaagggactgatgtaagaccttttaaggaatggagcaagtggaatggctcagccctgctctgtcacttcccccatgcagcagatggttactgggtgctccaggaggaacaggaagcatctctgttgtactagggaaccagtgttggctccatagtaagacaagagttggctgagtgcggttgttcacacctgtaatcccagcaccttgggaggctgaggcagatggatcacctgaggtcaggagttgnnnnnnnnnnnnnnnnnnnnnnnnnnnnnnnnnnnnnnnnnnnnnnnnnnnnnnnnnnnnnnnnnnnnnnnnnnnnnnnnnnnnnnnnnnnnnnnnnnnnnnnnnnnnnnnnnnnnnnnnnnnnnnnnnnnnnnnnnnnnnnnnnnnnnnnnnnnnnnnnnnnnnnnnnnnnnnnnnnnnnnnnnnnnnnnnnnnnnnnnncaaaaaaaaaaaaaaaaaaa

SEQ ID NO: 8112 - DNA, 229 bp, Macaca Fascicularis
acaggactcggcaccaagctccatgctgagacaccaggctatgtggacccccaccttgtttcccagcctgcaccttagaagccgaaggcgctttcatcagaaccctaaaatggccgtcgaaggcgtgtgggccacagcccagcagtagctagagaggcaggcagagggcagtggttctcccaaataggagacatggggcctggccaggccagggtttggacactaatgg

SEQ ID NO: 8113 - DNA, 723 bp, Macaca Fascicularis
  misc_feature (1)...(723): n = A,T,C or G
tagcatagagccgcnnnnntagactcannntaaactcagtnnnnnnnnnnnnnntgtgcaatgatggccacaaaagcatagtatttggatgtcagcgagacagcatgagagccagcagtcatcaaagcattcctgtttgaatctagcnnnnnnnnnnnnnnnnnnnnnnnnnaaattnnnnnnnnnnnnnnntgggttagtttcaaatttaagagtttagagagaaggtagagtaggtatctttcaggtcgtgataatgagcttctatgaaagaatgtaatgtagtgaccctcttttctannnnnnnnnnnnnnnnnnnnnnnncaagcnnnnnnnnnnnnnnnnnnnnnnnnnnnnnnnnnnnnnnnnnnnnnnnnnacgttgcaatgnnnnnnnnnnnnnnnnnnnnnnnnnnnnnnnnnnnnnnnnnnnnnnnnnnnnnnnnnnnnttctgtttactacctgtgacaacccaagtgagtgnnnnnnnnnnnnnnnnnnnnnnnnnnnnnnnnnnnnnnnnnnnnnnnnnnnnattatattgggcagcttgcaatctgccgaagtagcaacttgcctttccacacttggcttgagtgctcaacccagaaggcaaagagagcttttggttgtaggcagnnnnnnnnnnnnnnnnnnnnnnnnnnnnngtaaaggagcagaggcaaaggagaaaagcagaagtggagctgatgcaggtattct

SEQ ID NO: 8114 - DNA, 731 bp, Macaca Fascicularis
  misc_feature (1)...(731): n = A,T,C or G
gccggtgcagcgcacgcagagtgtcccaacccggcgtcctgcccgccgccgccaanctgcggggccctggccgcgacccaaaggctccctgagcacgggcccggcgccccgcgcccggccttggacccgggactccgcctcgctgcctcggaagccgtcggtaccctggcagcgccaaatagaccagccgcaagaccgaaaccaggcactgggcaagcaccgacctgtgaacnnnnnnnnnnnnnnncagtgcgaggtggccgctctgcgtgaggagcagaaagtgctgtcccgccnnnnnnnnnnnnnnnnnnnncacatccgggccttgacagagcagcaggagcagctgcggggccagctgcaggatctggactccaggctctnnnnnnnnnnnnnnnnnnnnnnnnnnaagcacaaccttccaatctatgaagggcacagtctgaaaagcctggaacaccgcctaaatgagatggagagaactcaggctcagctgagggatgctgtccagagcctgcagctttctccaaggacgcgggggtctcggagtcaaccccagcccctcaaagcaccctgcctcaatggagacaccacctgagctgcccatcctgcctcaccacacgtggtctgggagcagagagatagccgtcttggcggggggggtgtctgaccttgccttagccctactnnnnnnnnnnnngggagtggagctgctggtcccaaccact

SEQ ID NO: 8115 - DNA, 708 bp, Macaca Fascicularis
  misc_feature (1)...(708): n = A,T,C or G
gatagggtttgaaatgagaccagagttcaaatcctgacttttccctcattagctgtgtggcctgagccgactgcttaaccatactgaaccttatttcctcagctgacaaaagaggaaaagcatctnnnnnnnnnnnnnnnnnnaaaaagtaaattaaataccatctatgaatgcccaggaccaggattcttctttataaggtaaaaatnnnnnnnnnnnnnnnnnnnnaaagaaagagatcagcnnnnnnnnnnnnnnnnnnnnnnnnnnnnnagacataagagactccattttgttctgtatttgagaaactgttaatctgtgaccctacccccaaccttgtccttgcaagagacatgtgctgtggtaactcaaggtttaatggattttgggcgtgcagggtgtgactttgttcctagataagctaggtattgtctaaggtttctccccatgtgatagactgaaactatgctgccaaaannnnnnnnnnnnnnnnnnnnnnnnnnnnnnnnnnnnnngctttgtcctttgaacttattcatgtcacagaggtttttgttcatatgtcttactgccgatttcctcttttttctttgatcctattgtcctgccacnnnnnnnnnnnnnnnnnnnnnnnnnnnnnnnnnnntaaatactaagcgaactcagagaccggggccggcgtgggtcctctgtaagctgagcgct

SEQ ID NO: 8116 - DNA, 362 bp, Macaca Fascicularis
gtgatatggagaaggaagagctcagatagaaaaaaagggagatactctcaggctgcaaacagagacagagcccagggctctgatatgtctctcacggcttgtaaagagtgagacagcccccctgtgtgggagtgcgagacaaaatatgttcacgccctctctttgtgacatgaagaaccccgactttctttctgcaaaaacatatgaaaatgtctgtgttcccgtaggcataaaatgaggagagggggagaacaccccatccccgtgtccaccacgagcctcttccccacgctgacccgtgttccctccccacatatctttctcgttccagggagggtggggggggatatctctatatctgt

SEQ ID NO: 8117 - DNA, 736 bp, Macaca Fascicularis
  misc_feature (1)...(736): n = A,T,C or G
gagagcatgacatnnnnnnnnnnnnnnnnnngnnntgaaaaaggtatttttgaggaattcgcaggtgactgacaagcctttgaaaagagtgggatctgttcacttctggtctttttggccaggaactcctgattggtgttaaggtgacagtttcccccatatgatctagaatcactgaatttgagctagatgagatttttaaatttctggttgtctcattagactgatgaggtgagttttcttcttcataggaacagctggttaagaattnnnnnnnnnnnnncagtactcagttttccactgtaccacaactgtcttaactaaatgtgccttttttttttttaaaagttaagagttctatttgatgttttcaggaatatacttgaaaagacatgccatgtttnnnnnnnnnnnnnnngagttgtgtaaaggcgtgtactaagcacaaccttaattcgtggaaatactcttcatttatccctcctaaaactacactcgtataaacacttttcccataaggtgtgtgcagtaaaaatgtcatattannnnnnnnnnnnnnnnnnnnnnnnnnnnnnnnnnnnnnnnnnnnnnnnnnnntaaaagtgattaaatggagnnnnnnnnnnnnnnncctttaannnnnnnnnnnnnnnnnctttgttcctgttttattgagaatctcgtaagtctaaaaaaaaaaattacaaaacgacagggcctagctgtgtataaatga

SEQ ID NO: 8118 - DNA, 1952 bp, Macaca Fascicularis
ctaatcaagagaagtaggaagcatatcaagcgtttaactttatttaaaaagtgtgatgtgaaaacaaaatatattaaaacttttctattactttctttccctttcacagtaactttatgtaaaataaaccatcttcaaaagagctagaatagcacctgttttgaatattcttattccatcatgactaatatcaaattaaagctgcaacttacttgcctaattttttaagcaaaatatgataggcaaacctatgcttttttaagaaaaaggcaccacaaaaaccaaaacttagtagctagctttaaaagtgttaaggaatgtgttttgccctctagaaacctttataaatggctttttgaatgccatcctgatacatttagctatttgtccattactattaaactgcagaaggtatttcaactattacatggtactgaaagccagttgtctgggtaatgaatattatttgttttctttacttacccaaaaacatttccaaatgggttttttttaaaaaaaacaaatatatgattttgaatagctgtctacatcaaactcttaggctagtatagataagtaggcagaagccacttgtgtattcggttatggttttttaattttgtttcgatgtagggtcttgctgtgttgcccaggctgtctcaaactcctaggcgctagtgatcctctgcctcagtttcctgagtaattgggactacaggcatacgtcaccacagcctttaattaacctattagatcacctataagtgaatccgtgtaagtagattataacagttgctaggaattgtgcagaccaaatatgttcgaaaaatgtaattcaaattgaaatgagtcaatttaaaaatataaaagcacagactattacaacaaattacttagatatgaatcatggctgcctctgtttcactgtgtgaccttggtaagttattaaatctctaagtgccagtttcccacactgaaaatggggaaaataataatgcccactctttataggattaattagaacagtacctgcatacacttaagtattcagtaattgctaactgttataattggaaccgaactgtggctggctgtatatcaagccagaattcttttcaggaaaactggcttgaaggaattccgagtaattcaagtgtcctaaatctaattaaattgcacagatacacacacctcctcagtctcagtacatcccaggctgtactttccagaaaggtaagtaccattataattacatctactttaaggcaatgcttactatgtgcatattcatctctctaacaattcttcaaactgtaggcttgagttttgtggggttttttgttttgttttgttttgttttgttttttccctcattctggagtgaaaggaataaaattcatgacgtgagattttacaaaagctgagtggaagaagccaaaagttataaatcctccatcgtggtcctagttaagtacattgcttctaggctctagacagaattacaagatattcacagtttttctcattttccctttcagatcgccaaactttggcatcagagcaaggtccacacttatcactgaaaattttcccacccagccccattaaaaaagttaaagtgtgagagattttatttcaacactgacaagctagttactacagggcctacaaagagtatcgtgctcgaacacgcagggaccctggttcaataccttttaatggtatatgggagctgagcagaaaccattcatctgtggcatgccctttctgtaatcggctcaactggcagcgcataaatacttgggaagaaaaacaagcaattattgtctaaaaagataacatgatagtcatgcaagtaaatttttctggtgttcagtcttctctatggtgttaaatgcttttcattaaaggagttttcaataacatcacaaattcaaaaaaaaaaaaaaaaa

SEQ ID NO: 8119 - DNA, 720 bp, Macaca Fascicularis
  misc_feature (1)...(720): n = A,T,C or G
ggcaacacagtgagacnnnnnaaaaaaaagaaagaaagaaagatcgaggtatagccctctcttgaacctctatttcagtatattacccaatccctgctcccccctattttaatcatggacagccctccgtaatctttccgaatactttatatcttcagagtgttcttacattatctagattgatccttgctactgtataagtaagtagatgtggcattaatcctatgttataaagaaatatccactaagaggtttatatatttgcccaaattacatagttacaaagttgagttagaactcgtatttttaaacttctattctctagccttttccaccacattatgacacaagaccctgcagaaagtcttccgaaaatatcagactgtctctgacttgtcccatccaatcttatatcaaattatatgcacccttaaaaagttatttgtagtttaaaaaaactctattagcccaaattacctaaaataaactccctggcttgttcctctaatgttataaaaaattgattgaaaatattcattttaaaaacaaagttcttgaatttatttaaattactgtcttgcaatgagttggccaggaggaccgcatttccttgttaatatatatgtagacccatgaaataaatgggaaaagtgtgattacaatggcaatagccaactgaattcttccaccaactggagtcctataaagacacaaaaatta

SEQ ID NO: 8120 - DNA, 735 bp, Macaca Fascicularis
  misc_feature (1)...(735): n = A,T,C or G
gacccgactggaatccactctaaccaatcgcacttaacgactggggccaccactgggggggcagggggagnnnnnnnnnnnnntttctccatataattttgatcataggccagagtgagttattccacctgcacctttctgtacaaatactaattcaattttaagtcttaagtcacttttttaatatatatgatcttctgctcttcccacttcctcccctttctactgctctcccattttccctnnnnnnnnnnnnnnnnnnnnncttgtccccccacccttgtatatggggacagtggggtcagagcagctaccctttctttccctcctgcggaacagcagacccagcaannnnnnnnnnnnnnnnnnnnnnntcggagtggtcttgggtttgggcggggggcagaccttgggaaggggcttaggaagggagaggcagctcttccttcagcnnnnnnnnnnnnnnnnncagtccccctccccgcccccacctccctgnnnnnnnnnnnnnnnnttatcacagcattattgtgacagccacgaacccattgcccacaacccttccacccttggtcaccccgacctctggctctgagccctgttctgaccaaatcacgatgatgagtatttgggggtgggtgggtaagggggggagtgggaggggacggaaccaacttttctgtattttgtattgtatgttttcttcaacatgtaaccaatcangtatctgtcaat

SEQ ID NO: 8121 - DNA, 3797 bp, Macaca Fascicularis
ttgtctttcatagatcaggcacccttcactgggggggttgcccgttaagtctttggaagagattaaaagtcttttccagagattgtctgtccgaagatcaagttcaccatcgcttaacagtgggaaagagccatcttctggagttccaaacgcctttgtgagcagactccctctctttagtcgaataaaaccggcttcacctgtggaggaagaggtctcccaggtgtgtgagagcccccagtgctccagtagctcagcttgctgcacagaaacagagaaacaacacagtgatgcaggccttctgaatggcaaggcagagtccctccctggacagccaatggcctgcaacctgtgttatgaggctgagagcccagacgaagcggccttagtgtatgctgccagggcttaccagtgcactttacagtctcggacaccagagcaggtcatggtggactttgctgcttcgggaccattaacatttcaactcctacacatcctcccctttgactcagtaagaaaaagaatgtctgttgtggtccggcaccccctttccaatcaagttgtggtgtatacaaagggcgccgattctgtgatcatggagttactgtcagtggcttccccagatggagcaggtccggaaaaacagcagatgataataagggagaaaacccagagacacttggatgactatgccaaacaaggccttcgtactttatgtatagcaaagaaggttatgagtgacactgaatatgcagagtggctgaggaatcattttttagctgaaaccagcattgacaacagggaagaattactacttgaatctgccatgaggttggagaacaaacttacattacttggtgctactggcattgaagaccgtctgcaggagggagtccctgaatctatagaagctcttcacaaagcgggtatcaagatttggatgctgacaggggacaagcaggagacagctgtcaacatagcttatgcatgcatgctgatgagcacaattttgaaagaacttcagaagaaaactcaagccctgccagagcaagtgtcattaagtgtagatttacatcagcctcctgtcccccaggactccggattacgagctggactgattatcactgggaagaccctggagtttgctctgcaagaaagtctacaaaagcagttcctggaactgacatcttggtgtcaaactgtggtctgctgccgagccacaccgctgcagaaaagtgaagtggtgaaattggtccgcagccatctccaggtgatgaccctcgccattggtgatggtgccaatgatgttagcatgatacaagtggcagacattggaataggagtctcgggtcaagaaggtatgcaggctgtgatggccagtgactttgccgtttctcagttcaaacatctcagcaagctccttcttgtccatggacactggtgttatacacggctttccaacatgattctctattttttctataagaatgtggcctatgtgaacctccttttctggtaccagttcttttgtggattttcaggaacatctatgactgattactgggttttgatcttcttcaacctcctcttcacatctgcccctcccgtcatttacggtgttttggagaaagacgtgtctgcagagaccctcatgcaactgcctgaactttacaaaagtggtcagaaatcagaggcatacttaccccataccttctggatcaccttattggatgctttttatcaaagcctggtctgcttctttgtgccttattttacctaccagggctcagatattgacatctttgcatttggaaaccccctgaacacagctgctctgttcatcattctcctccatctgatcattgaaagcaagagtttgacttggattcacatgctggtcatcactggtagcatcttgtcttattttttatttgccatagtttttggagccatgtgtgtaacttgcaacccaccatccaacccctactggattatgcaggagcacgtgctggatccagtattctatttagtttgtatcctcacaacgtgcattgctcttctgcccaggtttgtatacagaggggctggaaagatgaatcaagtgacatcaaactatgctaaccaatcagctgacaagtcaggaagaagacccaagcctggcccttctactgtatttgcaatgaagtcagcaacttcctgtgctattgagcaaggaaacttatctctgtgtgaaactgctttagatcaaggctactctgaaactaaggcctttgagatggctagaccctgcaaagattaagaaagctagacaccctccctggagttgcaagtattctttcaaggttggaagagggattttgaagagatctctctccaagcaagaatgactagtttttccataagggacatgagcattttactaggcttggaagagctgacatgatgaccattattgtatgtttgtatatacatttgtaatagagggctagagtttgacctagacagagtttaaggaagtgaaatatttaattcagaacccaatgcttttgtaaaactttttggattttgtaaaagcattttcattctcttagaaattcaaatattttcaaggggagtcatttgagatatatttattttactaggagatcttatattctagagaaatgctttaaatggtcaggctccaatctgaatttttttattaagaaaaaagtagtttttaatgaattggttaggactcagaggaaatacggaaaacacgtagatggttaatttacaggtaaaaatcccaagagccttttaaacaacaaggtacctaaaatagggtataattatactgcttaaaatacaattagtgtctatgaatagctttttattttctgtgggaagatgctttaggtcttctgactgaagatgcaggcatatctctctgctcatttcagtgttttcctgaggtggagccttcattggaaaggggaaagagggattctagggtttcatcagggaccaggaatgcattcctctctcaggttccaatcaagagaagaccttttatgagatctgattctgtatagatgttgtcagttaggaaactgaagccatagatcaggcagacaaacagcccattgggcaatttcctgtattttaaaactgacaatagcctgattgaagtgatacaatcaatttcaaaacaatcttccagaggccacttgaaggttcatagtttttacaataccctgagacttttcaggttttggagcctctaaaatatgagatataaactgaaactaatacaggttgttctctggaggtttctatgaggttcttagaaaaatttggttttaaaatacatttgaggacaggaatgtctatagcaagtttactgctattgcaaatcatgtatgctggctttagttgtaacaaacaaactactttatgctaagtaaggccaggtgctactataaaatcatatattcctgttgaagttcttttgaaatcctttctctatttattatatttgaaagttgtcagccaccaatcatccagaatttccttcctgaatctccatgctcatatgcaacgtctacatcaaggtcttcttaatgactgttattctcagggtttagttttctaccttctgcctactattttggtctaacatttttgtagccttctgtttttcttgcaaatagtcttttacataagctgatttctagaactttcaaaatctcacatagttaatggaagttgctttctgctttcttatgactgtttttataaataaactatttcataaa

SEQ ID NO: 8122 - DNA, 191 bp, Macaca Fascicularis
tttttcacacgcgcgtggtgtcgcgcctcgtgtcccagagtgcgcgcccctctctctcacacctttccacgggccccacacgcgcgtgtacacgtgtctcacccacacgtatatctcgtggggagaaaaaaacggggtggagagaaaaggaggggtttgcacatgtgacacaaaataagagtctcggaaca

SEQ ID NO: 8123 - DNA, 677 bp, Macaca Fascicularis
  misc_feature (1)...(677): n = A,T,C or G
atagtagatgatgcgtnnnctgggcctcccatgaagcattcccctctgtctgcctttgggctctacacaaaaaaaaaattcattcaggcaagtccacttcnntcagctcctctgtccttcctctaccatttccaagggcagttcgggcattcctgctttactctgcatggaccatggctttctctcagcttctaatagtcacctagcagtgagtttaccccatgttctacagtcccaagtgccgagaaagtgcccccaagacaattaatttgtatttagccaggcttgttgtgaaacaagaattaaaagaaattaaagaatgtgtaagcagaaactcagttctatgtaagaaaacccagttcaccctgagaaagagaaagagctggagtcctgtaaaaattaactgcctgtttttccgtggctagtgagccttatctctccctttcccaggcattgtgaagaccctgtttctctagctgtgcagctgcaaggtcactagacagataaactcaagccataaaacatgtttttacttgaaaagttagaaatgatgtaacgcatgtctcaattaattaaataactgtctttgtttctcgcttctgtaacatgcttctccccacacagatctcccccagccccatgaaatgtttaaaaggtaacttgactctttgttcagg

SEQ ID NO: 8124 - DNA, 1616 bp, Macaca Fascicularis
ttaataaataaatttaaaaaaaaaaaaaaaatgtctttgaaaaattttaaattaataccgtatctgaagctcagaatttatttaaattgatacaaacttaacactatttagtgtcacgatggaggtagtagaaagatagaattttgtatctaaacatactggtttcttatcctgattgtcccattttctcactagctatgccagccaaggcaacctgagctttcatttctttaactgtgaagaagacaactttggcctcagcagggttgaggattaaatgatacaatgtatgtaaatatattctttaaccaagggatcagcaaactttctgtaaaaggtcaaatagtaaatatttttggttttgtagatcacatggtttctgtctcaaccactcagttttgccactgtggtatgaaagcctgagtagagaatagctgggctccagtgaaacttaacttgcaacaaaaggcagcaggctagatttgacctgagggctgtagtttgcccacacttactctaacctataaagctctgtgtaaatattgagtaattgtcatgactttctctcttcaggctaatgtaatgcttgaatatgatattgatgaagctcaggcattgttggaaaagaatttatcgactgccacaaagaatcttgattcccttgaggaagaccttgactttcttcgagatcaatttactaccacagaagtcaatatggccagggtttataattgggatgtaaaaagaagaaacaaggatgattctaccaagaataaagcataatgctggcaattaaaaatgtggttcagttttccaaacatgttatcttaaatacccctttatccttacaggttgacataactttgaatgttttaacagcaagaattttaagaaaagataaacaccattttatttatttataaaaacaaaattagtttcaaatatttttgacattgtggtttttttttttttttttttcacatttctcagcaaagctaatggtattttaatcattatttttgcctgttataagaaaactcttagctgaaatggccgaaaactgtgagacatgctatggaagctgaatgtcggacactagcacagtttgctatttccctttctaattggcttatgttactctcacttgatggttaaaccgttttagatgtagagaagacagacagtttgaatatttgtaaacttgtttttctttggtgtgtttaggacttagtggtcctctgttgctgttgtcttctgtaagtggggtttcatgactcactgcttaacaaataactatctactctgatattctggacatttcaggaaatggtaatttgccttgttacacagtaagggggctattaagacaacattttttctaacctcagataagtgcagtgtctttgcaatgccaacataagggagatttggccaacgtgaaataaaattactcattcaaaactcttcctaaggtgattttgtagttcttaacagttctccaaagcatcttaaacaggaatattaagataaatgtaaatctgcaatggctgaaaagagttgtgagcttttttattcatgataaaaccttatatgaatagtaaaaaaaaaaaaaaaaa

SEQ ID NO: 8125 - DNA, 765 bp, Macaca Fascicularis
  misc_feature (1)...(765): n = A,T,C or G
agcaaggaaagccacccgctagacccatggcctcatccannnnnnnnnnnnngagaagttagacagcctttacttgctccaacagaaacaacnnnnnnnnntgacgccaatannnaggacaccatgtgtnnnnnnnnnnnnnnnnagctgcacccatctccgcaaagtcaagtgaaggtgtattggggattctctgccaccctgtgtcacccaaccacctccttcattatcaacaatagctaccatcatttgtcaagcactcgctagatgccaggcaccctagacgcattgcctccaattctcatccagttctgcaaagaagatgtgannnnnnnnnnnnnnnnnnactgggagcctgatcccaagaggctacagaactggccccagtcacccatctacgtgccagagtcacacctggccgacaccagggtctatgctctttccgtggcatgtcactgcctctttaacaaacggactgtcaatgtcaccattctttttgatgagagcagcgtaattacattgccttttgtcaggacagtgggtatgtgatttgtctttggccatctctctgaagctgtgtcctacgtagcctctgactnnnnnnnnnnnnnnnnntgagctgagctcagtgagtggagcttgcctttctttccctgggtggtactgcctagtccagatgtcgtggctcagagtgtaaatattcctaagaatggcggcaactagttcctcttttgcttaagttaaatactctgaatttctgctgta

SEQ ID NO: 8126 - DNA, 682 bp, Macaca Fascicularis
  misc_feature (1)...(682): n = A,T,C or G
cccccacaccccatcttctctcccacccctcggctctctcacacaccnnnnnnnnnnnnnnntaacggtgaagtccctccgcccccatnnnnnnnnnnnnnnnnnnnnnnnggaggggcgggccctaggtcccctaggacctttggggaggannnnnnnnnnnnnnnnnnngcagttaagccctctgacacctgtcccacccccaggtagctgggagctgtggatcccagggaaccgtgactgtcacagaccactgggactgcaggattgactcccactcagaccagatctagggtggcagctgagaggggtgcagaggactcctggcccgtcacgctgagcctgctgtcctcgggacaggctccgcagagcccaagacaccatctgtggnnnnnnnnnnnnnnnnnaacatgccctgggccccgtctcannnnnnnnnnnnnnnnnnnnnnnnnnnnnnnncacctccctcccagctcttcgagagcccagcagaaggagacnnnnnnnnnnnnnnnnnnnnnnnnnnacagtcccccagcccgcttgggatctttccttatgtnnnnnnnnnnnnnnnagaagcccagganngnnnnnnnnnnnnnnnnnnnnnnnnnnncgtgacaacatcctctaaaagtctacctgcatttacgctgcactgaggatgaccagtaaa

SEQ ID NO: 8127 - DNA, 2651 bp, Macaca Fascicularis
ctggcttttgcctggtcatctaggttcatttcatctgcacgtccattgtcctcgtggaggggctgttgctgggtggaacggcctctcgcctcggatctttgggctgccaggaacttcagggggcacaaggctcttggagtgggctgacttcagtccaggtcgtgggtcgtggtctctttgtagggcccgggtttgtctgcactctgctggaggctcttgattcctctggcaagagtccgtgaacttgacttggactccagcacaaaccttctcgttctcccaggcgggccttgcttttgtcttgctctcacaggggatccacagtgcccctcaacagcactggtggacaaccacttcaatcttgcaatcgccgcagatggcctctgagaccctctctccacctcacgtgcccccatgggatgccagttccaggggtgagaccccttctccactgtgtccttcccttggtggcagttcccttttctctccgactgccgtgctgagaagcaggagtccataaacagcccaggatgaagggaggcagtaagctcaagggtcccgcaatcttccgctgacaccctcctctggggtctcaggtattcatccatcagccggagagccctcgacgactcaccagactgcattcccaaccctctgggacccgattcctgcacagagccgttttcgggaatgaagtcggaagagccctctccagcgccctcctcgcagtctcccatcgcctcctcctccagggggaggcgaccacggagacggcctcgggaggccctttgggggagacttttctcggcccgcaatggtagtcggaggcagcccttttcctcagaccaggccggctctgcctgcaccatgttccttgcttaggcaggctgacaaccatgccagcctggcgcccgagccagcccctcgagtgcgcatgcgccagtggccgggcacctggcgcgagtgctgagccctggcttgcgtcacagtgaaggtcttcgttgcctggcgacgagtccctgcggcttagcggagaggggggacctctgtgatgggcgtcggtgttgggctcccgcctgcgttctcttgggtatccacggtatattcccaccatctaggacagggcagggcaatccagcctgaggaaacatccgggtaaggcccagggatccaccgcgaaatccctaaccatccaaaaggatccgcgccatgcgtcaagcttgcctggacccagtgggggtcagtctccttaaatgttgccccctccccccgccccgtgatttctgactacagcaggcctgtgttctcggggtgctctctcccgggaggggcttcctggcggagcagaaccgcgcagcctgagaaggtgcccggaggtgtatttgtgcgggattgtttcgagtgttggctgcccgtgtgtgtaggcggcactgtgtgtgtgtgtgtgtgtgtgtgtgtgtgtgtgtgtgtgtgtgtgtgtgtctgtctgtttgtgtttgtgcgggcaggcgcgcgcgtgcttgtgtgtggctctgcgcgcgcgtgtgtgtgtttgggcgtgtgtctctgtgggcctgtgtgctgtgtgcctgtacgtggcgcctgccgataggaagatggctcaagcactgcagcccttatttgttttttcttttcgtgtacccctcctgcccccgagtccaccgaccttctggtccgccactctgtgaggctctgcttgggttccggaactccgtgtcctttgtttttttccgtggttcctgtatccggggtgaactgtgggactggctgagactcgcaggagccctaagcacctcccccgccgcaaagcggcaactctgctagcaaggaagaggagcacaccacccccgagaacggaaacctccgagtgcctcattttcctgtggccaagccagggcccgaccctagcagtcctgtgcgcagggctcctcgaatccccctggaattcggttcctagccgagcagccgcttcacgtcgtgaggtcaggaggcgggcactcctccatcgtcttgagatttcattccggggacggagaggttgggcagcagtttgttcagatggggtgaggatgcagtctggtgaggtgtgcgtggggtcccccaccttcatctgctaaacaggtgcctccagatgaatacggaaggtacttgcgactccacccccgcgttcccttggtggcactagcggtccgcaccctggcccggtgcccatgtgggaggactccaacgtgctgggggttcagttggagcacaatccccggccattttggccagctttcgatttaggctgtcatgccgggaaacacgtgggagtgggatgcactgaggctggctgggatgtggcctgcataggggcctcctcttttcctgactcccacgcttctcgtgggcctagggtttcctgggtctggctcaaagacttccacagtcaccgtttccctgttcacggaggacgaccctcatggggaccgttgtacacgtgtttccttctaaacgccgtcacggtgcaaggactcggctgctgtgatccttttggaagagtgaattccggcgacatctgcccacaaggaaactctggtcctcccagttctctcagagtgctgcgtgattcccgtaggatgagaagcggg

SEQ ID NO: 8128 - DNA, 686 bp, Macaca Fascicularis
tcaaaactcatcacgttatgtactttttcaagttgtatagcagtttatatgtcaagtacacctcagcatagctgtaagaaaaaccacaacaggtctgacagttacctgggaaaggcaggagaacaggtggtagaagaacacattttttatgaccttcatgatatttatataacataaatgaataaaatagggccaacatggaaaagaaaaccaaatgaaggaaaatgtcaaattgccatcctgaacaccagcaccgcctactagttagcgttcctgcctgcagccgcatccgcggtcctgctcctcatgaagccatcctcactgccatgtcctggccgcgcctgtccttagcttcctggtgcacaccgtcctgcaccttgtgttcaggcacggggctgcttggctcaccctggcggcacccgacctgtccgttctcccaccgcggtgccgcccaggtcttcccgctgccaggctggctgatggtgcatggaacagactcgagtctgtgttgtgtcctcagcgtgccggacatttcgcggataggttgtggtctctgaatctcctcctcgcaagagatttgtcatgtgttattgccaaaactctatttgtcacaccgcgggttatgtgtcattaacaaaaaagctgggacttaggctggtgtttctttctggtgcagcctttaaatg

SEQ ID NO: 8129 - DNA, 2117 bp, Macaca Fascicularis
aagaattcctattacagattcagtttcaggaacttcatgctaggctttcttgacttaaatctccaactaaaaagcctgagaaactgtattcccctacaactcctcaagtaattggtgatattggtcaaggattgtttcctaaataaaaccaaagtggattacatttgagttgctaaaatcaaaataggactatactgattttagttcccagatccattttgattcttctaccagtcactgataaccaaagtttattaagttaaatttattcagaattcataatgactttattgtagaaatctgtgaatagatttgcaattgagagatagacaaaaattacctttgataaaattagtaaattaatagttttttgggttaggtagggacttaagatgaaactgtttaacttatttaagaaaacaacttgatctaagcagtctattagagcacttgtatagaatagtgtgctaattatgtgtctcttatctcttcgttaaagtatatttttcagaattgttatttggtagcattgtttaataattggtttatggtgctttatagccctaaaggaaacaaattcatatttggttataaatgccctacatttctgacttttaactaattacagatgataacttcctcgccccaattaactcttaattaatgaagttttatatatttttttctttttctcttatgtgattttggtaatgagttaatcgacattaagaaacattgtttttcaaaaatttgctagcctttttttatgctctattttagtacatgttgaaacaggtataagtaacttaaagaaacaaacaagtgtctgtacatatccttcacccactttttgatggagttgtttcgttttttttcttgtaaatttgtttaagtcccttgtagattctggatattagacctttgtcagatggatagactgcaaaaattttctcccatcctgtaggttgcctgttcactctgatgatagtttcttttgccgtgcagaagctctttagtttaagtatatcccgtttgtcaattttggtttttgttgagattgcttttggtgttttagtcatgaagtctttgcccatacctatgtcctgaatggtattgtctatgttttcttctagggtttttatgcttttaggttttacatttaagtctttaattaatcttgagttaatttttgaataaggtgtaaagaagggatctagtttctgttttctgcatatggctagccagttttcccagcaccatttattaaatagggaatcctttcccccattgcttgtttttgttagaagacatttatggggccagcaaacatttgcaaaaaaggtcatcatcactggtcattagagaaatgcaaatcaaaaccacaacgagataccatctcatgccagttagaatggcagtcattaaaaagtcaggaaacaacagatgctggggaggatgttgagaaatagcaatgcttttacactgttgttgggagtgtaaattagttcaaccattgtggaagacagagtgtggtgattcctaaaggatttagaaccagaaataccatttgacccaaccatcccattactgggtatatacctaaaggattataaatcatctactgtaatgacacatgcacacagatgtttattgcagcactattctcaatagcaaagacttggaaccaaccaaatgcccatcaatgatagactggataaagaaaatgtggcacatatacaccatggaatactatgcagccataagaaagaatgagttcatgtcctttgcagggacatggatgagactggaaaccatcattctcagcaaactaacacaggaacagaaaaccaaagaccacatgttctcactcataagttggagttgaacaatgagaacacatggacataaggaggggaacatcacacaccagggcctgttgggggtgaggacaaggggagggagagcattagtagaaacatctaatgcatgcgggactgaaaacctagatgacttaataggtacagcaatccaccatggcacatatgtacctatgaaacaaatctggtggtgcatatgtattccagagcttaaagtaaaattgaaaaaaaaaaaaaaaa

SEQ ID NO: 8130 - DNA, 779 bp, Macaca Fascicularis
  misc_feature (1)...(779): n = A,T,C or G
ggattacaggcatgtgccactgtgcccggatacnnnntttgtatttttagtagagaggggttttaccatgttggccaggctggtctcgaactcttgacctcaggttatccacccannncagcctctcaaagtgctaggattacaagcatgagccaccgcgcctggccaaagatgtaatttaaaatggttagaaggnnnnnnnnnnnnnnnnnnnnnnnnnnnnnnnnnnncacccccagagctttctaatcctnnnnnnnnnnnnnnngcttctaggtctttctagaatagctagaaacagtagctgactcctgccccaggcccaaccttcaaacctgagctcttcacgttgcgtcctctggtgagctatagaagagaacgtggctcctaaactctagccatcctgcgggaggaaatagacttctttgggctgnnnnnnnnnnnnnnnnnnnnnnnnnnnttccctctatttttaaattttatttaataatttgtgtgtttttctctctttttattttctatgtttcatgttttccttcactccctagannnnnnnnnnnnnnnnaaatcataggcaatgaatcttactaggagaggtgtggggatggagacagttctgggatgtgacctgtaagcctcctggagggcagtgccaggccttgattgcccacattccctccattccttctttccttccttcatacattcggtcacacagccccacgtgtgcatcacggtaagagccgagggctcnnnnnnnnnnnnnnnccatttaggtc

SEQ ID NO: 8131 - DNA, 701 bp, Macaca Fascicularis
agagcagggcatagaaaagagagggatgtccttgcttaattctagatacttttgaggcaacatcttcataaaacacatagtttaatctttgccgtccttagacagagaagggctatggatcacatacagtatcaaaaactactcccttggaaaaaaaactttttaaaatcaaatttaaacatttcactctgtgatgcatatttcttttaccactggccattattataaggacccatgaagtaaatgtcaccatcatcttacttgctctctctctctcagcaaaataaaactgtgatgtgtcttctttgtaaaagtttaggtataaaatgctatgcaactttttctttatagtaagagctttattttctttaataatatagcccaacttatatgttttaatctcccttctccctcagaataagcagaaaatataactgcagctgtatgttagacacaagaattgaaactgtgcagtcagtagagctgaacttagctatgaattaatttaaattaattctaaagtgactctggtttccattttagtctattagctagagggttttggctgttgctttttttaaagttaggtccacgcagtgaagggaaaagagtgtgaaggtgatcagtgtagcactaagacatctaaagtcgagacaatgacatgggggcttggtgtacttagctgggtaattcccttctac

SEQ ID NO: 8132 - DNA, 669 bp, Macaca Fascicularis
agtgacagcagcctcagtagcttttctgggctcccagcggccggctgtataccccgcccgccatcacccttgcccctgcttgtcgtggaccacttttaaaggggaagttccttatttggaagagagaaaggatgtgtgtagcacacactcatcatggattgctcagagttcctttagggcagagctgagggcctgggatccaggaaccagtgggattggacaggagaagaaagaagggggtggcccgtcaaccccacaagacttacatccaggtagcctaagggttcctggtcactgggtagggtggctgctgagatgcaggtcggaagaggcaggggaacgctccaggcctaacttgcagcatgtcactggccagggaggtgaagggacagactctccccttactggctggcagccccaggaacctgttcccttgcctctcctagatgggttgccagccctgtgtttcactgtgaccaattcattctgacatttgggtattactgaaaatgtaaggaagcaggagaaattaactatactcctttcattcagagatagcctctatcaatagttagacatttttccctcttttacattgagatcataccctaggtaagggttagtatgtgatattttcattttcacagtataataactgcacctgtaaat

SEQ ID NO: 8133 - DNA, 722 bp, Macaca Fascicularis
  misc_feature (1)...(722): n = A,T,C or G
gannnnnnaagccagacaggagcgaggagaaggccnnnnnnnnnnnnnnnnnnnnnnnnnnnnnnnnngaggaacggagagcagagatgaagacaagacatgatgaaatcagaaaaaaannnnnnnnnnnnnnnnnnnnnnnnnnnnnnnnnnnnnnnnaaaacaactnnnnnnnnnnnnnnnnnnnnnnnnnnnnnnnnnnnnnnnnnnnnncacnnnnnnnnnnnnnnnnnnnnnnnnnnnnnnnnnnnnnnnnnnnnnnnnnnnnnnnnnnnnnnnnnnnnnnnnnnnnnnnnnnnnnnnnnnnnnnnnnnnnnnnccnnnnnnnnnnnnnnnnnnnnnnnnnnnnnnnnnnnnnnnnnnnnnntccctgttcatctctgtttctagatttagtcacttgaaataagaaatctttggggtttggggtcnnnnnnnnnnnnnnnnnnnnnnnnnnnnnnaactgcacgcaaagccgccnnnnnnnnnnnnnnnnnnnnnnnnnnnnnnnnnnnnnnnnnnnnnnnnnncctgcnnnnnnnnnnnnnnnnnnnnnnnnnnnnnnnnnnnnnnnnnnnnnnnnnnnnnnnnnnnnnnnnnnnnnnnnnnnnnnnnnnctcatcattccccataannnnnnnnnnnnnnnnnnnnnnnnnnnnnnnnnnnnnnnnnnnnnnnnnnnnnnnnnnnnngggctnnnnnnnnnnnnnnnataagga

SEQ ID NO: 8134 - DNA, 410 bp, Macaca Fascicularis
  misc_feature (1)...(410): n = A,T,C or G
ctcaaaattgagaaaatgaccaaaacaggggaattgttaaggcaaactaagtatggcctaagaaggactctgtccttctatatttaagtccttgtagatgaactgtaatgtagcttaatagtcaaacaaaattgaaaacctaacctaatagcatacatctgtaataataactgagtagtggccaatcccagtggccatacttcnnnnnnnnnnnnnnnnnnnnnnnnnnnnnnnnngttcaaagaaggcaaacactgagctgtaaccaacctcactgtttctgtaccctacttccgattcctgtacctccctttgcctttttttgtctataaatttgttctgaccatgaggcaccctggtagtctgtgaatctgctgcaattctgggagttgcctgattcgcgaattttc

SEQ ID NO: 8135 - DNA, 716 bp, Macaca Fascicularis
  misc_feature (1)...(716): n = A,T,C or G
actttaactgtcatgtttccaaagttgacatggaaannnnnacatgaagcttaaaaatacaactaatctgtggtgatagagatgagaagagttaagctctaaaattagaagagcagttcgttttgaggcagcattgattgggagggagcatggagtatataactatacatttctatataatgtaaaaatttataggtttaagatttatgcattttatgtaaattatactacaataaaatgaaaatgaaagacagatcatatatagttcaatcaaatattgtgtacaaagtaatttctgttaaacatatttttatgtgtatatgtaccttttacatgtatatgttaaggatatgcattaaaatggtaataacttcctctgcctattgggataatggagagttttgttactttttgtcttttttttttaaaaaaaacatgttctgcaatgataatgtattgcttttgtaattatgaaaaacaaaagttatctcgtaaatctttgttactgataagagatgggtattctattaactactcaattctcatgtaggaaaacaaaatacataatgtgtatttgataaatcgagaaacagaagcattacttagaaatctgagttacctctaaaataatgactggcatttgaagttgaggatgggtcttgagttcctttgattttaacgctcttgaatatgagggttgggtgagttcctttttc

SEQ ID NO: 8136 - DNA, 1991 bp, Macaca Fascicularis
  misc_feature (1)...(1991): n = A,T,C or G
ttgcttgctgaattaaagttatagagtagaaaaagccccttagtgggatcatctggggcaactgcctcactgtaaagaaagggcggctgagaaccctagaggtcaccagctacggcttttaaacgcttaacagaatttgactattggagggaggccctccagggtaagggaaagctagatagcaggggtttacacctggccccacccttcactatgtggtcttaggcaggtcccccagccccagtcagaatctgtgttcccatctgaaaatggggttgctgacacggcttggcaagattactgtgagacttggctgtcaagattacaaagtgctccatgtaaaagaactgctcaataaatattagttattttctagaagattccaaatatcccccgagggtccaaaacatggcccctggtgttatttaagcatagaattgcttcaactcctttctgttgcctacatgggtgctcgtgggagatgatattgaggattgaggaaagcacaccgccaggaatggtgttccctctaccatcaaattctcaccctcaggttcctgtgcctcttgctggctgggccacaagcatttctccagccgctggcccagggaccgaggtgaacataagtgggtgacaaagcctgactggcccccaggccactttctgggccgctcctgaagtgcagccaggatggaaccataaaaggcgacgctccctggccgcagtctttgttttcctcgctagctggaatgcctcatgatgacaggcagccaggaaatgccctttactgtcccaatgccacctccctcaggaaccccgtcagtcttgccttcctgggctgcacagaccctgcgggtggcaggaagaactgcactccctgggtctggagggaacacctgaatttcggcccaggtaggtggcctggtgttgacattttcttgtaaggaaggacaaggctgaagcgagaaggaacagtatccaggaagtttttgtggactcttacatttaaggaaaggctcattcagtcctccctgcaggtattcattgagcacttactgtgtgctaggccctgtgctagtgttttagaatgtaggttttattcttaatcagtctggtgaggccattgaaaagatggtttgttactcacaattccgagaggggaaggcacaccacatcacgcagggccactcaggaagcacttctgaacactccacagaattcgactattctgtttggtccgaaagcagagggagcccggggaaaatgtgggcaagagcctttattgtggcttttgtgggaaaggcaagcaaggcagggtgagcaggttcagaactgactagcttgaatcatttcagcgcactctggggtgtagctgttttcctcactgtctggtgcttggccccagggtaattagggcaggggaataatggtctggagtgtgagggccctagaggagccccagaagggaggaggtggttggggttggggctttggattgattggtttgcatataaaaggtgagctccaagtcaagttgtttactatctctaggaattagctagccctgggaaaggcagtgtcctccaggtccctaaggccccaactgtcacagcatcagaataaaaagccacacttgctacggctaggctgtcaggagcacagttgtccataaaacagacccgattcgtgtcctcatagagttttctgtctagcaaggaagaagacattgaattactggggtttttttggttttttgttttcttttgtttttgtttttgttttttgtttgttttgacagagtctcgctctgttgccaggttggagtgcaatggcgcaatgcaatcttggctctctgcagcctctaactcctgggttcaggagannnnnnnnnnnnnnnnnnnnnnnnnnnnnnnnnnnnnnnnnnnnnnnnnnnnnnnnnnnnnnnnnnntaataaactccatctcaaaaaaaaaaaaaaaaaaaaaaaaaa

SEQ ID NO: 8137 - DNA, 1683 bp, Macaca Fascicularis
aaaaaacctttctagctggcaagctagagactaagccatttccccaggtcacaaagaccgtgacttacagaaacagacacaccattttagacctggctgtcttttgttctggtgtctggatcgtgctcctccctccactcctggagagacagagagaggaaagttagaaacggccctgtccagggggtcgccgtctctggcgtgaactagctttgtttcccgagccctgcccgcacgcacaccacgttcttgggagacgctgcatgtggtttcccaggaacgcaggctttggcgcggcgctctgcattttcaagtctgcacgcgtatccgagttgccacgactcggcgatgctttgctggcagctcccagagagccacttgcagccaagaaaacgaaccctcccctgctcgtttgtctccgggaacagccttttgtggcactatcctcaaggctgatgcctccaccaccccggggatattggggcacaaatccctgactggaaatgaacagctacatagatcataatcccttccctgtctgcccccacccccaccttttttttttttaaaaagatcttgcctccaaagtagagcttagggattgttgtctaatccaagccaccaggggaaatgccagttgtgtgggctgtgactttgggatgagaccacagagcctgtagaatcaagttgaacctcaaagtgccagccttgtggatttcggcccacaggctgctccagcagaatgttcatgcagatgctccttgaacaaactccctcctcaaactgcaaattcagccttcccaaatggatttgtcaagttggaaatctcttatatatacccatcctcacccttcgtaggcagaagcaattctagagctgtcttctcagcgaattgttaaccaactcagagcctggtggtgtaccgggagtggcaagttctgtcggtttatttcaggacagccagaaggtgttcggtggaactggtcccgtgcctctgcagtgcaggtgtgggcctggtggggtgggaagtgcagccagggaaaacacagggcagaagcctgggcagaaactgtccttatggaatctggcttcctactccctacccaggtcacagatacagtgctaggatccttggacagaccatgaaacctggagaattcgaattcaagaagaaaatggtttcaaatgccataatcttgcattgaattcattgaagaggaaacaatatttgattacagctatttgataccacttcaaaatggcaagccattagattcaactcagttcaacacattggtccctactgtgtgctggggtctgtgttaggcactgaacatagtgcctggatacaatgaatcccatagggttcagcttctaccaagacaagaaagttatcttgggggaaaaaaaaaaaagtaaaaagtacttgtcaaagaaacacatttttcctaaacaaaacttaacatcataaatctagagagaaaattatccagtaataatatactctctgaatggaaaattcccacaataataacaaaaataacaatgatatgtatacttagtacagctctatttttgcttttcatctaatgatttcaaagagtttagcaaccactgctgagctaatccttagtactaaacttgactcttccatccttctttgaaaaaaaaaaaaaaaaaaaa

SEQ ID NO: 8138 - DNA, 716 bp, Macaca Fascicularis
  misc_feature (1)...(716): n = A,T,C or G
gagccacagcnnnaggaggccttggaggcggtgctggccaagaccgagggccttgggaattacagcnnnnnnnnnnnnnnnnnnnnnnnnnnnnnnnnnnnnnnnnnnnnnnnnnngaccgaggcctcaacctgttgccctttcccatgaagctggcttctctctgcaataggagaaaacctggagctacagtgtcccccaccttccttgccccatgggaacctccacctcctactccccacccacctctgcgaatctgctcccaaaggaagctgaccagagcaagacctgggcaagcagagagtgcctgggacaggactgacctggtggacagtggcctaggtatagcctctgttcctcctggacataagaaggtcccaagcttagtatcccatgtggcctttacaaatcctatgactggccttctcattccacgagggccctggaaagggtnnnnnnnnnnnnnnnnnnnnnnnntgggagtcccttggcaaggccaaccctgaagaggccctccgaggcattccctgtggccttcattagggttgtagaattcatgcttcaccatcatgggagcatgggagtgagggtggcggtcccttgccaagttggnnnnnnnnnnnnncagagattcactaccatcccaggccttaannnnnnnnnnnngaccgtgccaagtgacctggtgcctgtgggaagtgggttctcaggactgg

SEQ ID NO: 8139 - DNA, 753 bp, Macaca Fascicularis
  misc_feature (1)...(753): n = A,T,C or G
agtcatacccaggcaagtgcttnnnctggagaaacacttgccatccttacagcaggaatctccaagagatggcccaagtatcggcttcccatcgatattgctcgtccctgctcggaaactccttttccacgattgtgagatattaaacttgactgatggaatagaagcnnnnnnnnnnnnnnnnnntgtgtgaaannnnnnnnnnnnnnnttacctctgtttaatttctaatgttagggtccaaggaagccctcnnnnnnnnccagatgcattttgaactcagttcattcagaaaccatggtttgtggtcatcatctacttgtgttgtgagaaaccagaaattccaacttcagctcttcagttacggtcttttcgtattattttagaatgtgaaacttacgctgtgtgcccctccttttatgtggcaaacacaacctgccccgtatggtgcctnnnnnnnnnnnnnnnnnnnnnctttcctcatgtttaacattctggtttcttccttccnnnnnnnnnnnnnnnccctcttcaaggtcctaccttcttcccctttattctttgtggttctgtacagattgatgtgtttatattgcctttcctgattaagtgttccttattctgtccttgatggaggggagaagggagggcaaagaagttaaatttatttcagcacatcaaaatgaatatctacttaataactttgtaaactgtaaagtgacatacatataattgtaaagtactgttaatttg

SEQ ID NO: 8140 - DNA, 448 bp, Macaca Fascicularis
aatgttctttcccctgagttgcctcgttcaaatgatccatattcagtcaccgtttaaagatcaccacttcaaaactagccagcatttaaataacaaaaacaaaggagttttcctttgcagaccgggttcttgaagagaagttccagacaaatgttttctatgtccttttttttttttaattaaaaaaaaaaaaaaaaaaagcagcagacctgaaggcgacttcccctgaaattgtattatttttcctttcccctacccccgcccccctaagcgggggaagggcagaaataaacgtctagaagagtagccatgagaaaggggtttaaaaaaaaaatcacaattcagaaaaccaactatatatgcgtttgtaaaatgtctaacctcagagaacggggtttgcgatggggaggaggggagagtgggatgcagggaggaggaagaagataaa

SEQ ID NO: 8141 - DNA, 613 bp, Macaca Fascicularis
  misc_feature (1)...(613): n = A,T,C or G
cactcaagacaatggattcttatgtgattttccccctaggaggtacctagtaggccgactgtgagacttaggtaactgggcacaggttcagccccactgagacttctctctcaccttatttatccccaacagtnnnnnnnnnnnnnnnnnnnnaattccctggttccatggagcagagaagtggggctggtatggtgaaggagtttgtccaggagggacaaagcaaacatagaaccaaaccatgaccacaagctggatgggctgggggagaagtctggtgatgnnnnnnnnnnnnnnnnnnnnnnnnnnnnnnnnnnnnnntggacaggtgcctgcccaagcaggcttggatccctacctttcttcacctttcctctttggccatgttgtattaaaaactgaagtcttggccgggtgtggtggctcacacctgtaatccccatagtttgggaggtggaggcaggtggatcacttgaggtcaggagtttgnnnnnnnnnnnnnnnnnnnnnnnnnnnnnnnnnnnnnnnnnnnnnnnnnnnnnnnnnnnnnnnnnnnnnnnnnnnnnnnnnnnnnnnnnnnnnnnnnnnnnnnnnnnatgaggattgcttcaac

SEQ ID NO: 8142 - DNA, 739 bp, Macaca Fascicularis
  misc_feature (1)...(739): n = A,T,C or G
ctgtgtctgtgannnaaaactctgtgaccatgctctgacttttgtatttcaacctgagttcaaacaaataaacaagatattttttaaagaaagcataacatagtgtgtcttggcaaggacatgattcatatggcagcagaatgtgagaagttgtaaggtccttggtactcactgtaaaatcacagacagagaattggtaggggttgtgaatacactagtaccacttaaagttcagtgatacagtatcagaaatagggtccttaagtattttgaaagagtttactcttcagtcagcttagatgagagctctctccctgctcccctcttccctctcaaaagttgagagtaaacagaatttggtttgattccagggaggggaaaatgagcagagaataggacttttatactttccaataccaggaataaaatgtttgtgatatatatggggtacagcaaatctatctagataatgtgaatacgataaacttcctaattgcaggatattcactctcaatcctgaagttaccggttcctgccgaattgagcttcagctgttactgttttgaagccgctgtaaattactgctttccccagatcccccactatttttttaaatgggcgggggcgcctgttcagatttaaaatagatatgttggattgatattctcacgtgttcagtgtgaaaacaaaacaagtacatgctttagaagcaacaacaatgaaatcctttgaaatgtgt

SEQ ID NO: 8143 - DNA, 2116 bp, Macaca Fascicularis
agtttgcaccagcagtgggctttatcattttgatacatttttcccaagtgatagttgttggccatagggacctgccattttaatttgcttttctttgctaacagatttttgtatgttaatcgagtatgcatatatctttttccttttggaattttcatttttgcatattttgatagatgaaggctgtctttgaacctcagatatgtggcaagtctacttttttcccaatgtgtttgccttttaagtttgatcatgttcaacatatgttcatacctacgttttgtttcttacttctcataccctgtgatgaagagagttggaatgggcttgccctgtgggatctaaatggaaaagcacatttcatgggaagtgttcccgatgttagtgtctttcacttaggggacatactgtgtggtagaaatcacttgaaccatcttcaagtgagccaagttttcctcacccattcattactcaaactagctgtactgtgagaggttctacccgcaaaggtcaccaactttaaccagcctctgatggtgagtactgtcaacttgattggattgaaggacgcaaagcattgatcctgggtgtgtctttgagggtgtggccaaagtagattaagatttcagtcagtgggctgggaaaggcagacccacccttaatctgggtgagccccatctaatcagctgccagctcggctagaatataaagcaggcagaaaaacgtgaaaaggctagactggactagcctcccatccaacatctttcccctgtgcaggatgcttcctgccctcaaacgtcagactccaagttttttagttttgggacttgaactggctccctttgctcctcagcctgcagatggcctattgtgtgaccttgtgatcgtgtgagttaatacttaataaactctcctttatttgtgtatgtgtgtgtacatacatatatatgtgtgtgtatatatatatgtgtgtgtgtgtgtttatacatatatatatacacactgttagttctgtccctctagagaactctgactaatacacagcctaagcaaaataataacagtaatgacaacagtaatattgggccgttcacagtggctcacacctgtaataccaacacttcaggaggctgaggcggggggatcgcttgagcccaacagttggacaccagcctgggcaatatgataagaccctgtctctatcgatcataataataatgacagtaataatcattatcatcataaaatgcatgtacagtttttcagaaagagatctattagaattcctctgaactatttcataagattgaaagaaaaataggatttccatcaagcctgagtgagtgtgaagcccagggcagctcgtgatgcagctttgaggacactgtgcatctgtcacatatggtgtgcctgccgtcatccctgtggaactcaccacttcagtgcctgcctgccctacttctgactctcagcacctgtgccactttgcctggggttttctccggatgcattctgtttacgcagcgagatggaggggattctcacagaagcgaagccaatgtgagtgcaacagctgtctgctgcactggcagaaaagggctgcgagtgagcctctaaggacataggcagcatgttgttttctgaaacaggatgttggggagaagaacagagaagagaggtgctggtctcaagcaaaatatcgggagcggggaaaaggacagttcctataaccagaaagcagaggggaggggtaggagggaactggcctcgactgagaggcctggtgggcaggacctttgactatgtaagtgttccaagcactcttgaaatttctggctgtgtggcaacatttgggttccagttctgtgggaggacaatttcttttattaaattgctgccattcaggttgagggtcactactagactggcaaacctagaggaaaatggagatgggtcctggctgactgcccttcccaggtgaaccatgcagccttgtcaatcttgtcacttgctgattgttcagtgcctggaacttggtctgttactggtttgcagatgatcaaataaaacagactcatttttttctctttcaaaaaaaaaaaaaaaaaaaaaaaaa

SEQ ID NO: 8144 - DNA, 2040 bp, Macaca Fascicularis
agtacagctccggccgccgcgccgcctggctttcgtattccttgttctcggcgggctgtggggcctccgcgccgcggccgttagtcatgtcggcgaggcctcgggccagccatctcgccgcctcgtacctcagttttcccatccgtgaagtggagccgggcctgcctgactcacccattcatcagcaagtctttggaaatatttttgttggtgctgacagccaaagcagtccagtacagaggaatggtgtatatcttggggtgattctggaagttacagtcagtctgggggtgagcagcaaagttattcttcctatggaaatcaaggcaaccaaggctatggacaagcaccacaaagctattctggctatgggcaaacgactgattcctcttatggacagaactacagcggttactccagttatggacaaagtcagtcaggttattcacagtcctatggtggttatgagaatcaaaagcagagctcatatggccagcaaccatataataaccagggacagcagcaaaacatggaatcatcaggaagccaaggtggaagagcaccttcctatgaccagccagactatggtcaacaagattcctatgaccagcagtcaggctatgatcaacatcaaggctcatatgatgagcagtcaaattatgatcagcagcatgattcctataatcaaaaccagcagtcctatcattcacaaagggaaaattacagccaccacacacaagatgaccgtcgtgatgtgagtaggtatggagaagataatagaggatatggcgggtcacagggaggaggtagagggcgtgggggatatgacaaggatggaagaggtcctatgacaggatcaagtggtggtgaccgcggtggcttcaaaaattttggtggtcacagggattatggacccagaccagatgctgattcagaatctgataattcagataacaacacaatctttgtgcaaggccttggggagggtgtgtctacagatcaagttggggagttctttaaacaaataggaattatcaagacaaataagaagactggaaaaccaatgataaatctttatacagacaaggacacaggaaagccaaagggggaggcaacagtgtcatttgatgaccctccttcagctaaggcagccattgactggtttgatggaaaagaattccatggcaacatcattaaagtgtcctttgccactagaagacctgaattcatgagaggaggtggaagtggaggtgggcggcgaggccgtggaggatatagaggtcgtggaggctttcaagggagaggtggagaccccaaaagtggggattgggtttgccctaatccgtcatgcggaaatatgaactttgctcgaaggaattcctgcaatcagtgcaatgagcctagaccagaggactctcgtccctcaggaggagatttccgggggagaggctacggtggagagaggggctacagaggtcgtgggggcagaggtggagaccgaggcggctatggaggagacagaagccgggggggctatggaggagaccgtggtggtggcagtggctacggtggagaccgaagtggaggctatggaggagacaggagtggtggcggctatggaggagaccgaggtgggggctacggaggagaccgaggtggctatggaggcaaaatgggaggaagaaacgactacagaaatgatcagcgcaaccgaccatactgatgactgttttgaatgttcctttgtctctgacatgatccatagtgaaattgccagagttttgcctgctgctttcctcgtggcctcttcttgggtagtgaaattaagtgacatttggatttttatttgggtgggagggctgggacagtttttcttttagaaatgtctgttgagagttccccctttagtttccaaccttctccccaacccttggagctaaatgcgttgtaaaatattgccaaaatgaaaagtgttttgtaatactgcaataaaggctgcttgtttttgtggaaaaaataaaaaaaaaaaaaaaaaaaaaa

SEQ ID NO: 8145 - DNA, 778 bp, Macaca Fascicularis
  misc_feature (1)...(778): n = A,T,C or G
atnnnttattaaaatagtgtaatagtatactctaggcaaattgaccaaatgaacagatgaaggnnnnnnnnnnnnnnnntctgtacgtgtggagatttgatttagtatacagctggcactgcagactagttggggagaaagaggtttcaataaagggaacaggnnnnnnntgcttatttatgtaggaaaataagttgtactttgtctgacnnnnnnnnnnnnnnnnnnnnnagatggatcaagaaacttaaatataaaaggctaaactgaaactttgagaaaattaacagattattttgacaaaatcattaagtataaggaaaaaagtttaattcacctgaaagataagaacttcttattcataaacagataccataaagagaaagaaaagacaaaaccacaaagtggtagaaaatatttcgagtcgtaattacnnnnnnnnnnnnnnnnnnnnngaattaaagaaaaaatgtgcagtaaaagattatcatagaaagcctaagannnnnnnnnnnnnnnnnnnnnnnnngctnnnnnnnnnnnnnnnnnnnnnnnnnnnnnaaacttggattgcagaaatgttcccatggnnnnnnnnnnnnnnnggctagtttactgtgcttgtaaacnnnnnnnnnnnnnnnnnnnnnnnnnnnnnnttccttcttgagttcttgnnnnnnnnnnnnnnnnnnnnnnnnnnnnnnnnnnnnnnnnnnnnnaaataaaatccttggattttcaatggnnnnnnnnnnnnnnnnnnnnnncataacat

SEQ ID NO: 8146 - DNA, 803 bp, Macaca Fascicularis
  misc_feature (1)...(803): n = A,T,C or G
ggagttgtacccttcnnnnnnnnnnnnnnnnnnnnnnnnnnnnnnnntggggctgtggcagtatttcccaaggaccacagttccctccttcaagggaccnnnnnnnnnnnnnnnnnnnnnnncccaggacccagggaccacgggggccccacccaacgggacctcaacggcccgggccttagccgtgtacgagagagcctgaccctaccctcccattctctggaacacctgggcccaccccatggaggaggaggtgggggaggcagcaacagcagcggtgggccccccttgggtccctcacacagagacaccatcagccggagtggtatgatcttacggagtccccggccagactttcggcctagggaaccttttctcagcagagacccgtttcacagtttaaagagacccaggccaccttttgctaggggccctccgttctttgcaccaaaacgcccattcttccctcccaggtactgatggaaaccaagggaaaggcattttgaacagtctagagaacattggaagtaggagtttggtttattgttgttgtttttatttgttttctctttctcgatttttttttaattataacaaagggcctctcttccaaagtaagaaatcacatatgcttacgttttactattcaattcaatcctccctcccattgcacttatctaccttccccaagttgtttgtattaaaaaagaaaaaaaaaaagtaaagaaacacaaccaaagccacttcatttggctggggggttggggagtggggaggaaaacaatctttattttaccccatct

SEQ ID NO: 8147 - DNA, 3278 bp, Macaca Fascicularis
aaataagccaggcacagaaagacaaactacacatgttctcacttatttgtgagagctaaaggttaaaatcattgaggtcatggagatagagtatagaagacttgctctggttcttgatggcaagcagggctatggcttagagcctagagtttcatgggctgacctctgtggtccagagggagggtctggtgctgagcatctgggcttgtgaaaggggggaatgtgatatgttgaagatggaagtgaagtatttagtgtactcttagtttcctaagacactcttcaaagtttcagtgtcttcatacagtgaaactttctcattcatgtaacagcccaaagcgatcagtgtgcaggtcactttcacatggtatttcagagacgtaggctcctttcccacttgtggctccacaaaggtcttgaaatcttctgtatgctgcaggcagatgtactgctggcagaggggcaacagctatactgagtgtctcctgatctgggccagatcaaggcctttcacctctatgaagggatttggaggagcactgggaacagatatttttgagcacttaccgaaagccaggcatcataccatgtatgttccatgcattctcatttaatcttctatggaagagagaacattatgtaaaagagcaaatggaggcctggagaggttaagtcagtcatcaatgattaagcagctaatatcgtggtaaggctagattcaaacccagacctttctactatcgtatgtttcttttcctatacatcaaatgcccagccataactacattacacctcacagcatattggctagaaaatgtggtgattggaaattgtagagttttcatgaagcttttctctgcccttgattgtgaaaatagctaaatatctttaggacactacaaagtatgatgtcacagtggacaggaagatgaacttcattcgtaagatgagtaataagcacatgcggtttaagtcatgacatgtacttaggtaaaagagagaaatcaacccagttaggaacatttaattagaaacattcagcttcaggctccatagagtcccctagctgggtcctccttaactgactattttcttgacacatccctgaggccccaggctctaagtttcttctccctgaataggtttgagacgttttgcaatggactcttctctccttaggtgctgtattttcctgtgagcagtctcccttgtgaagccacaacagctttctcccctaagggctctctctagcaccacctccatgaagcccttctctaggtctcctcttgatcctagtgtcagtgaaaagacaggtagtgacacctctaggccttcacctcagatgggacataggagcaccactgaagctggattagacaagctgaaagggctaaaagctgccactattgcggtgagggagaacatcgttctgaaaacctcactgcttttctggctcaaagttgaccattaaaatctctatgaatcttaattcaggcacagtaaagattccagttatccgccatggtactgacctctctactttcacatctgtctggtgtgcaacgcggccctcagacccagcttctgccacaccgggagttgactacgttcccagctctcggaaggtggaatttgggcccggtgtcactgaacaggtgcgtttacagcagtccagactccacaaggtcggcaggtcggtttgtgaatgttgtctttagtttgcttcccaagctctctaaactcccctggcaatattcctatcttttctttctttaaaaacacacacatataaacaagagagtaacttaggaggggatcttctaaaaactctcctagtgacatttttagcattaaatatccagccttacagattcaggatataaactatactcgtttgatataaatgtctataaacaaactccgagcggcatgtaatagagagatcatcatgttatggattagaaaatcttactttaaaaccaccaaagaaagacaagttgtgacctttgccctagttaaggcaaatgggggttaggtggtgggtcctctgtaaagtttgctttgatttttcttctagtattgcaccttgactatcttggatgacactcagtatccagtaattgaaggactggagacatttgtggttttcctcagctcagcacaaggagccgaactgaccaaacccttccaggcagtcagcaattaatgacacattccaagatggtaagagattggggatgccagctggtagttccaaatatatttctattttttctttaatgtccacacatgtgacattggaactcattcacgttttcattcaagaaatatgtgtgtgtacatgtgtatacgtgagcatttgcacttttacatagcagagtaagtagatgtgagagagaaccattgatgtctccggtactctgccagacacaaagagatgtataagccttgggccctgtcctcaagaagctcaatgtctcactgtggaatcagagccttaaagagagaaatttgaataaattatgataaatgacctaatggtactatacatccagcactatgggagcagagggaactgaacaggaactacaagtgggtgaaattatagatttcaccaaggagactgtatttaagcagagtcttcaggtgtgataggagtctatctaatggataataaaggaaaacctatttcgaatggagagatatagtaaatacaatgtataatgtcttgaaagatgcatatttggggaacagacccttacttttgctttgagcatgggagggggtgaatagaagagtggaatggaaagacagattggagtcaagtgctgagaggctgtatgatccagcctaaggactctataagcaaagggtagcaggggatgcttataagcagaggagtgatgtgttttttttattttagaaaacgaatattggcagtgttgtagatgatgtgcaggaatgaatagatgcagtcactgctgaagatgtaacctaagtaacatgaggaaaaagcaggaaaggcggccgggcgcggtggctcaagcctgtaatcccagcactttgggaggcccaggcgggcggatcatgaggtcaggagatcgagaccatcctggctaacatggtgaaaccccgtctctactaaaaaataccaaaaaactagccgggcgaatgtagcaggcgcctgtagtcccagctactcaggaggctgaggcaggagaatggtgtaaacccgggaggcagagtgagactctgtctcaaaaaaaaaaaaaaaaaaa

SEQ ID NO: 8148 - DNA, 705 bp, Macaca Fascicularis
  misc_feature (1)...(705): n = A,T,C or G
tgnnggcaacagcttnntnnnnntctgctcaatgccactttgtttcctagtatttcatgaccactattagttctttcattgtcactgttcctgcttcttaagatcacttctcaaggatacctcagtaagcatggataaatcaaatcaactttttgttatatgtgccaagtactaactttcagggttctcttcagcaatcattannnnnnnnnnnnnnnnnnnnnnnnnnnnnnnnnnnttttcttnnnnnnnnnnnnnnnnnnnnnnnnnnnnnnnnnnnnnnnnnnnnnnnnnnnnnnnnnnnnnnnnnnnnnnnnnnnnnnnnnnnnnnnnnnnnnnnnnnnnnnnnnnnnnnnnnnnnnnnnnnnnnnnnnnnnnnnnnnnnnnnnnnnnnnnnnnnnnnnnnnnnnnnnnnnnnnnnnnnnnnnnnnnnnnnnnnnnnnnnnnnnnnnnnnnnnnnnnnnnnnnnnnnnnnnnnnnnnnnnnnnnnnnnnnnnnnnnnnnnnnnnnnnnnnnnnnnnnnnnnnnncgnnnnnnnnnnnnnnnnnnnnnnnttctttagaaaattatttcaaaagttattttaggtccagaaatcaaggagtgttccaacnnnnnnnnnnnnnnnnnnnnnnnnnnnnnnnnnatctaacctgctattacttgccaaattttatatattcttttctcttgcctgtatttcta

SEQ ID NO: 8149 - DNA, 796 bp, Macaca Fascicularis
  misc_feature (1)...(796): n = A,T,C or G
cttttaaatacagacactcagcaggttcagatgggagatgatcagaggggaaatgtttacaaccctcaggaggaggaagagtccgagttttaagaaaaacaccaaagctggataggttgggcagaagagctggggatagcatttagaaaggatgagattcctgggttctgggttatcaaggtgagagaaatcaggggttgccagctgtaggtgggcgtcaggaccagagtgatgcttccagaagtttctacaagtgggcagagtccaaggtacggcagggtataccagaagttgaggggcactaggtagacgggctgagctggtggctgggtgctcccctcaccctccatgctgctaggagcccctgagcacggactcactctcttctcctccctcctggggcctgcctgtctgtctgtgaactcttgtcggccagcgaggccgggagcaggtggccttcatctgcaactgtgtctctctcagcctccacagccacggggacgccctgcacctattcccacgggacaggctggacccagagactctggacccggggcctccccttgagtagagacccgnnnnnnnnnnnnnntggacgccgctgacctggggtcagacccgcgggctggacccttgcccaccccacaggaaccccgaggcctaggggagctgttgagccttcggtgtctgcatgtgggaagtgggcttgttcacctacctcacagggctgttgtgaggggcgctgtgatacggttctaaagcacgggcttggcgcaccccactgtgctctcaataa

SEQ ID NO: 8150 - DNA, 717 bp, Macaca Fascicularis
  misc_feature (1)...(717): n = A,T,C or G
cagccacccgcgaaacaggatgggacaagatttcagcgagtcctcctggcccccgggcctcgctgtgggcaccagccctcttggtagccggtgtggagggccggtgtccttggctgccatggagggacttggtcaccgaaacagccacctgctgtaattggacctgaagtcagaggctgggggtcagaggctcatggtgctgagaagccactgggcaaagtggccaacacaaaggtcccaggaagccatcccccgagagctgagcgtgaggtctttgcgtctttctccaagctgagacttgggtgtgcggcatgcgcgtggtgtttcccgagggctgcttggaccctggtgggctgaatgctccgaggaggggtggactccactggacagtgggatgtggtgttccatgtgcctgtttccacgtcagcaccttttgacttggcagcatggagccaagctctgcccccgcccaggagggtgcctttcttgggggtagggggacggccccctctgcctgccccagatcccctttaatgggagnnnnnnnnnnnnnnntggaggtgtctgggccaccttcagaaggtggatgtggtggccgagaccctatccacagagggtgacggcctctcccttctgcaggtgtgggcaggtgggcctgggacaggtgctggggcctctcctggctgtatgtgagggcccaatgtggaaggcgcggcc

SEQ ID NO: 8151 - DNA, 762 bp, Macaca Fascicularis
  misc_feature (1)...(762): n = A,T,C or G
ccagagtagcaaatccacagacagaaagtagctagtgggtttccaggggcagtggaaaggggaaatggagggcaacccctaatggatatgaggcttcttttggaggtgatgaaaatgttctggaattcgacagtggtgatggttgtacatctctgtgaatatactaaaagccactgaatagtatactgggtgaattttatggtatctgtagacattccagttgacgatcatatcttagtatagactttgagttatctcactcgaggcactagacatgcaagaggagaagtctccagattattccagccttgccacttgagtcactccagcctttctggtcttcccagctgaggctcagacatcgtggaagaaagaaaagctctccttctgtgccctgtggtttgctgatccacagagttcataggcatgattaaatggtagtggttttccaccacgaagttttggagcaatttgtcacaaagaaacaggtaattagaaaaataacctttcaggccnnnnnnnnnnnnnnnnnnnnnnnnnnnnnnnnnnnnnnnnnnnnnnnnnnnnnnnnncatgaggtcagnnnnnnnnnnnnnnnnnnnnnnnnnnnnnnnnnnnnnnnnnnnnnnnnnnnnnnnnnnnnnnnnnnnnnnnnnnnnnnnnnnnnnnnnnnnnnnnnnnnnnnnnnnnnnnnnnnnnnnnnnnnnnnnnnnnnnnnnnnnnnnnnnnnnnnnnnnnnnnnnnnnnnnnnnnnnnnnnnnn

SEQ ID NO: 8152 - DNA, 696 bp, Macaca Fascicularis
  misc_feature (1)...(696): n = A,T,C or G
taaattaagatgtaaccattagcctcatgtttactccnnnnnnnnnnnnnnnnntttagccctgnnnnnnnnnnnnnnnnnnnnnnnnatgcgccgcgtgctcccgtggcatagagcctcgtccagtcacaactagccactgggcggggtgcgtgccggccgagggcgccggctgccagagtggacatggcggccggccccactggggcggtgctggccctcctgggggtgctcagtgtctgtgctgccagcgcctatgggtccgtggcggagagggaggccggcggtgaggcggagtgggcggaaccgtgggatggcgcggttttccggccgccctcggcgctgggcgcagtgggggtgacgcgcagctccggaacgccgagaccagggagggaggannnnnnnnnnnnnnnnnnnnnnnnnnnnnngagcccagggctattcccccacttcccgggagactcggagcgnnnnnnnnnnnnnnnnnnnnnntgcgtggcgtcccggaaccgcggagcgctgagggactcgcggacgcgcgcgctgctcttctacggcaccgacttccgcgcttcggccgcgccgctgccgcgcctggcgcaccagagctgggcgctcctccacgaggagtcgcccctcaacaacttcttgctgagccacnnnnnnggcatccgcctcttcaatcttacctccaca

SEQ ID NO: 8153 - DNA, 2034 bp, Macaca Fascicularis
atcccagttccacgtgctcgtccctgcacaaggtcatctggtttctgtcctgtggcctccagtcctggggcgccccagaggcagagcaggggcttccatcaaaggacccacccagaccccagcgtggccctgcccgagatgccatccacggagtcctggcttcccctggtgtggccaggtggggccgagatcacagcagggggctgccctgacctttcccagtgttcaatgtgtgtgtcttgcgttctgctccaggggtggtggtggcaggtctgtccccagcattctcaccctgggcagaacccttgggacccactgctgtcgcgtgtctgagccacccctgcagcttcacgggacccctgcacacctctgcccactcagtgtcccctgtcaaccttgtccttgtcacagccccagccctgcagggctgagagcaccacggatgctgcgggctgcagccgcgctctggactttgggggatgctgtcggcttcagagggccaatggggtgctcttaggggcccaagccttgggaagatgcccagacatccgttagtgaagattcgacttccaaaaccagccaccgttgggactggattccactccagtataggcacttggcaacaaggtttattccaaaaagaagaggggctggcagacgggacattctcatggacaaaattcctttcctttttctcatctccatgaacatctgggcaccaagccctgactcaaaggacagatgtggatgacaacaagccttctgtgaaagcaagtggcccgtcccttggtggaagggagtccagagggccgtgggtgtgaaactgtacacagttttccctccctccctcctccttgtctgtgacacgtgttcacccacacacacacacgcacacaaacacatgtgcatatcacacacatatacatacacacaaacgtgcatatcacacacatacacatgcacacacgtgcatatcacacacacacgcacacacacaaacgtgcatatcacacacacatacacatgcacacacacaaacacatgcatatcacacacatacacatgtgcacacacaaacacgtgcatatcacatgcatacacatgcacgcaaacgtgcatgtcacatacacacacaaacgtgcatattgcatacatgcacacacacgtgcatgtcacacacatacacatgtgcacacatagttaacacacacatgcacctgccatgcacatctgtgcatacacgtagcggtgtgttttccagccgcccacacactgggttttcattggagagtgtttcaccctgcaaacgtcaatgtcagcagactcgtgggtgcactctgctatccggtcgggaggtctcaccaggcgcagagcctccctaacgtgcacctccgtgaagaggggtgttggggagtgttcccagcacctgctcggtggaagggctctctggaggctggcactcagtatgtgagtatgaggagccccacttcccggggtgttggtaaacttgaccatgacgctgtaacccacagtgtgctcctcccagcaaaccccgtgtgtccttacaggtcaaccagacgggccaccggatgactgccaggcagctctgcctccgcctcaccttttcacctgcttccgtagctggtgtgaacccgaatccccacgctgtgctgtgtacacactgtaggtgcagaactgtccacacaaaaatacagtcttggcatcgttggttctttgtgaggctggttaataacatccccgtgtgtttttctcaccctagatgggggtagagggacacctgagcgtgtggcccccttctgtgtcctggatcccggggtgaggctgctctgcctggcccctccagcccctcatgaactttctgccctcagtgctcctggctgagcagagaggcctcccatcattcaaccaaagaaagtcaacattaaacattaaacctctgtgtgtttctatactgaaaaaaaaaaaaaaaaaaaaaaaaaaaaaaaaaaaaaaaaaaaaaaaaaaaaaaaaaaa

SEQ ID NO: 8154 - DNA, 701 bp, Macaca Fascicularis
  misc_feature (1)...(701): n = A,T,C or G
cgggacgtggacctcatcctgtcattggactacaacctccacggannnnnnnnnnnnnnnnnnnncctgggccgcttctgccaggagcaggggatcccgttcccgcccatctcgcccagcccggaagagcagctccagcctcgggagtgccacaccttctccgaccccacctgccccggagctcctgcggtgctgcacttccctcttgtcaacgactccttccgggagtactcggcccctggggtccagcggacacctgaggcggcggcggctggggaggtgaacctgtcttcagtggactctccctaccactacacgaaggtgacctatagccaggaggatgtggacnnnnnnnnnnnnnnnacacattannnnnnnnnnnnnnnnnnnnnnnnnnnnnnnnnnnccctgcgccaggcagtgcagcggaggcggcagcgcaggccnnnnnnnnnnccggggcccctgcctggccctgccaccccgactctcattcattcnnnnnnnnnnnnnnnnnnnnnnnnnnctgtcaccacccagtgcttcagagcctctggggctcaggtgaccctgtcccagggtccatgctgagggctgggagctccctggggcctcagcagtttgcagggaggtaaggaggccgagcccatttgtgtatcacccaaaaccccatggcccatgtctgttttcccttcnnnnnt

SEQ ID NO: 8155 - DNA, 711 bp, Macaca Fascicularis
  misc_feature (1)...(711): n = A,T,C or G
acattcattgaactnnnntgttaaaaaacagtgaatggggccaggcgcannnnnnnnnnnnnnnnnnnnnnnnnnnnnnnnnnnnnnnnnnnnnnnnnnnnnnnnnnnnnnnnnnnnnnnnnnnnnnnnnnnnnnnnnnnnnnnnnnnnnnnnnnnnnnnnnnnnnnnnnnnnnnnnnnnnnnnnnnnnnnnnnnnnnnnnnnnnnnnnnnnnnnnnnnnnnnnnnnnnnnnnnnnnnnnnnnnnnnnnnnnnnnnnnnnnnnnnnnnnnnnnnnnnnnnnnnnnnnnnnnnnnnnnnnnnnnnnnacctcagaaaaaaaaaaaaaaaagaaagaaagaaagaaaaaagcgaatggaagaaaaaaataaacatcatttggggctactttcagaactatataataaagtgagatttgtgtggttgggaataaaattagggtttaaaaaaatttcggagtttcaaaatttggattttccagattttgttttaattaattattgacaaacctatccaaggagctaaatgacatggtttaggagccataatgtctctagaaacattataacacatcccatcctgaacaaagaatatgtagtagtttcccacatgaatattcagaatatttgcatctttttgtgtcactactagaactctgtacaactatgtttaaatttattgtcatggccttctggatataggatccagaaaac

SEQ ID NO: 8156 - DNA, 729 bp, Macaca Fascicularis
  misc_feature (1)...(729): n = A,T,C or G
taatgtgggacagtaactggatgtctagctagtccagtgagacaaaaacgaaaaagcatacacactgggaaggaagaactaaaactagctctactcacatatactactgtcttacagaatgtaccaatggatgcacaaaaagctcctagaactacaagacaatcatagaaacgttgcaggaaacaaggtcaatatacacaaggaaaactatattcctatataccagnnnnnnnnnnnnnnnnnnntaaactaatatcatttgtgaatagcaccaaaaaaaaattaaaggaatacttaggtataaatataatatatggaggcctgtatgctgagaactagaaaacacttggaaggagactacatcagattaaatggagaggtatacagttggccctctgtgggttctgcatccatggattcaaccctgaacaaaaaatattcaggaaaaggaagaacaaaagagtaaaaataataaaaatttaaaaatcgagtataacacctatttacatagcatttacattgtattaggtattataagtaatggagatgatttaaagtacaggcatacctctaagatattgcaggtttggttacagaccactgcattaaagtgagtatcacaatagagtgggttacacaaatgttttggttttccagtacacataaaagttatgtttatactgttgtctagtaaatgtgcaatagcattgtctacttcatgtatatacc

SEQ ID NO: 8157 - DNA, 727 bp, Macaca Fascicularis
  misc_feature (1)...(727): n = A,T,C or G
cagccaggagcccgtccnnnnnnnnnnnnnnnnnnnnnnnnnnnnnnnnnnnnnnnnnnnnnnnnnnnnnnnnnaggtgtacgcagccgcccgggaagccaatgctcacnnnnnnnnnnnnnnnnnnnccgagggctacnnnnnnnnnnnnnnnnnnnnnnnnnnnnnnnnnnnnnnnnnnnnnnnnnnnnnnnnnnccnnnnnnnnnnnnnnnnnnnnnnnnnnnnnnnnnnnnnnnnnnnnnnnnnnnnnnnnnnnnnnnnnnnnnnnnnnnnnnnnggttgtgcaggaggccctggaccgggccagtgcaggccgcnnnnnnnnnnnnnnnnnnnnncggctcagcaccgtccgtggggcccnnnnnnnnnnnnnnnnnnnnnnnnnnnnnnnnnnnnnnnnnnnnnnnnnnnnnnnnnnnnnnnnnnnnnnnnnnnnnnnnnnnnnnnnnnnnnnnnnnnnnnnnnnnnnngccccgaggacggtggccccaccgcccaaaaagccggaaggccccaggagccagcagcacaagtcctgagaagggcccccgaggtgtggtcactgccaagcnnnnnnnnnnnggctggggctcagcctgccgggagcttactggagactgagcccccgggagggccagcatgtggagagtcgctgcagctgctcctgctcacaataaagccggggccgagcggctggcaggggaggccaatccctccctccc

SEQ ID NO: 8158 - DNA, 744 bp, Macaca Fascicularis
  misc_feature (1)...(744): n = A,T,C or G
ttgtgttgcacatagatatggtagtctgctctgtacatttttcccttttataatgtgcttttcacactgctgcaaaccttagttacatcctaggaaaaagaatacttcctaaaataaaactaaggtatcatccttacccttctctttgtctcacccagaaatatgatggggggaattacctgccctaacccctccctcaataaatnnnnnnnnnnnnnnnnnnatttaggcaaaaccttaaatctccaggctttttaaagcacaaaatataaataaaagctgggaaagtaaaccaaaattcttcagattgttcctcatgaatatcccccttcctctgcaattccccagagtggtaacagatgggtagaggcagctcaggtgaattacccagcttgcctctcaattcattcctcctcttcctctcaaaggctgaaggcagggcctttccagtcctcacgaccagcccttcacctagtccctcctgacccagggatggaggctttgagtcccacagtgtggtgatacagagcactagttgtcnnnnnnnnnnnnnnnttaaaggaaatgcagtaggcttcctctgtagagctctgaaaaggttgactatatagaggtcttgtatgtttttacttggtcaagtatttctcacatcttttgttatcagagtaccattccaatctcttaacttgcagttgtgtggaaaactgttttgtaatgaaagatcttcattgggggattgagcag

SEQ ID NO: 8159 - DNA, 175 bp, Macaca Fascicularis
attctttatagtatcaaaaattggggggaaaaaatctccatgtcaaagaagaaagtgcgataatcaaaatagtgaagtattttcctgccattaaaataattacgtggaagactgtagaaacgtggacatgcttgatatggtaagtaaacgagcacaatacaaaataggatgcata

SEQ ID NO: 8160 - DNA, 718 bp, Macaca Fascicularis
  misc_feature (1)...(718): n = A,T,C or G
tgcccatagggcctgggcagatgnnnnnagcaaagccagggcctgagaataagaactggaacccttctagcccnnnnnnnnnnnnnnnnnnnnnnnnnnnnnnnnnnnnnnnnnnnnnnnnnnnnnnnnnnnnnnnnnnnnnnnnnnnnnnnnnnnnnnnnnnnnnnnnnnnnnnnnnnnnnnnnnnnnnnnnnnnnnnnnnnnnnnntgggattacaggcatgtgccaccacgcctggcctgcccctttccaagagagatgctcagcatgatgagagatcagccatggtagggagtgggtccaagtaagggtttgcattgttgccttttaagaggcctaggtcctccattaactcnnnnnnnnnnnnnnntgatgcaggctgctcttccttcatgtgagaaaaacctgtttccctctggttcttcctggctttgcacctggtggctattatgaagcagtactgcagtnnnnnnnnnnnnnnnnnnnnnnnnnnngtgtgcggctnnnnnnnnnnnnnnnnnnnnnnnnnnnnncttttggtggccaccctctgctctcacctatgnnnnnnnnnnnnnnnnnnnnnnnnctgcaaggtcacttacatannnnnnnnnnnnnnnnnnnnnnnnnatgatggagcagtagtcctcaatgtgtgtgtgagtgaagaggaccttgtggtagcagggaccatgcttcatttgtggctgtgtc

SEQ ID NO: 8161 - DNA, 729 bp, Macaca Fascicularis
  misc_feature (1)...(729): n = A,T,C or G
atacaacacatgtgcttnnattngtactnnnnnnnnnnactgtacagcnnnnnnnnnnnnnnnnnnnnnnnnnnnnnnaactgctgtctgcatttatactgtttattgcatattcttttccctggaagtgaaagagaaatgtttttcttgttgcattgattacattttataaatttgcttagctggaaagtttgggaaaagaggcctgtttgtcaattgtacaaccgattgtgaagctctagtgtgaatatttttacgtctgtattnnnnnnnnnnnnnnnnnnnnnnnnnnnnnattgaaatgtaaatgaaattaaagatggtgtacacccatcatgtaaaaagcaggcaccatctctaagatggatttaatgctcatttttaagnnnnnnnnnnnnnnnnnnnnnaaaactataatttaaaataattctgtacaatgaaatggggaatatannnnnnnnnnnnnnnnnnnnnnnnnnnnnnnnnnnnnnnnnnnnnnnnnnnnnnnnnnnntttgtgctataggaataggattaaatgggggaagactaggatttataaggcctgtatatggggggagggcagagatggaacaatgagggttgtgatgatagtgaatagcaaggagtgaattctgtgtgtttttgctgtagcactgaagtgaagagatactagctttggctgttnnnnnnnnnnnnnnnnnnnnnnttcagtgtttgagagaaaatt

SEQ ID NO: 8162 - DNA, 689 bp, Macaca Fascicularis
  misc_feature (1)...(689): n = A,T,C or G
caagggtttctctgttactgggtgatcttcgtnaaattccttaacctctctgagcctgtttcctcatttatgaactagtgagaattaatgttaatgtgtgacatttcttaatattgtgccatgtccagagtaggtgctctataaatggtagcaattatcatgatgatgataatcttggcgctgctaaagttacttccttgcaagagcagtaaacaatcatgtttaaatcaatgtgactgccttccccccttaaccgcaaacatttgtgcctcccaccctcattcctaaatgaattaacactgaacaagtggggttttaagcttcagatgactatcacgcacatataaataaagaataatgggaaaacctaggaacatggatttttgctggcttagagactgaattcagctgccccatgacttcacagctgtttctgccgccctagagtgtctgtcccctcagctctgtcccctcagccgggtctgcaacgctgactctgggattttcttataaaaatgcctgatggacgggaggaagatctggaggtcggcaggggaaaaagtgagtcattcaaattcacaaagcagtccgcttagtaaatgctgcaagagaaagaaaagtaaaagctggctcctgtctctggggtatctgtagaaatgattcggacttatcatgtcactgagcaaagt

SEQ ID NO: 8163 - DNA, 733 bp, Macaca Fascicularis
  misc_feature (1)...(733): n = A,T,C or G
agtgggagatgtagtatnnnnntagcatttaaattctcatgaaatgggcttggtctgtgatctcttgatcagacatctgccttccaggtgatcctttgaggttgtataattcagctggtcctggctcgtggtccctgttactgagctgggcagttgaactgaaggtcagacaagcgcaagatcatgccttgggaagcatggtgctttaggggtgcctttttattcctttcattgtattatagactgtttccaagtttatcgttagaaatggtaaagtgggtctgatgttttgaggtagaatccagcctggggcaagatatgaactgttcttgaggtagaaatgtctacagtcagttgtttcatctagcttgcatcttaaaacacaagcccttcggttgctttcatgtactgaacacatttgccaatgacagagggttatacaggatccctcttttacatttctattgtctgctacgctcatcagagtatattttggggtatgaggttttggggtttttttttcccattttgtaactgccttattgaaaagtaagtgcccttccattccaggcctcctcatattgtacttgtttcctgccaaatctgggggatcatttgtattttaactttgtaatctatggctctgtactgttgaaaggctctcaattctatggggtctccttagtatgtatgtgacttttcatgttgcaatatcacacagatgggatggccc

SEQ ID NO: 8164 - DNA, 793 bp, Macaca Fascicularis
  misc_feature (1)...(793): n = A,T,C or G
gttaactgtttttaagaatgttgacttgctcagtgatatggttcaggaacatnnnnnnnnnattctgaaacacttgaaagatattaaagtgaagttctcagnnnnnnnnnnncctatgagttttgtcttagaatttcactttgaacccaatgaatattttacaaatgaagtgctgacaaagacatataggatgaggtcagaaccagatgattctgatcccttttcttttgatggaccagaaattatgggttgtacagggtgccagatagattggaaaaaaggaaagaatgtcactttgaaaaccattaagaagaagcagaaacacaagggacgtgggacagttcgtannnnnnnnnnnnnnnnnnnnnnnnactctttctttaatttttttgcccctcctgaagttcctgagagtggannnnnnnnnnnnnnnnnnnnnnnnatccttgctgcagacttcgaaattggtcactttttacnnnnnnnnnnnnnnncgagatcagtgttatattttactggagaagctattgaagatgatgatgatgattatgatgaagaaggtgaagaagcggatgaggaaggggaagaagaaggagatgaggaaaatgatccagactatgacccaaagaaggatcaaaacccagcagagtgcaagcagcagtgaagcaggatgtatgtggccttgaggataacctgcactggtctaccttctgcttccctggaaaggatgaatttacatcatttgacaagcctattttcaagttatttgttgtttgtttgcttgtttctgttt

SEQ ID NO: 8165 - DNA, 1667 bp, Macaca Fascicularis
catctctttcttccaggactacggagctgccagctgctgatccatttgctttagcacccttcccttcgaaatcaggcaagaaaccctaggagcaaaacctgagcctcaagcctctgtctctgtcccaccctcagtacctgccacggcactcccagctgagccttccgaagaagaaatattatccgttcttatctttcaattccctgcgtcagagcagaatttcttgagtcaacaaactcagttgcagtgatatttagttgaagcccctttaagttatgttctttttgttgttgttgttagtttgtttatattgatttctggacttgtaggcattttcatatccttcacagaggtcatccacttccaccaagaactctgcctccccgcacccccggaaactgtttaaatcctgaaatacttcaccccaatcccaaaggggccctactgtggctagttttaattcctgtagctcctgttctaagtcatgcccgccgaaggatcaagattagtccctccactaaattaagatttagtgctcctggaaaggggagatgtctggaaagaagagcaagacgaaaaccctgcacatcaacaggaagtataatcctgcagttactaatcattcattcctgtggaagcagaagctctaggagtctggatctgtttctcggtctgtgtgcgagccagactggcccttgtgcatgggtgtctgtgggtgtggaatgtacgtcagagcctatgtagagacacaggcagatgggataacgcctcattatctagtcatgctggcagggctttccgcacatccatgcttttgaaattagtatgagtgtacaggtttgtgtgtgcatgtatgcgtgtgtgtgcacaggaagcatttctacttgagggaaatcctgccccatcatgcctgcctccacaatcaaatcactcgtgttttggtgtttgctcacctaactgacttgaaccccattttatttagttagttttcttctcatggcaaaatggaatacgttggaaggtgtaggaaaatgctgctggaactgatatttcagagtcatctttttttctctccagaatttcctgttttgctattaacaaattctatttacctgattgtgaaaaattaatgtcccttatacattttcccctcacgacactagaaaagaacatcttgttacagttccggcctctgagtatgtgggctaaatgccagcattagggaattcatccatcgtaagacgaggctacaaactaggcttgcttgtttcgggttgttttgttgtgtggttgttgttgccaaatctctgctgccctttgaggaaacgtaaatctgagacatgggaataagtgtttgggaggatggaaaagacccgagtcatggaggcatgaaaacttttacgttctctgtcctctttagatgttgaaataggccagacaggttaactgatgtttttttttttttaattgtcttttatttctggaaagatctgacttattcctagcttttttcataccctttgttactagtgccttaaaataaagctggccaggtgcggtgccacacacctgtaatcccagcattttgggaggctgaggcgggaggatcacttgagcccaggaagttcaagaccaactctggcaacacagcgagaccctgtccctac

SEQ ID NO: 8166 - DNA, 728 bp, Macaca Fascicularis
  misc_feature (1)...(728): n = A,T,C or G
gagcagacgctgaaggggccctggaacaagctggagcatctggcagagagcaccggggaattccgagaggtggtgcaggccttctacgacacnctggacgctgcccacagcagcatccgcatcgttcgcccacggtctacgggaagggcgtgtatttcgccaagcgcgcctccctgtcggtgcaggaccgctactcgccccccaacgccgatggccacaaggcggtgttcgtggcacgagtgctgaccggcgactacgggcagggctgccgcggtctgcgggcgccccctctgcggggcccaggccacgtgctcctgcgctacgacagcgcggtggactgcatctgccagcccagcatcttcgtcatcttccacgacacccaggcgctgcccacccacctcatcacctgcgagcacatgccccaggcttcccccgacgacccctctgggctccggggccactccccagacacttaaccgaaggggccaccttctggcctcctgcttcccaagctcctggctccgcacagcctgatgcccccgcccccaactgtggccgcctgagctgcggaatccagaaggcggtgtggagttgggggtcagcagcggccgaggggggctgggctgggtccccgcctgggccgaccccaccaccaggggtcagcagagcccaggaggcgacgccgcccgcccgccgcgcccagacctcgcctgaatcggctctgtgtt

SEQ ID NO: 8167 - DNA, 784 bp, Macaca Fascicularis
  misc_feature (1)...(784): n = A,T,C or G
tataaatgttgatagtnnnnnntgccacacagtatgcagagttgacacagaannnttgaaaacaaaggtaactaatatgtatgtcctggttgtgtggcgcttggtaacaaagtctgtacatattatgtataaagtgtgtnnnnnnnnnnnnnnnnnnnnnnnnnnnnctgagtttcagtgttttcttttnnnnnnnnnnnnnnnnnnnnnnnnnnnnnnntctaaaaatactagcttgaatagaaaacattctcaaatggttcaagattgagtaaaaatgagaatcccatacattccattattaaattctgccctattcccaattgttagcannnnnnnnnnnnnnnngtctttgattgtcacaatattcttaataaatgagacattctgaactgcctnnnnnnnnnnnnnnnnnnnncaattaaaatgtgtattccctataatacagctgatagaactgttgtgttaaagcaagttggaaatttgcatgctagtgtgagaaaccaatggaggtccaaaatattaatcatatctaaaatatcagaaaataatactagtcttccttatgcatatttttgttaagagggcttattatgaattcaatgtttcttctgaggcaatcattttaatgtaaatactaaatacttgcatgtcttttgacaaaggctaaactacaatctattaatatgcacatttttgataaaatataaagcaccctaattaaagaaattgtggtagaaggtgtannnnnnnnnnnnnatacctgttaacaataccaaatgta

SEQ ID NO: 8168 - DNA, 744 bp, Macaca Fascicularis
  misc_feature (1)...(744): n = A,T,C or G
acactgtctaataccctttccacttgtatacaacagatgaaaaatgcttgctacatacagtgcacagacagttcaataatgagaaccaatacaactgcatttgaaataaataaaatagcctatttaaataatttaaagtaaaattactgtacaatatgaaaataaagatacataaatgttagaatctacaaagctgtagaaataaaatcattattctgcattacacaaaacagtgcaagaaaaaaatccaaataagcttttggagtgcaaagtttaaatcttccattttaaattatcatgcagacatagcatttcaagccatgctatggtctatggcaaggattttaatttttaaggagaaaactgctagccagtaaatttactgccccatcaagtgttgcatcacataactgctgctgctctgcttctatggttcagtttggaagggaggtatcctgttnnnnnnnnnnnnnnnnagttaacaagtttctgaagcaaacacatttaccttttagcctgaaacaaaattatatgacaaaataatcatatccctgggtttaagaaaaaagaaagggcctataccacatagtgaagaagcagtttttcattcatctttaaactccataatgatccttaagtgaaagcaaccatgtaacttttgagtgacatatattatggaattctgacctctagaagacaagtggataatactatatgggatcatgagannnnncaaagtaattc

SEQ ID NO: 8169 - DNA, 681 bp, Macaca Fascicularis
  misc_feature (1)...(681): n = A,T,C or G
atacagttggagcaaagagtcaaacggcacgattgagcatgtgaccaagcgggccatcagcacnnnnnagnngagcatcaatgatgtcacgtttggagccggggtcagttacatcgggacaccacggactccttcatcagccaaagagaaaattgaagccaggagtcaaggaaatgacatcttatgtttatcnnnnnnnnnnnnnnngcccccacagcctcagcagtggaacgtgaggtctccagccaggaataaagacactccagcctgcagcaggaggtccctgcgaaagacccctctgaaaacagccaactgaagagcgcatccccaccagtgtccgggcgggcaagagcccctgaggaagccgtctcgtgtcctcctccgtgtggacaggcagctggatcacttcccgcagtccttgggcagcgctttgctgtggaacacgagagctcctcctcaggggcctggcannnnnnnnnnnnnnnnnggccagccctttctatgctgtatgatatatatggttaaacactgtaaaatagagatgtgccaaatttagattttcttaccctaagcctaatctatttaatattataactttattccatttgaaagtgtcaagcccatgcagataagctataatctggtctttaaaaacttcagctttcttttatataaatcaag

SEQ ID NO: 8170 - DNA, 756 bp, Macaca Fascicularis
  misc_feature (1)...(756): n = A,T,C or G
tcaggctgcatnnntnatcgagnnnnntacctggtgatgcaatctttttttttttttaatttaatttaattttaaaataannnnnnnnnnnnnnnnnnnnnnnnnngaaaccagttggacggcccagcttgcgtctctnnnnnnnnnnnnnnnnnnnnnnnnnnnnnnnnnnnnnnnnnnnnnnnnnnnnnnnnnnnnnnnnnccccaggcccggagcacagcannnnnnnnnnnnnnnaggagccggggtgggggtggggggcaggacctgagatgccaccaggacctgatgggccaggaagggcgtggacttggaggctgtttttagagacttttttaaagaatacagaaggagccaagcttttttgcactttgtatccagctgcaagctcagggcagagtcaagggcctgggttggggacacccgactcacaggaatgcataagggcctcagacccttgcagctgcccagtaacccttnnnnnnnnnnnnnnnnnnnnnnnnnnnnnnnnnnnnnnntaaaatcacaaggctctcggcctggcagggatgtccctgtgcccagcatagggtgcctggcaggggagaccacaggtgtgcaagtggggccatggcttggcactgggggcttgaagactggtttctagcactactggtcatggccatgtcctagaagggtccagaagattattttacgttgagtccatttttaatgttctgatcacctgacagggcacccaaaacccccaactccc

SEQ ID NO: 8171 - DNA, 990 bp, Macaca Fascicularis
atgtgggggctcaaggttctgctgctacctgtgatgagctttgctctgtaccctgaggagatactggacacccactgggagttatggaagaagacccacaggaagcaatacaacagcaaggtggatgaaatctctcggcgtttaatttgggaaaaaaacctgaagtatatttccatccataaccttgaggcttctcttggtgtccatacatatgaattggctatgaaccacttgggggacatgaccaatgaagaggtggttcagaagatgactggactcaaagtacccgcctctcattcccgcagtaatgacaccctttatatcccagactgggaaggtagagccccagactctgtcgactatcgaaagaaaggatatgttactcctgtcaaaaatcagggtcagtgtggttcctgttgggcttttagctctgtgggtgccctggagggccaactcaagaagaaaactggcaaactcttaaatctgagtccccagaacctagtggattgtgtgtctgagaatgatggctgcggagggggctacatgaccaatgccttccaatatgtgcagaagaaccggggtattgactctgaagatgcctacccatatgtgggacaggaggagagctgtatgtacaacccaacaggcaaggcagctaaatgcagagggtacagagagatccccgaggggaatgagaaagccctgaagagggcagtggcccgagtgggacctgtctctgtggccattgatgcaagcctgacctccttccagttttacagcaaaggtgtgtattatgatgaaagctgcaatagcgataatctgaaccatgcggttttggcagtgggatatggaatccagaagggaaacaagcactggataattaaaaacagctggggagaaaactggggaaacaaaggatatatcctcatggctcgaaataagaacaacgcctgtggcattgccaacctggccagcttccccaagatgtga

SEQ ID NO: 8172 - DNA, 1393 bp, Macaca Fascicularis
  misc_feature (1)...(1393): n = A,T,C or G
tactccagccnnnntaaacagctgcaatagaagccaaatgagnnncataagaagccaaatgagaatcataaagcccaaaatgtttatttacctgccctttacacaaaatcacacaaaaagtttcctgatctctgttctaagaaaaggagtgtgccttgcatttaaagggaaatattggtttctagggaagggaggaggctaaatagttgataaggaattttcctcttttgtcctctttttttctcatttaagaannnnnnnnnnnnnnnnnnatttagaaaagttttaacatgacattaaatgtgaaattttaaaaactgaaaagccataaatcatgttttaaatagttacctgagaaaatattttatcactagaataacctaattagaagtgagttatcttcattaaatgttttctgtaagtggtattagaatatgtttttcagatgatgctttaaacatttagtgagaacaataagcattattcacttttagtaagagccttctgtaatctatggtagaaaataattttaaaatgattttttaatgtatttgagtaatgatgagtattaaaaagaacacacatttcttcacaaaatgtgctaaggggcgtgtaaagaatgaaaagaaactattaccagtaatagttttgataatcacccgtaattttgtatttaaaccatttaaacattgaaattattctacagacagtattctctgtnnnnnnnnnnnnnnnnnnnnnnnnnaatagagtttaactttgaaacttgcagtgaaaaaagctatccatttgttcacaaccataaatcaggagatggagattaattctattggctcttagtcacttggaactgattaattctgactttctgtcactaagcacttggtatttnnnnnnnnnnnnnnnnagcaccaaacggttaacgtgaatgtcaagtagaactctgctgtgtgtcacccttaaatcagcctaactcttcccgataaaagcaaatggcatttacggatttaagtcattagattttaaactgacattaattaatcccccttgattcattatatcatcaagtatttatattttaaataggaggtaggatttctgtgttaagactcttacttgtaccctataattaaagtaaaatggtttttatgagtatcccttattttcccttcttaaattgttatcaaacaatttttataatgaaatctatcttggaaaattagaaagaaaaatggcaaggtatttattgttctgtttgccataatttagaactcaaacctaagtatttgtagttttacattcctttttaacccagtcagnnnnnnnnnnnnnnntttctcccaagttgtatgttaagtctattctaatatgtactcaacatcaagttataaac

SEQ ID NO: 8173 - DNA, 1680 bp, Macaca Fascicularis
  misc_feature (1)...(1680): n = A,T,C or G
aggnnnnaagtgnnnnnnnnnnnnnnnnnnnnnnnnnnnnngaacgggaaggagacactgcagcgcgcggaccccccaaagacacacgtgacccaccaccccgtctctgaccatgaggccaccctgaggtgctgggccctgggcttctaccctgcggagatcacactgacctggcagcgggatggggaggaccaaactcaggacaccgagcttgtggagaccaggccaggaggagatggaaccttccagaagtggggagctgtggtggtgccttctggagaagagcagagatacacgtgccatgtgcagcacgaggggctgccggagcccctcaccctgagatgggagccatcttcccagtccaccatccccattgtgggcattgttgctggcctggctgtcctagcagttgtggtcaccggagctgtggtcgctgctgtgatgtggaggaggaagagctcaggtggaaaaggagggagctactctcaggctgcgtccagcgacagtgcccagggctctgatgtgtctctcacggcttgaaaagcctgagacaactgtcttgtgtgggactgagatgcgggatttcttcacacctctccttttgtgacttcaagagactctggcatctctttctgcaaaggcatctgaatgtgtctgcgtccctgttagcataatgtgaggaggtggagagacaacccacccccgtgtccaccgtgacccctgttcccacgctgaccagtgtttcctccccagtcatcttttcctgttccagagaggtggggctggatgtctccatctcagtctcaactttatgtgcactgagctgcaacttcttacttccctactgaaaataagaatctgaatataaatttgttttctcaaatatttgctatgagaggttgatggattagttaagtaagtcaattcctagaatttgagagagcaaataaagagctgagaaccttccagaatccgcatgttcgctgtgctgcatctgttgcaggtgggggtggagaaggctgtgaggagcccagtgtggactgggcctgtgcctagttgctgttcagttcttcttgggctttatgtggtcagtcctcagctgggtcaccttcactgctccatcgtccttgtcccttcagtggaaacttgtccagcgggagctgtgaccacagaggctcagacatcgcccagggctgcccctgcacatgggggtctctgtgcattttcagacaaatgttcagagccattcacctcctgccctgcttctagagcttctgttctgctctgctctcctgccctctctccctgccctggttctcgtgatcttggtgctgaatccaatcccaaatcatgaatctataaagcagagtctaatttagacttatgtttgtctgtgaaattggacccatcatcaaggactgttctttcctgaagagagaacctggttgtgtcctgcaatgtgctgcggtgaggggtgcgatggggggcgttgctgtagaaagagggattggggaggaagggcacacaagcagcactgctgagaaaaacataggcggcctctatctcagtctgaggggaccttgtgccatacctgccacaaaacagcatttggcctgaggctatgttaataaagatattgcctttagaataggaaaaaaaaaaaaaaaaaaaaaaaaaagg

SEQ ID NO: 8174 - DNA, 2196 bp, Macaca Fascicularis
caaattgtgaaatgctcatttgttggacagcagtaaacagatgaaacctgaggagtcagatccaccttcccccattcgcagaggcttttcagcctcattttgagatgtagttacatatcttttgccttttgccccctgtgcataggtatctacagccaatcatagatcacagagtcactggactatagagctggaaggaagctctgagataatgccaagagggcagaaaatgtatcagaagccagtcccagtgcttttcctccatttccatctgcaggaagactattttgggctgcctgaacattgtatcagacctgctacctatactatggtctacctctcctccagtggaattacaaaggcactagctgaaatgccttctagaaacagagaaaatgaaaactacttatctacttttgatagcacggattatttataaaacagattgaagtaacccattaactggcaaaaagagaatgaggtcggatttaaatgtatggcagtaagtcctattgatccctccagttatctcagtatgactgcagtatattcattcactaaaaccactcattagataccaactacacacctggcactgcagatgtaaaggtcagtcacacatgttctgactttacagagttcacagtagcagtggaggaagatatatgtggaaacaaaaaaggcatcgattgtattcagagcactgttagggcacaatggagagaggggtctttctacctgagaagatgaggaatagggtcatcgtagaagtgactttaagtcttaaaattaagaaggggattccaagctgcttcaggcagagacacaccgagctaaaacacagaggtatgaaatagcatggggactttaggaactgcacagttcattctaacaggaacaaaaggctcaaggggtcaagaaatgaggctgtatggaaagaggttcaatgtaagtactttataaaatagattaatttctgattcaatgaagcatctcttgatcattgtgtacaaggcactaaattcatcatggaaaattcattaggatgcattgccagcactttgcagacctgatgttattcagcctcaagctttccagtggccaaaggaaaatgcttactgcttttcacatatttgagtcaaagatttttttatatggtcaacgaagactaatacaagggcagtgggattttcacagaagcatgccatgttgttgagagcctcttagatcttctcaactgtgagagagaaaactgaaaattttgaagacactgagtctggagaggggataccaatcactgtccagtcaggcgttggtgggaatggggaaatggcacaggaatgcaagcctctccaccctacccccgaaactccagccatacactcatcatttcacaaaatataaatgagttagcattaaacatttcagagtaaatgattccttttcccgaaatgcatgaagatagagtaacagtcttctcacactgtatttttagggtatggaaaatttagaaggttaaagaattactgcttcaatttttcagttaaaaaaaatcaggaagctctgttcattcaggctatgcaccatgtgcacagtcaagaattagcagaaaacctctgcatttacaaacactttgtgctataaaaagtaatttttaaaaagccacttgtgtgtgtgtgtatatatatatatatttaaagccaaggttttgatacttttttacaagaactgcaagagaaaacagatacctgtcctaaccatatacttttaaaatagcatttttttttccatacaagctgttgttaatttgggggtaaaatgctggtttgcaaacttcgtcaaattgttcccaagtggattttccttgtttgtcttcccccaccaaccctcaagttaccatattcgatgtaagaatcaggcatgttagaatgttgtgtcacactaaccagttctgctctttttgtcttttcattcaagttccattagcttctgtgcgcggtgccctttgcagtctggtgtctcttccagaggcaagggggctgaagatggcgtgctgcatctcactagctgtactaacataatcttggtaaactgaaaaccaaatgtgggcatttgtaaaatcagtgcactgtttctagagagagattaaattcattttttaaaaatatttaaaaaaaaaaaaaaaaaaaaaaaaaa

SEQ ID NO: 8175 - DNA, 763 bp, Macaca Fascicularis
  misc_feature (1)...(763): n = A,T,C or G
atgaaacagtaatgtnnnngtataacttannntnntcatagctcagaaaactatttttgtctccatcttttttacacacagtatattaaatgaaaaggtaaataaggtataaatagatttaaaaaataaaagttttaaaaaatgtacattttaagagattctgaacacccttgctgtcaatacctgactgcctctctgttaaatttaccctgttacattttggttcagtttatttccatgttgaattagagtggattaagttaattttattttgtcagtgttactgttttttaagacttttttaatgctttagactgtctgattcagtgaactttttgtagcgaaaaagccatgaagctagtagacaagacagatattctgtatactggaggggatacaggacgtttttgaaaaggtacaaagccctcagtgggcttagaaacttcattgtatgatccttgtattacgctacttggcttgcacgtcttcgggtgcatgtatataccgctactgtgtcctcgccatcacctaaatgtgactcagtctgttccactgtaatatgttgtgaatttccttgtactgtacttttattgttggtcttcttgcatcgatgatccaacagcaacatttttaaattattgtgaaaagattaactggcagtgtacagagtttactccaagttttcttaagggaaaacacgacaaaaaggcacgaggataccaaatggaaccacgtgctggtgcctctgagtctgtatgagacc

SEQ ID NO: 8176 - DNA, 1694 bp, Macaca Fascicularis
actttgctccagagccaggcagggccggccacaggaccagcctccgacggcgatttcatccgcagcctgcggggcaacgtggggcctatctgtagctttcagcctttcctggaccctaccaggacaagaagagaggggagaggtgcgaaggaggtctggagaggaggaggcttgggacaatgcagagtcctgatagtgagggtgaccgctgaccgctgtcaggagggacatggaccgctgccgaggaataatgggatttcccaccggcccagtcatctcctacgccgggaaaagggaagagctgctcccccatggtctgtgcaggtgggaggggtctcgggcagagaggagacactttttctgtcctccaggctgtttctgccaagtgaaggcctgggctggaagagccaggagcaaatgagagagttgggtgctgagcacccagcgggagaggatgcgtcccggtcatcacacacctgctgaccacacatctctgtgaggtccccccacatactccgcctgcagttgccatttgggaaaatgattcttgcctctttcaccgtctgttttgtaggttacgactcatttacgggcctaggccaggactcggctcttctagatccttatcgaaaagcaacatcacacttgtgcccaggggttcgagaccagcctgggcaacaggacaaacccacttctctacaaaaaatacaaaatctgtgcggaaggtatgtgaacccttgggaaacggagttgctgtacacgtgtatcaggccttgagccagctgcagagtgggcattactgcctggtgccctcctccctcactctgcctccctggatgttggggatggccctgtaaaccttgttcataggggtccctcgatttctgggacacctcatctgagcactgaggaggggacacagctgttggctgggaggcaggagactaagggttgccttcaagccatccccacacatgtgagctcatcagcattctgccctttcgtgggtgtcagttgtctcgtccataaaatgggatgatgttcttgttccagccagcatactggatgactaaatgaaggaagaggtgagaagctgcattggaaaaagaaaccattcagctgcaagacatcctggtgcagttcctccaggcctaatggggtttggttgcccacctgggctgtgtctcttcgtggcgccagcaggtggcagcattgcttttgcatgtgccggctccacctccggcctctcccagacatgcagcgtgtagggcaggggaccattcttcacccaattcaattcaggggtcaggagaaggagggatctgaaatgccctgaatgggaagggcctggaaagagaatgaaaacctcattcctcccctcaaaaaaacaaaacacacaggtaagccaggagggcaggacctggagcgtgagcccaagagggctaatgtgaccactcaggctcaagggggaccttacctctctctgccacagctgtgttccccaccacctggaggagggaactggggatccagaaggcttggacccttgtctttggttggaaaagtcagccggcattgcagtgggacagcaggaactcctctatttttgtgtgtgcaacagggttgaaaacttaattcactctgtaatttatttgtgcagaaaaaaggtaatttccttaaaaaaaaaaaaaaaa

SEQ ID NO: 8177 - DNA, 677 bp, Macaca Fascicularis
  misc_feature (1)...(677): n = A,T,C or G
tgtgcagccagtgattgggatcagccagcgggtgcggatgaactccaaggagaaaaaggacctgggaactctgggctacgtgctgggcattaccatgatggtgatcatcattgccatcggagctggcatcatcttgggctactcctacaagagggggaaggatttgaaagaacagcatgatcagaaaatgtgtgagagggagatgcagcgaatcactctgcccttgtctgccttcaccaaccctacctgtgagattgtggatgagaagactgtcgtggtccacaccagccagactccagttgaccctcaggagggcagcactcctcttatgggccaggccgggactcctggggcctgagtcccctcagtgggcaggagcccatgcagacactggtgcaggacagcccaccctcctacagctgggaggatctaccactttgtgttctggttaaaaccctaccattccccctccttttttggtgaatcctaataagtgacagaagcagatggcactgtgggctgagggtaaggctgggcagggtcctaacagtgctccttctccatcccttggagcagattttgtctgtggatggagacactggcagctcccacagtgatgctgctgctaagggcttccaaacattgcctgcacccctggagctgaaccanggatagat

SEQ ID NO: 8178 - DNA, 1276 bp, Macaca Fascicularis
agaaacattctgctataaggaccaggggtactggtagcttattaatggctgtgctatcatcttaagcagaacacagagaagcagctattgctgatttagttattagacattagcacaaagggttaggagcttctaggacattattcattgacaataatccatagcctgctatgaacaatgctgcatgctgtgcaaatatagcaagagtgccttcataaataatgccagaaacgctagcagtgccaaggcagatagaatatatcgatggcaagttaatgtgttaggcccctgggtttgcttaattatataggctgatttaccataagcaaatgaagaaaattgccttagctaaatgcagatttgggagtccataatcctgtctctcttccctacccccaggcttaagatagatccttctaataatgatgcaattttcttggctccccctgaattctatattcttacaagatacagtgctgttgttctcattttggtgatgagaatagaatgtgttttctcttcttgtaattatcttctaccagcaaccaaaatggattttgagcttgtccaaagatgtcaacatctgcttattttcaggctgtttgtctgcacaggagatagtagtctaaatccatttctcaatttatacaaaattgcatcacccacacattcaggccacatccctgagatgggaaaatgagagataagtttgcttatagggaatttctctctagaatgtgatcatgtagcacatgtttgaaagataagagagggagttttcatggggttgcgtaagatgaaggtgaattgttctcagaatcataccaaatgacaaggtagtagtcaggataatgggcccctacagatgttcacatcctaatccctggaacctgtgaatatattatgttacattgcaaatgacattttgcagatgttattaaattcagtatcatgagatggagaggttatcctggattatctggatgagcccagtgtaattatgaggatccttataaaaagaagagggaggcaggccagttagtgttagactgatggagcataagactcaactggccattgctgagtttgaagattggtgtgaggctacaacacaaggaatgcaggcagcctatagaagctaaaaaaggcaatgtatcctggctgacactttgattttagctgagtgagactcatgtcagacttctgaccatcggaactgtcagataataaatgtgtattgttttaagccaaaaaaaaaaaaaaaaaaaaaaaaaaa

SEQ ID NO: 8179 - DNA, 943 bp, Macaca Fascicularis
tcctttaaaagaattaccctttatgactaccaagccatgtgtagagccaacaaggaaagcagcgatggcgcccatggcctcctggatccttataatgccttcctctctgcagtaaaatggatcatgacagaacttgtcttgttcctggtggagtttaacctctgcagttggtggcactccgatatgacagctaaagcccagaaattgaaacagaccctggagccttgtgatactgaatatccggcatttgtctccgagcgcaccatcaaggagactacagggaatattgcttgtgaagactgctccaagtcctttgtcatccagcaaatcccaagcagcaacctgttcatggtggtggtggacagcagctgcctctgtgaatctgtggcccccatcaccatggcgcccattgaaatcaggtataatgaatcccttaagtgtgaacgtctaaaggcccagaagatcagaaggcgcccggaatcttgtcatggcttccatcctgaggagaatgcaagggagtgtgggggtgcgccgagtctcgggcccagacagtccttcttctgctccctctgcttttgatgctcttctcaaggtgacactgactgagatgttctcttggcatgctaaatcatggataaactgtgaaccaaaatatggtgcaacatacgagacatgaatatagtccaaccatcagcatctcctcatgattttaaactgtgcgtgatataaactcttaagatatgttgacaaaaagttatctttttactttgccagtcatgcaaatgtgagtttgccacatgataatcacccttcatcagaaatgggactgcaagtgataggcagtgtcccttctgcttgaaacctattgaaaccaatttaaaactgtgtactttttaaataaagtatatgaaaatcataaaaaaaaaaaaaaaaaaaggccaca

SEQ ID NO: 8180 - DNA, 3256 bp, Macaca Fascicularis
taccaacaactggttttcaaaagctatagactttttgatgacatggctttgtcttataactctaagttctatgttgtaattctcctattggcactggctctaaaatcaacacagcatctttcttcaccatgggcaggtccagtaccagagtgtccacctgattttataacccaagcaacagttcttattgttccacagcttggacttgctgcagaattgtttccctatctgggtccaattcaaactggcagaactccatgtcaccaagtagatgggttggagttctgcactatatgccaccttctgaactagggtgtgcttaccaagcatcaggcttcatggtggtgggaggagtgcaatgcaataaggtgttttggtttttgtgtggtttttttttgttttttttttttttttgagaggttgtcccagcagacctcatcccgatgaatccaaaagtacttaacttgtgtggcaggccctgaacctcggtagggcttatctctcacctctacagatatgttttccaaggtttttatatactcatcatgtattgctcaactgttgttaacttgcatgatagcagtaattgagtgaaataatgtgttttctgcagaatacccagaaggcccaggtcattttaaaccacattacaacataagccaggagagtaaaatagctcatagtgcatattaatttggaatcagagttcagcaatcattgaaaggtttgtatattccctttctaccatacataattatatgactaaaagacaatagatcccttgggaacatggaagaattaatagtgaatttactatgatgctgcaaggtcttttctcatagaggttcagcctttcctttagtaagtggattctgagtctgagaacttatttaaagctgtacgtgggctcaggacttctgattttcattgtataaattatggataaatgaattgtcttctggatcctctcataaaacaatcagctcagctcatgagtgttctagccttgcatgggatatcaccctggaatgcccagttttaagcatgtcctttccacctggcttttctattttacatagcatgagccattgcttttgccacactttgaagggtcattccagcagcatattagtaacatcatcaggggtccttgtcagagtattaaatcttgcatcacagaagtatgcctctttttatgcactctcccttatttatattaatattctgcttcacttcatcaacacctccgaatttcttcccatatatgctctcccagcttttgctagcacttaatagacatattctgaaccttcttcagtgtataatattccttttctcttagaatatctcccatctcctcatctatacattcctgagatttgatccctattattgatctggttgcctgcaagggagataaggtagatccagagcggtgtgagcataaccttgaaaggtacctgccaaatctgagtactttccatgatcttcaagtaagacgtcaaggtcaggactagggtgagaacagcgaggtgcctagagaagcttggcaccctaatggcccctgtacttgcacaaccttgagagagagtgcctccttaatgttgttcactgatcaccttacttacttccccctagtcccagctgtgcaagaaaagaagcaccgtcatttaccggggtgtatgtatcacttctgcaagcctagttggttcaatggaatctaggagaacaaggctctcagctgcatctacccaaatgtctccttctcaagctccatggtcccactgcctccctgttagactcccagatttggtgtaagaaaaatgccagagctgagagctcaacctgccctgaagctctgctattttattattaaatcttgagacaagttctccattttgtatgccctccagctgcaagaaattaaggtttccttaaatactacccaaaagactctctgctttcagttgctcttgaaatgttgatttatcacccacaccctgtcatcttctctcttcaacgaatcagtggtagtcagtaagagttatccaactccattgactctaagttcaatttctcttatatttaccgaataccagagatattgtgccaacaaatgaatttcttttcacttgcatcccatgaaaatttaccaccaaagaacagtttaacaattttactgttagaatatgtcaggcactatccaagtcccactgactatcaaagatgagtccttagtgtcatccaagggctaatatagctctaaagatctattctctaggtccgttttgtactacttttggtcgagttccccagaaacagaaactaagaagaatttcatgcagggggtagtcaagagtgctcttagaagcgtcatttaaggaaacaagggactcagagtaagcaaaaggaaattgttaagatacaacaatcctaacagatcacctaggttgacccggaagtgatataatctcaccttacagctgaaagtaattcctagtgaggaacagcattatgaaccactccaaactcatattcccagcagcaccctgaaggttaactgtgtgagtcctaaagtggaggtggtctgagcagaccacctcaatttctatttccgggaatatttcattatacaaaataagattacattttgaataattttgtacttcttctgggagaaaaaaagtttatatttagaggtaattactgaaaaattcgataaactttgaggcaaatagatgggcaataggtaaacatttttcaagtgtcaaaagattcaacttttgatatcacaagacgagtatcagcacaagggtcggggggttgtgcttggtgaaccctcaagcaggtttcggatttgaacatgtttcaagtgatcatatcaaactgttctaagcaactagaaagtgcataaaatgtgaagcaacctctcaactgtggtatccctccaacatgacaaacctgtagataagacagttagacagatagctctctaatttctagttttgatacaacaatttttttcagtctaccagataattcatactaagtgtataaggttacagtttgtccatccaggattatgcttctgtgagaataaaggtcatagtattgaataaagttgaagcatcctgtcctgagttttccacctagaaatccaaggattactactatcaatatgccagactgaaaaacatagatcagagtcaatgaaaatgatatgttgttttggatgaaaaaaaaaaaaaaaaaaaaa

SEQ ID NO: 8181 - DNA, 779 bp, Macaca Fascicularis
  misc_feature (1)...(779): n = A,T,C or G
agtaatccagtacatgatccataaagctataaagttaataattctcannnnctccaaatgattactttcaatatgatctttggnnnnnnnnnnnnnntagtgaannttcttgagggtgataagtcacatcattgcgatctacatcacctcctcgnnnnnnnnnnnnnnnnnnnnnnnnnnnngataatcatgggtgtttttaagaacaaatccaatttttatcaagtgctctttcctctacaaaaaaagggaggaggagaagcagcttccttaaaacaatgattattttgattcaattttaagtttctacaaaaggtaatgttaaagtgtatgtatgccttcagcattaccttgaaggctagaaaaacggcataaatcttcagaaaagtgtcacagtacatgttcaaatttaaacttaaatcctggttcatctttggcttttgttgtgcatttttaatgcttctttgtttttggtacacggaatgcagttgaacttgatcttttaaaattgagacatgtaagctaatcagcaaaagacaaaaacaaaactgcacatctgtaataatcagatagcaattctgctgcacaattcattgattgtaaggtatcctgtaacaagcaatgtttgtctcctattttttgatacctcttaaacttatgtctttcagaaagacagtgcctctgtatgctttttgtatttttactgagtgtaaatatttgttatatttttggttaagagaatgtaaaaataccatttattattatcagatactactaat

SEQ ID NO: 8182 - DNA, 930 bp, Macaca Fascicularis
atggatggaggcaaccagagtaaaggttcagagttccttctcctggggatgtcagagagtcctgagcagcagcggatcctgttttggatgttcctgtccatgtacctggtcacggtggtgggaaatgcgctcatcatcctggccatcagctctgattctcgcctgcacacccccatgtacttcttcctggtcaacctctccttcactgacctcttctttgtcaccaacacaatccccaagatgctggtgaacctccagtcccagaacaaagccatctcctatgcagggtgtctgacacagctctacttcctggtctccttggtggccctggacaacctcatcctggccatggcatatgaccgctatgtggccatctgccaccccctccactatgtcacagccatgagtcctggactctgtgtcttgctcctctgcttgtgttgtctgttctctatggcctcctcctcaccctcctcatgaccacggtgaccttctgtgggtcccgaaagatccactacctcttctgtgagatgtacgtcctgctgcggctggcatgttccaacacccacatcattcacacagtgctggttgctactggctgctttcttcctcacccccttagggttcacgaccacatcctatgtacgtattgtcagaaccatccttcagataccctcagtccctaagaaatacaaaaccttctctacctgtgcctcacatttgggtgtggtctccctcttttatggaacacttgttatggtatatctgcagccccttcacacctactccatgaaggactcagtagccacagtgatgtatgcggtggtgacacccatgatgaaccccttcatctacagcctgaggaacaaggacatgcatggggctctgggaagacttctccaaggaaaagccttctggaagttgacatga

SEQ ID NO: 8183 - DNA, 743 bp, Macaca Fascicularis
  misc_feature (1)...(743): n = A,T,C or G
gccacctggccatgggacccagagccggccaccactgcnnnctgaacgcaggttctccatttctataacgggcagtgaggatcagaagaagcaatgggtgtcttgcggagctccccagaaggatgtggggttgatacctctgctaagtactgagcaggtctggggtctcctgtacccaggaccctgtgtggaaggcacctgagaggctgagggagctccaggcaggctgcggaagtccccttctccacccctctctggtcaccgaagctcaaagtgggggggcgtgaggacaggccgttaccccctcgccaaggcacccaggctgccaagacacagacaggcagcattgctccggccggcacttannnnnnnnnnnnnnngtcccctggtccaannnnnnnnnnnnnnnnnnnnnnnnnnnggtgggggaaggatggactccacagtggggtccgctcctcattgcctgctctctcagggctccagaaggaggaagaggctgggcacannnnnnnnnnnnnnnnnnnnnnnnnnnnnnnnnnnnnnnnnnnnnnnnnnnnnnnnnnnnnnnnnnnnnnnnnnnnnnnnnnnnnnnnnnnnnnnnnnnnnnnnnnnnnnnnnnnnnnnnnnnnnnnnnnnnnnnnnnnnnntgctcctgtaaacccagctacttgggaggctgaggcaggagaatcgcttgaaccctggaggcagaggttgcagtgggctgagatcgtgccact

SEQ ID NO: 8184 - DNA, 658 bp, Macaca Fascicularis
  misc_feature (1)...(658): n = A,T,C or G
taataaatttatctgannntaaattgttttatgctgtgatcagtaagtccagtaaaccaggtaaagttgtatggatataactataggacacctttattttnnnnnnnnnnnnnnnngagcaattgaagaacttgctttataatctagcatttatttttaaatctcaagtatcctactggagttaaattacttgcacttttctgtgaattactctttttttctaaacatgtaatgaaataaaaaggaaaattgaccaagttattcttgaaacatatttttttagcattatttcaatttaaaaatcaaagtgaagaagagataaaagtgagaatacaatataacatacaaatatataagacataaatatggtagccaactttaatgtctccttccatttattattagctatttaaatgaaatagctttgaggccaggcgtgnnnnnnnnnnnnnnnnnnnnnnnnnnnnnnnnnnnnnnnnnnnnnnnnnnnnnnnnnnnnnnnnnnnnnnnnnnnnnnnnnnnnnnnnnnnnnnnnnnnnnnnnnnnnnnnnnnnnnnnnnnnnnnnnnnnnnnnnnnnnnnnnnnnnncagctagaggagtggttgaagcaggagaattccttgagcccaggaggtggaggttgtggtgagctgcacc

SEQ ID NO: 8185 - DNA, 1067 bp, Macaca Fascicularis
gggaccccgcgcacaggagctgccttggcgacatgggtcacccgctgctgctgccactgctgctgctgctccacacctgcgtcccagcctcttggggcctgcggtgcatgcagtgtaagagcaacggggattgccgggtggaagagtgcgccctaggacaggacctctgcaggaccacgatcgtgcgcatgtgggaagaaggggaagagctggagctggtggagaaaagctgtacccactcagagaagaccaacaggaccatgagctatcggactggcttgaagatcaccagccttaccgaggttgtgtgtgggttagacttgtgcaaccagggcaactctggccgggctgtcaccttttcccgaagccgttaccttgaatgcatttcctgtggctcatcagacatgagctgtgagaggggccggcaccagagcctgcaatgccgcagccctgaagaacagtgcctggacgtggtgacccactggatccaggagggtgaagaagggcgtccaaaggatgaccgccacctccgaggctgtggctaccttcccagctgcccaggctccagtggtttccacaacaacgacaccttccacttcctgaagtgttgcaacaccaccaaatgcaacgagggcccaatcctggagcttgaaaatctgccacagaatggccaccagtgttacagctgcaaggggaacagcacccatggatgctcctctgaagagactttcctcattgactgccgaggccccatgaatcaatgtctggtagccaccggcacttacgaaccgaaaaaccaaagctatatggtaagaggctgtgtaactgcctcaatgtgccaacgtgcccacctgggtgacgccttcagcatgcaccacatcaatgtctcctgctgtactgaaagtggctgtaaccacccagacctggatatccagtaccgcaagggggctgctccccagcctggccctgcccatctcagcctcaccatcactctgttaatgactgccagactgtggggaggcactctcctctggacctaaacctgaaatccccctctctgccctggc

SEQ ID NO: 8186 - DNA, 732 bp, Macaca Fascicularis
  misc_feature (1)...(732): n = A,T,C or G
acgttcaaaaataaaaacgagaaatcagggtagaaggactgtgagataccatgatggggatgatgatagaagcttagaaaatgtgttagatttcaatggttgcaccttatgaccttgnnnnnnnnnnnnnnnnnnnnnnnnnnnnnnnnnnnnnnnnnnnnntgaaagctggctgttaaaattatttttttgtcttacaattcagggaatatatttatatttttctatgaaaagttatgaatgtgannnnnnnnnnnntgttatttttatttgcacttgctggnnnnnnnnnnnnnnnnnnnnnnnnnnnnnnnnnnnnnnttcattttgggggcagatctattttgacagtatttgactacatatagcaagagtttgaaatatgttaaacactagacatcctggttatcaaaaccaatgagcattactttcatggcagcnnnnnnnnnnnnnnnnnnnnnnnnnnnnnnnnnnnagnnnnnnnnntctaacccctgttcttagtagttataacaatttcacaatatgtttacagattcttcataaatacatgcatactgacactataatcatgggaggtataaccatgattagtaggcaaggtacctaccacttttttttctttgcctggctactnnnnnnnnnnnnnnnnnnnnnnnnnnnnnnnnnnnnnttgaaatggtttctaattttctttccaagtgctgttgggtttttttctttttaaggaaa

SEQ ID NO: 8187 - DNA, 161 bp, Macaca Fascicularis
gcatacaatggaacaacagaattttctttcctgtaaagtacagtaatgccaagttgtgcttttgagtattgaggataggtagtacagcaaagacaatgctgtaaaatcaaagaaaattgttagaaaactgtatgcatcataatctttcaaaccagcaaata

SEQ ID NO: 8188 - DNA, 2019 bp, Macaca Fascicularis
tatctggataagtggtgggaagacattgagggggtacatttccctgcctcatctcccctgtctattattccatgcaagctatcgcaagattagtcttcagagattggctccagagtccaaatggcaaaagagtaatgcacctttaaaatatgtagtttctggttctatagatactcctcagcattttttttgaaacagtataaatatcattgttgcattctcttgggttaggactaaagactttaataaaagcagtgccttcattagcttgtagttagtgtgttcatgcggtacagcttttagtaaaaatatacgtgatgaactgcatggatggtgtattatttttggttcaaaaacatgggaagttggggtaggggagtcatttctggatgatgatcagtgaaactactttcaggtgccttaagggagcctttttgtggggctccatggccagggttttggggcagctctgcttttgttttaggggcttctgcataatgatgagtttgcaaaaagcatttaacaacttaaaagcatttgaaaaccattgaaaaatatttctgttttaatttacctacctcgacattcatctcctgttttcttgaaaacatcaaccaaaaaaaggatgggaggtaattttatgtccacaattccctgggatattttgctgtcatccctaatgtcagaatgaggacaaagggaaaataaggatacaaaatagaaccaaagacaggaaaaggttagcatatcattttctggcagccagtattggtagtatcttagcactagccctcatcttgagctgtaaatgctgggcaaattgctatgactttattaaaaggaatcctgtactaaattatatttgtgtgacccaacagtgttccacagtgagcacttgttagccacattcaacatccttttgggttagttgttggtatttaatagggacattattttcttgtcaggtaatctagatttagtggttgtgattatgattcaggtgtgtctcctggacagacctgcttctctctccatgtttgggttttcagtggcttagtgttctggcaaataactgtattcctgtatatgcaggtggtgctgcagctgcttattagaagctgtgtgattccagcagccacttgcctgggcagaaagccccactgccctccaagttatatctcttgccttggtatctaggctgattataccccttgttgatcctcatagtcttgtggtaattacctcctcctccaacctccctgatcacccctacctataattaaagagaagaatggaagagggagcatgtagctgacaagctgacaagtgtgttgctgctgcaaggggggctgtgcaccaaacagattagatcataagtagagttgccacgttttccaaaatgtattctccaagtagccttttcagtgtagcccatttgtagcatcacaggagctgtctgacaaacaaatacccatgaccagtatcagaagaagtcagaactgttctgggattatgtatttaagactttgcaaatcctcttttttgaaatacatcttccgccaagaaatctttatggatggcagtggctgcttgtcgatctcctacacaacattgtgttttggtttgtttttgttttttaatcctttgaacacacattttaaacttaattgttctcctttgtggaaaaaatgcatacctaaattcaccaatttggacagtgcctatgttgatcctgtgtgaagggaaggaaccaaggaaggaattcagtttactgatgtgtacttttttggctttcagaacacaattgaaatttaatagtctgtaccatttcataagttttactttcaagtgttttaaaagtcatatgcattttatacctttcaacagaggagtttaaatgtaaactgagtaattagcagctaattatacaatgcagatacagaaggcagtttgttatcacaatatggtagatgagaggggcagcttccaccttatttttgtagtctttaaggcaaaaag

SEQ ID NO: 8189 - DNA, 466 bp, Macaca Fascicularis
tcagatgagactcaatgagttgaggagaaaagtgctaacttgttggcttctactctaaccccatattcggcggcagtggggggtcagggcagtatcttaaagtatccacattgtcttaaatggaaatcatgggactctggaaagtcggcatgaggtggttggagcttttaaacagaagtgctttataggtatcagatctcttgcgtcatcaattgttaggaatcatggtgttgttaggactaccgttgtgttccgcagtcttccccattcccctcatgttactccctggtttatcttttatccaatctgtatggactttttaggatttttttttagtacaaataattttcagatcccagctttggtaaatgtgttaactctactctgtgaataaataaatgagtgatctgctgaacaatggcaattgtagaattacgttgtatgtaatgtacatatggagaaagaa

SEQ ID NO: 8190 - DNA, 582 bp, Macaca Fascicularis
  misc_feature (1)...(582): n = A,T,C or G
aaggaccagatcgtcaagagcttgattgcnnnacgaaggagtctggaccttgtgtaagtgcacaggagaccgctggaaggtcctcactggcgtgccatggcccgacnnnnnnnnnnnnnntttttctctggccacccgtctaaggaaaggtgtctgggtgggtggtgcaggtgagaacaatggtgctgtggtgggtggcggagaaggnnnnnnnnnnnnnnnnnnnnnnnnnnnnnnnnnnnnnnnnnnnnnnncaggaggtggaagtgagaaggaaggaggtacaaggccgactcctgggtctctagcccggtaggtgcagggccgttcatggagacggggcttctggaggagcagcgggtctggggagaggatagtgagctccgatttgcatgggacatcgaaagggcattgaacggtgggcagtcggagccatgggtctggagcttgggacttcggcctagcttgcagaaggtaaccacagatatagaaatggaacctgtgtcnnnnnnnnnnnnnnnnnnnnnnnnnnnnnnnnnnnnnnnnnnnnnnnnnngggcagatgacgaggtcaggagatag

SEQ ID NO: 8191 - DNA, 798 bp, Macaca Fascicularis
  misc_feature (1)...(798): n = A,T,C or G
ttgagtgatatatattgacaggtcactcatggtcatttaaaaactgaattcnntntatcttgtttctctgcttaactctgggtatcttccttaacnnnnnnnnnnnngcagagttgcggtcatagccgtattctagctagcaggaaggaggagagagcctagtggaatacatgcccaaagtctagagctcagatttgaaagtagtagattattctccattcatattctactgataggagcaaaatcaattggctatnnnnnnnnnnnnnnnnngctcagaaataaactctctaggtgactagtcatattccacctactctatagtagaagaagaggagaacaaattttggtaaaatactgcattttctgctacagttcaaccctctggccttccaaatatctccaaagcccctacttcccacatactcccaaagaagaggatgtataaaccaactcatttacttcgtctagctcaaagtctaggatttctgggtggtatataccattttctctttttggttttaagtggttcttcatggtcnnnnnnnnnnnnnnnnnnnnnntttattatgctttacatttttaaattctcatttataattggacctaaagggtcgctaattttacagtttctgaattaatgtattcaagttcagtttatctttttcttaaagctgattatacattttatataaagannnnnnnnnnnnnnnnnnaaaagtgaaaatttacttgattttcttatgtttggtttaattctgttatttcaccaaaaaaaaaaaaaaaaaaaaaaaaagg

SEQ ID NO: 8192 - DNA, 697 bp, Macaca Fascicularis
  misc_feature (1)...(697): n = A,T,C or G
cagcagcagagggcccagctgccnnncagcagcactaaatgaggggccctcgccacgtctactgcatcgtccgttgactctcgttagaccatctgaggaactagggctacagtgctgccagctgactgatgactgtttttcagaattttgtcaggaaacagaattaccactcaccttaattttgtagcttgtttccaagtttgtgatgtccattgccgagactaaggcnnnnnnnnnnnnnnnnnnnnnnnnnnnnnnnnnnacctcattgcctgcttgtgtctgtgcatgttggtgcggtggggacaggattgtatgagcactgtcatcacagctgtatggacatgatattttagaaacatgctttaggtggtgagattggcatatcatgacttattaactcttttgaaagacatgcagggtagttctcatgatttctatatactttcaactcaaatcattatgaaaagaaagttacaattacatctaaactgaacctgatgagaaaatattacattcaagttgcacagcataatttattaatgaaaggtttttactaacttttcaagatgtgtagtcctataattgttagattaatttagataaatctaagtatgacattgaattttaaaaaggaattattaaaatatagaccattttgatttttcccctataatagtaaataatatttgagcct

SEQ ID NO: 8193 - DNA, 783 bp, Macaca Fascicularis
  misc_feature (1)...(783): n = A,T,C or G
cccctccagcagtgccagggtgtcntcgtggctcaggccaccaccgnnnccctggccaggagccccttgccgcagcnnnnnnnnnnnnnnnnnnnnggnnnnnnnnnnnnnnnnnnnnnnnnnnnnagcagcaagagcttccagacgccgctccagcgagtgtactcgggacataacacgctnnnnnnnnnnnnnnnnnnnnnnnnnagccactgagtgagggacccttggatgacagtgcttcccaaagaccaccctgacacagccaacacaggaagaaagggaaaagattccannnnnnnnnnnnnnnnnnnnnnnnnnnngccagctggagctcataggcaggggctgccgacctctgagctgggggtnnnnnnnnnnnnnnnnnnnnnnnnnnnnnnnncagaggagggtccctgaggacacagtacagaagtctgatcccagaggaggaaggaaggtgggctggggagaaggtctgagtgcagnnnnnnnnnnnnnnnnnnnnnnnnnnnnnnnnnnnnnnnnnnnnnnnnnnnnnnnnnnnnnnnnnnnnnnnncactccttccccgcctcctgcaggggcaggggagccagggctgtgagttcagcctgtggactctcaatggctttcactcttttcctaggcaactatgggtaagagacagaataattggaaaatatgttctttttcctctttagcaggatgccccacagagaaaattgaatgtcatttggactgagggtggcatttgatagtgtgtcatgaatttgagaacgtt

SEQ ID NO: 8194 - DNA, 480 bp, Macaca Fascicularis
ggccttgggtggctggagggctttgttaagggactaggagaagtgggggtatctttcccctttcctgccctttctgctcatctcaacctctcacagaggtgtcttctccccctaacccacagctttttgtatgagccattttgtataaattatttatatttaatattattccctgctttgtcaggagcaggtactaggctctggggcagtgaggaactggactcttctctcctcagcctagggtggaggtcactgcactgccacccacctctggaagactggccatgaaaagtcaggtggcagaaacctgaggccacatagagcctctctcttttcctgtatcttggctctagaagatcagcactgcactgttagctgagagtgagggcaagacataaactgtccagagtttgaaggtctcaggaagaccagagagcttctccccacagaaggtggagagagctgggactcagacatggt

SEQ ID NO: 8195 - DNA, 755 bp, Macaca Fascicularis
  misc_feature (1)...(755): n = A,T,C or G
annnnnnnnnnnnnnnnnattttgattcaaatgatgaatctgtggacnnnnnatannnnncatctccctatctatatttttgtctctaagagatcaagtaagatacgtgttgttcatattcataacaacttattagagctacataggaacatagaggttatctgtgatcaaaggacttttgtcattggcactttcagtctttcctattctagccgttgtttttgtttgtattttttattaatgacatatttagtcttcagatatattattttaaaggcaccacacatgtaaaacagttattacaaatattttatgcataaatctcttggtagattttcagaatagtaagatttttatcaagaaaaagaatctagactttgttgcgttgtaggagcaaacaaggcttctattctttttaaaatgacttgaaattttgttataaatttccatagtttctatcaaggtcagttggtagttttattacctttgctatggattcgaacttaactgtataaaatcgagttggaagccatgtaagaaaataacatctgaaagttcttgaacttgactgactctccagtttctttttttaaaaataattccttttgcagattgacactctcacctgacagatgacacaattcttcaacttctacaatcttaaaattttttaattttgtatttgtaaatacagtacacatcttatttcttcagaatttcttggatnnttgagagactttgttaattttggggga

SEQ ID NO: 8196 - DNA, 651 bp, Macaca Fascicularis
acgtttcaacaaaaataaaacctgctctttcccatcctatagcggtcggtccggcccgggactcggacttgggcgaccaggaggctgcaggctgacacactcgaacccggtgacttagagattaaaattaatttggttgctgatggttctgaacaaatagagttcttttatttgaggtatgccattttgaagactgagacgttggagttttatccttgaggataaaagaaatctttgggaaagtcagtattttatatagcaaaaataatgaacctcgaagtgaatcctctaaaggccccatacaatgaagtagacattggtggaagcatttacacccagtcagcttgaagagtttcaaatggaccctaccactgagaaatcaagatggcagtctactatggggaattgagaaaaatggattaatacaagagtcctgtgataatacacaaccaagacagggttcttttaacatggattccatgcagtgaatgaagacataggtttcttatccaacacaaatggacagtggatttgactttctaaagacttttttttgtggacattttgacatttggagaaggaggatggcacactaacacagataatagtttttatgcctggaattttttgtagtttgatttgtatgagtat

SEQ ID NO: 8197 - DNA, 727 bp, Macaca Fascicularis
  misc_feature (1)...(727): n = A,T,C or G
gtctgnnnnnnagatccagctgnnnngctggctcgcnnnccgatggannnnnnnnnnnnnnnnnnnnnnnnnnnnnggaagacggtccctgccgctgccctnnnnnnnnnnnnnnnnnnnnnnnnnnnnnnnnnnnnnnnnnnnnnnnnnnnnnnnnnnnnnnnnnngaccagactagtgcctctgccctaggcaggtctttcttggtctaatgnnnnnnnnnnnnnnnnnnnctgagcactttacgtgcattattattttactgaaaagaactgtcaagtgaaatactttttatcacagtnnnnnnnnnnnnnnnnnnnagagaagagttcatgannnnnnnnnnnnncttgtcccnnnnnnnnnnnnnnnnnnnnnnnnnnnnnctccgaaccccagcnnnnnnnnnnggactggatgttgagcacaaggggccttcnnnnnnnnnnnnnnnnnnnnnnnnnnnnnnnnnnnnnnnnnncctttcttatgggcctctgtgggtgcgtgtgattatatacgtttcaccgatgaaacacagaggagtgactgataaatgattcttctgcgggttcgggcagggcctggattctgttttaactccagtannnnnnnnnnnntgtagcttcctctaattttggcaataggtgtgggtcgttgtgcttgcttttggcaagtttctgagcgacgtaggtcctccattaccctcnnnnnnnnnnnnnnnntc

SEQ ID NO: 8198 - DNA, 684 bp, Macaca Fascicularis
caaacaaacatgtctgccagcggcattcggtcccaaaggcaatagtgtggaacctcttatttagagccaacaggatcagattcttgattgtgacttggtgagtatacacacaaaatacactgagaactgaggtcggggggaaagaaactcaccttattcagagttactcttgttctgaatgatataggcatgtatatttgttagccacataattctaaacttgaacacagaatctttgtgagagagattcagaagaagagtaccatagcatggtatgaagacttacctgtttcctgtcactactgcatctgacctgagtttatattgctgctaccgctgtgtaaaaacagtacatgcagtatactgtactcatagccatttcataacataggacctagactctcatttgtaaatgttctaaccctagtttataatgggggaaattattcagatatcatttttaaattaattcctacaaatacaatcgttttgaaattgggtttgctaaatacatatacatcttttccttctttgtgtatggatagaccatggtttgcatatctatcgacactataaatatatataaatccttagcagaattgttcttttttaaaggtctattattggattcacaatgcactttgagcttgattgtttagatatataattcagagcagaagttgg

SEQ ID NO: 8199 - DNA, 739 bp, Macaca Fascicularis
  misc_feature (1)...(739): n = A,T,C or G
gaaagaagagttgggacttagnnnnnnnnnnnnnnnnnnnnnnnnnnnnnnnnnnntggtggagctgnnnnnnnnnnnnnnnnnnnnnnnnnnntttgcttcttaannnnnnnnnnnnnnncagaaaggcatggtcaagccagccccctcagaccagacctgcctgcatacttgtttcannnnnnnnnnnnnnnnnnnnnnnnatgnnnnnnnnnnnnttttgaaattaagatgactcagaaacatccatccagcttctcnnnnnnnnnnnnnnncacctggccactgtggactgcnnnnnnnnnnnnnnncaactggcaagaggtaggccccttgaagtnnnnnnnnnnnnnnnnnnnnacnnnnnnnnnnnnnnnnnnnnnnnnnnnnnnnnnnnnnnnnnnnnnnnnnnnnnnnnnnnnnnnnnnnnnnnnnnnnnnnnnnnnnnnnnnnnnnnnnnnnnnnnnnnnnnnncctgggacacccagctcaggcccaaatcacacggacttgaacctggcaaactgtttagggagggttgaggaaaagcnnnnnnnnnnnnnnnnnnnnnnnnnnnnnnnnnnnnnnnnnnnnnnnnnngtcctggcatcannnnnnnnnnnncctgctgtgggtgccagtggcccagacggagggaccccannnnnnnnnnnnnnnnnnnnnnnnnnnnnnnnnnnnnnnnnnnnatctcttcactcacatgacggtttttttttca

SEQ ID NO: 8200 - DNA, 729 bp, Macaca Fascicularis
  misc_feature (1)...(729): n = A,T,C or G
ccacctttcctgnnncacctcccnnnnnntctcacttttgctgtcctgggattgtaccttcctccaataaagtgttagtatatgtgctttnnnnnnnnnnnnnnnnnnnnnnnnnnnnnnnnnnnnntcccctttcctactcttattctgcactaatgccccacaggaaaaccttctaatgtttctaataggtatttccttgtttgtatatatatttgcaaaatattttttgttgtatgtgttgtatgtaaaatgtacgtaggggttattgtgttatacactttatttctcattctctttctttttcaaccatcccagtgtttttaagatccatacgtgttgctctgtgtgaacatttggtccaggtgctgcctggtacttcatnnnnnnnnnnnnnnnnnnnnnnnctatccactccccagtgataaacatcaacattgtttctaaatctaccacctcaaacaatgctattcagcttaaacattatttgaaactctcagccatgcactgcggctcacgcctgtgatcccagcgctttgggaggccgaggcgggtggatagcttgaggtcgggagttcgggaccagtctggctagcgtggtgaagacctgtctctactaaaaatacaaaaatnnnnnnnnnnnnnnnncacacacgtgtaatcccagctacttgggaggctgaggcaagagaatctcttgaacccgggagatggaggctacagtgagct

SEQ ID NO: 8201 - DNA, 723 bp, Macaca Fascicularis
  misc_feature (1)...(723): n = A,T,C or G
aaacatgtttatgagttcataatgatgctcaaaaattggtcatatttagaagataattgggaattgttaaatggaagactggtaaataaattcttttttcctgacattcctatgtgaactgtatacctgaatgactacatagtacatgatgtgaagctcctctttatagaaataatccagctgctaaatgacaaaggaatgatagagtgtcccttttctacaacctctaatgttgtggtgtgatcatagctgactgcagcctcannnnnnnnnnnnnnnnnnnnnnnnnnnnnnnnnnnnnnnnnnnnnnnnnnnnnnnnnnnnnnnnnnnnnnntgtgcccagcatttgtacttaattttttaaaactctaaaagaaattacatttatgagaaaattgataatttgagcaatgactcaatgtttgatgatgttaaggaaatgttgttaatattttagatgtgttaataatatgttttttttaaaagtctttatttttattgatgaaattatatgttctgggattttgcttcaaaatactatgcaatggggttggggatagagaggaaacagaattggccctgagttgataattattggagttgggggatggatacatggaagttcatcactattctttctactattgtgtagtttagaattaccataatgaaatgtgttttgtaaaattaaatgcctaattttggggttgcacaaaatacat

SEQ ID NO: 8202 - DNA, 721 bp, Macaca Fascicularis
  misc_feature (1)...(721): n = A,T,C or G
gatacagcaccaaacaggaggcggccaaggcccaaactgcactgcacatgtgtgtgttgggaaacactaccatccttgctgnnnnnnnnnnnnnnnnnnnnnnnnnnnnnnnnnnngcacaagctcagccccctacacctgcagcaaccccgagtgcaccagccgcggggtggcagtcgctggagacgggccagaaccagtcagatcccgtggnnnnnnnnnnnnnnnnnnnnnnnnnntccactgggctcgggcagtggagcagcagcgctggtggcagcagcggggccgatcttgctggcgcttcgttgtgggggcccccaaactattcttctagcttatggggagtcccaacggtggaagnnnnnnnnnnnnnnggcagccctgctcctttactacctggtgaccttctgggaggagggtcggattcaatctgaacttagaactttcaactctgacctcgtgaccnnnnnnnnnnnnnnnnnnnnnnnnnnnnnnccttttcgttttttttttcaacttgcaataaatacatttttaaaaggaaaaaagaaaacggagagaaaaaaannnnnnnnnnnnnnnnnnnnnnnnnnnnnnnnnntgcctcccttataacttcagttttttcgtttggaatatgaatccaaaaagagaacatatcactcttgaaatacttgaatcatgaacgccaacctagaaagacaatgtgaagcaagta

SEQ ID NO: 8203 - DNA, 970 bp, Macaca Fascicularis
  misc_feature (1)...(970): n = A,T,C or G
actaatgtcctttaactggtttgtatgtgnnnnactgtccagtgtttggattttacctcttgatagctccgtttgtccctggtgctgcttttaaggatgtagggccatgtgatcaggtatcaagttgagtaggtacgcagttggcttattgatgtatctgtgcctgttttatcttctcccaggaagagctgctttggtatagttgtttacttggattcatacaaagaacagggcagcaatcttggaaagctttctgaagcttataagaacctgaagggatttggagggggaacagtaacaaaggctgcctttatgtctttggacacaaagcacatagatgtatgttctgtaaagactaaagtgattgttacaccagggcttcctgaccttcgggagagactcaaaaaagcagagagcagcacaaagtgaagttaatttggttggtttgctttatctggtttctcattttctttcaatttaaacctgaacataacacccttctccaatatctatccagcagactcctggttgggannnnnnnnnnnnnnnnnnnngaatgtacacagttttcttttgtacagtgctttcacctgctaaaagttaacttgtttaatgcaaaacaagaccttgaaaggtcaatcatattaaagctggtttgattattaatagttatcttttaggaagaagcttttttccctatgtaagatgtcatactgcagatttaaaatatagactatcaataaaatgcatgaagtgatcatttgtgcttgatcatctctcctcgggtttttctttaaaaaggggaatctgctataaaggttctgttgcttcaaaccannnnnnnnnnnnnntgatttttagaatcaaatggaattacagtgcaaccttggtttttattcccttcactgctataagtgtgggcaggtactggtttatatgttataacttctgttttatctgtgttgtgtag

SEQ ID NO: 8204 - DNA, 644 bp, Macaca Fascicularis
cagctgcttaagtgaagggattaataggggctttctttcgcagctgccccagaggggcctcacccttcatacacttgacctaacagttgtattgttgctgcggagacactcactggttctaactgcctcactggccacatccacagagagtgtttatatttgaattcaccctctacctgctccattctgtccttttagtgcaatcgtctggagttgtagaaacagttaaagggtggaggcaacgcttccctttgtaggccagtgacccctttgaaagcccggcttctacgatgttaatgttcgactcctggtagacgtttactcgtagattatttacagatcgcctagcactcattcccagccaagtctttgaataatgcgccccttaacggactaacacaataatgccttccaagcttgaaaacttccagttacggagttgtacttcacttcagaaattcccaacactcttgtcatctgcccattcggctttggtagaatgttcaaggatgccacttaaaacaccatataatcctcaccacaatctcccaccagttctggtttgtgctttctctctctctgtctccctaccctgtgtgtgtatttacatttttctaggttaagaaatttgaagaaatcatgaa

SEQ ID NO: 8205 - DNA, 459 bp, Macaca Fascicularis
atgaggagactgagattcgggtcgaaattaagtgattcaggtttgccttcagtctctgagctaggaggttgaaaagccaggagccagcctgagaactgtgattccagaggatgttctttcagccactccgctctgtgcttctcactctgggtgggcacagccgtgttctcccttggtgatgcctgtaatttaccgtgaaaatgtacctttcccttggctattggcttcccttccctcgtagtcacccgagattcttttgaaaactttcctccgcttgcctgcacaaaaggcgatggaaattcaggaactgaaatatctgctccggggagtgtgtatttccacatttccaccgtctgtgtctggtgtcctgtcttgaagacaggtgctccagggtttccgcggtttattttgtctgttaatggacaccttgcgaagtaccacttaaggaatgagaattac

SEQ ID NO: 8206 - DNA, 2462 bp, Macaca Fascicularis
atacagttatggtacttctattaacaatatttgatcatataacattgaaattacagttcataggtacatttttttctttttgaaagcattcactaagttaggctaatagtgctagagtatgtcagagtgactatttgggaagagaaaaaccatatattttcaatcattaaatcaggcgtctcctttcagtcctttatcttctccatagccttaattttcttcggaaaatccagtagatctagaaactgcagacatggcagctttgatctgatgactcaattgccacaattttgtgttaaccttttaacaaaatgtggtatattttgttgccagtctgtagtttcttgggaatagggagcattttaaccctatatcatcatttcagttatatttttctggaacaataagagctggtccttatcctgttgaattagagaaatgtttgtcagatagcacataaatcataacccttgtcttggtagggcaccatttagcaaaagcataggaaactgtcatttgacttacatttgtcaaattatctgacttccagaacagactgaaaaacacaagggaagaatggaatgtatagccaaattatttctgaaagattagagaaaggactgtgtagttggattttatgtatttaatttctacaagtaattttcacggttagggatacaaaaatgcatagaatttgaattttgccttctaggaagaggggagataatttaaagcaaaactaattagtaccttgctcattgcttggtttttgaagtcctttcagaaaatactaattgtataatatgaacatggccaatttcacttctacattctaatgttaactttcatcttcatttaaataaatgtcttcatgttttaatgtgaaatgttgtaccctactcttttctgcatgctgtacatccccgttagatatattttttaaataatttataatgacagcattgtaatattcaacaatagagttgtcatttttttgaagcttcaatctgttacattattgctgttgtagagatatataatttccataatatgtaccactgtaccttattttaaaataggaagtatttttctttgataagtttggcctatgtgtagaaggcttactaatttttgacttgttccttttttagcaggataaccttgggtctcagtttagtcacatgagtcttgctcgccagccatctactgatggttctgaccctcataccaccatgttccagtccactgtggttcttcagtctccacagcagtctggttatatcatgacagcagcccctccaccacatcctcctccaccggcaccaccaccacctcctcctcctcccctaccacctgggcagccagtccctactgctggatattctgcctctggtcatcctgtcagccagcctgtgctccagcagcagggatatattcagcagccatcaccacaggtatattgctttttaaccttttctttcttgtggaaacctctcacttaagatcagttttaacttcaaagaacttgtttttaaattctcatgaagagaatttgtcagagtctataaacaaagcatatagtcatctttcctcctctggagattttcatgcacgtgctaagcaaccatatgacaggtaaatgctccagttggttggtaaagtatgtgagctttaagggttttttttctgactgagaggtatgggtttctaaaaaactaacctaagggaaacacaataaagtgtaaatccactgtaaaaataaaatggtaaggcagggcatagtggctcacgcccgtaaccccagcactttgtgaggctgaggcagactcacaaggctggacttgagcctgggagttggagaccagcctgggcaacatggcgaaacttttgaatgtttaactgacttttaatttctgaaacagactatccttatatgtcgtgggattcagtttgctaatatttgttaaagatttttgcatctatgttcatgaaggatattggtctgcagttcgcttgtagtatttttggttgtactctctgggtggtactagccttaaaatgagttgggcattgttccctcctcctttattttctaaaggtgtttgtgtaggattgatgttacttctcacatgtttgccagaattcatcaatgaattcatctataactggagattttttgcagggaaggtttttaaattacaaatttaatttcttagtagatataaagggattccagttctctgtttctctttggactaattgtcataatttgtgtccatttcatgtttcaagcttgtcataaaattgttcttaatatccccttatgcttttaatatctttaggatcttagtggtgttccctctttatttcttgatatgggaattttacactctcgtttttgtttattaatttaaccagatggtttatcaattcttttgatgttcttaaaaaaaaaaaaaaaa

SEQ ID NO: 8207 - DNA, 1627 bp, Macaca Fascicularis
  misc_feature (1)...(1627): n = A,T,C or G
cccctagtctccgtgcgagtgggcagcctgggctcccgccctggccagtcccgtgcccaccaccactctggcatccccagcctgcccccgcggctcctcctccttcccggccccgtggcctgcctgctgtccagcaatcttcccaagggcgctgtggcgcggagggagcactccccgaaccccgggaacagagcctcgcggaggacgcaggacgaggaggcggagggacgtgcacaggaccaggagattcggtccggaaggggacagggcctagagcccgggctagaaggcaggacacctggcttcggtctgggctcggccttggactacgacgtgaccttgaggggacggttccttcccttcgtgaggcctgggtcctcttcagtaagatgcgccggcaggaaacgctgagtcgtttcacctgggagctgcagggccgcgtgtttgacccagggcctccttctgcctggcacattattccgaataataaatgccagatcatactgctggagccgccgaccgagaagccgagagggaggcgagtgaggacaccctgaggtctgggcagagatcggtccgtcctactcttaccccgctgcggccgcagggttcgccccttccccacccgtatcccagcttccgggctaaaggaacacgtgaggccgaaccaaaccgagggcgccagggcatcccgcccgagctgcggagacgcggacccctcctcttacccaaaaccaaatgggcagggggctccgctgcagagggctcgccgaggcgctcgccttcacccggcgccgcgcaggtgcccgcgctcctgccgggagagccgagtgggggcgctgccgcaggctctctctggaagcccctccaccagcactgctgtggcctgcggcctccgccacccggacgcgcctacacactaagcgcgcgctggggctacgctgggcggggcccacggcggcgtggctgggggggggccgccgagcctcctcctccgccctgggcgccgggcgtggccctcctcacgcccaaggtgccaggcgcccggtgcggccgtctcgcccctaagccgggcgccagatcccccgccgccttctcgctccccgacagccgagccggggcaggggtcaggggggtggagccaggtgcggaaagggtttcagcctcgggggctgaggccgggaggtgaagacgctgctccccgaagcgaggaaaacgccagtgaggaagaggcctttccaggtcctgtgcgtgttgctgtctttagagctcactagggttggttggtttttaaatttcttttgatcagacgaaatttatttaaaggctgggggcggtggctcacgcctgtaatcctagcactttgggaggccgaggcaggtggatcacttgaggtcagnnnnnnnnnnnnnnnnnnnnnnnnnnnnnnnnnnnnnnnnnnnnnnnnnnnnnnnnnnnnnnnnnnnnnnnnnnnnnnnnnnnnnnnnnnnnnnnnnnnnnnnnnnnnnnnnnnnnnnnnnnnnnnnnnnnnnnnnnnnnnnnnnnnnnnnnnnnnnnnnnnnnnnnnnnnnnnnnnnnnnnnnnnnnnnnnnnnnnnnnnnnnnnnncaccaaaaaaaaaaaaaaaa

SEQ ID NO: 8208 - DNA, 562 bp, Macaca Fascicularis
  misc_feature (1)...(562): n = A,T,C or G
cattcccaaatagtggactcatcatgnnnnnnnnngggtgtggaacagtctaggtcctgtgacctcttaaaatttnnnnnnnnnnnnnnnnnnnnnnnnnnnnnnnnnnngaaattgttagaagtggaatcaaaatgaatccaccaccagggcagtagaaacaatagaaaaagaatttacagataaaattgtgggagggaaatggagtgagaaagtctcaaaaagcaagctgtcacactttctaacattaccccaaaacaacagaaaggaaagctttcttaagttagaaaagctatttgaaccatgcctctttttacaattcaagaacctaatttcacataaaagtgagcaacagtaatgaaacacgttaagaaactgatatcaatcatgacagagcaacacaaatcagaattagagaattcagaaagatgatgacagatcttaaaaaagaatttgaaatagaagaaaaataatttttttcagggccatatgcaggggctcacacctgtaatcccagcactctgggaggctgaggcaggtggatcacgctgtcagaagattg

SEQ ID NO: 8209 - DNA, 743 bp, Macaca Fascicularis
  misc_feature (1)...(743): n = A,T,C or G
gaggnnnnnnnnnnnnnnnnnnnnnnnnnnnncaaagtgaagagatgatgccgtgcctgggagggtggctggagagtcccccatcactgctagtatgggaacggtgatggtttgcagagaggaggtgtggatagaagggccatcagaaaagaggagggaagagctggagctgtgaagaaagatgagatcnnnnnnnnnnntgactcccaaagaannnnnnnnnnnnnnnnnnnnnnnnnnnnnnnnnnnaggaggagctctttctctggnnnnnnnnnnnnnnnnnnnnnnaaacttcttctaaaatnnnnnnnnnnnnnnnaaagccccctccctatgaatctcattaaataaccaggaagattaatcacccaagaaaagactaaaaaagaagctacagccaggataccataccagacagacttttcatcttttctnnnnnnnnnnnnnnnnnnnnnnnnnnnnnnnnnnnnnnnnnnnntagtaagacaaccttggttcacagtgcagtactacccctcacctttcatgacttgtccacaagctattgtttgtccttcagtcccattcagcgtccaaagagaaccatttacaaaccactgtcaggtctttgggtccattcatttaaagcccccctacttccctttccccagtgaagagagtacttaagtgccaaccattgggcctttctgtgtatgttcatattttttatatggctcnccctgcttcatgcatgtaataaa

SEQ ID NO: 8210 - DNA, 761 bp, Macaca Fascicularis
  misc_feature (1)...(761): n = A,T,C or G
taacctaacatgnccaggattttaacaagtgttagtgaattttctaaaaagatgagacaaaagcaaaatcatcacacataggtttttattactatgaatacaaagatagataatgctgattcacaattagctatgggtgtatccaaaacagcagacattttactgatgggtttaactaggtgatagaaatgtgcgcttaattttttttcctagagacagaaagttgcttctaattatctatatagctaaaatgaaaaatacctgaaagttaatacatacttatgtagatgtatttgtgttatgtgataaatgtttcttttttgcacacttttggacttgagaaatctgcttttgtttcgtgcctactctgagtttagaacccaaataagagcacttgttaaatatagagtgaactttttgttaaaactcttgctagcttcacctgtataccatcattgctccaaattaaataactgttttgggtcagaatataaatgctgggaatatactttttattacttcttaatctaggtgtcaaagattttaccacctggtaaataatgttggacttcaacttgttactggcacattttaatagtagatgaaacgtgtttttctttgttgtgtgaataaatgtatgttgtgctcttcatacttgttggattgtatagagattaaatagtgatatgaatatattgttgtttgctttggtatgcaattcatgtaatttcagtgctttgactagcttaaaactcaaataa

SEQ ID NO: 8211 - DNA, 3066 bp, Macaca Fascicularis
  misc_feature (1)...(3066): n = A,T,C or G
agataaagaggagtactgggagtggttaatatgtgtataaattttaaaagggctctttcttttcctctcaatttctttgaaagactttatgtaaacaacaactttgtattatggggtttattatgtaaatggattttatatgacaactgttagtacaaagtgaaggtaaatggaatttttcagtggtaagattcttatattttacctgaagtgatgcagtgttaactttaatatgaaaagattctgttaaggttgcatatcaaaattctaagtgtaatctcatttaaaaagatttaaagaagtatagctaaaagccaatagaggaaaaattggagcattgatgactacctgttttcaagaattactgcaaagctacagtaattaaaaatagcatcataatgacataaagataaataggtcagtgagacagagcagagagttcagaaattaactcacacaattatggataactggtttttgacagaggtgcaaagtcaattcagtgggaaaaagagtagacttcaacaaaggttactatagcagttggatctatccatctgcaaaaaaaaagatcttggatatgtatctcatactacatatgaaaattaactccagatggatcatgacctaaatgtaaaaccaaaaattataaaacctctagaaaaaaccacagaaaatctttgtgactttggattaagcagaaatgtatttgatataaccctaaaagtacaatctgttaaaaaatggaatttgacatcagaattaaaatcttgtacccttcaaaagaaactgttagggaatgaaaagacaagccatagactgaaagaacatcataacaaagcatatagctgataaaggacttctatccagaatattaaaagatgcagtatatgtaaactcagcagtcaggcaacagactactcaatgaattggccaaaatatttgaacaggtaatattgcacaagagatacacagatggtaagtaagcacatggaaaagctgatcagcatcattagttattagggaaatgaaaattaaaactacagtgaaataacattacaaacctattaatagtgactaagattaaaaagagtgccatcttggaaagcatgatttgggaagaatgaggaagaatcataatattcacaatactgctgatgggagtgtaaaatcatagaactactttggaaaacaatttgatagtttcttcatgatccagattatttgtctcctaagtatttacccaagagaagtgaaggcatctgttcattaaaaaactctcatgttaatgttcatagccattttatttgtaatcaccaaaatgtgaaacaaacattcatcaacagatgaactaataagtagattcctgttttggcatcatatgcttttctgtacagtggaatataaaaacagccatatagaatgagctattgataaacacaatagcaagaatgaatctccaaacagttatgttgtgtaaaagatgagagagaaaaagagtacatcctgtatgattccatttatataaaactctgggtaatgcaaactaatctaaagcaaattcgtggttcctaggagtttaagagtgggaaaggacaggctggaggggtgacagagggacacaagaaaactcaagggtgatggacatataaattattgtgatggtggttttatggatgtatatgtatgtcaaaacttgtcaaattttataatttaaatacatgtacacatactagaatggccgaacttcagaacattgataacaccaaatgctggcaaggatgtggagcagcaggaactctcacttactgcttggtggaatgcagagtggtacagccactttggaagacaatttggcagtttcttagaaaactatatggccnnnnnnnnnnnnnnnnnnnnnnnnnnnnnnnnnnnnnnnnnnnnnnnnnnnnnnnnnnnnnnnnnnnnnnnnnnnnnnnnnnnnnnnnnnnnnnnnnnnnnnnnnnnnnnnnnnnnnnnnnnnnnnnnnnnnnnnnnnnnnnnnnnnnnnnnnnnnnnnnnnnnnnnnnnnnnnnnnnnnnnnnnnnnnnnnnnnnnnacccaggaggtggaggttgtggtgagccaagattgtgccattgcactccaacctgggcaacgagagtgagactccatctcaaatatacttttattgtatgatccagcagttgtgctccctggtatttgcctaaaggagttgaaaacttagtctgcacagaaagcagctcatggatgtttatagcacttttctttataattgccagaacttcatagcaaccaagaagtcctttagtaggtaaatggccaaataaattgtggtgtatatccaaacagtatagtgttaatcagcactaaatggaaatgagctatcaagccatggagaaccttcagtgcgtattactaagtaaaagaagccagtttgaaaatcctatataccatgtgattccaactatatgagattctggaaaaagcaaaattatggaaacagtaaaaatcagtggttgcaaggatttgcgagttgagggagggatgaattggtggagtacagaggattttagggcaatgaaaatattctgcatgctataatgatagatacatatcataaatttttccaaacccatagaatgtaagacacttggagtgaaccccaaggtaactacagactttgagtgattataatgtgtcagtgtaggttcatcagttgtaacaatgtgccatctggtgggagatgttgataaaggggaggctatttgggggcaggaggcaaggaaatctctctgctttcctctccactttgctgtgtacctaaacttactctgaagaatatctttgaaaatttattcatgtgcttgcattgcatttcttttggatattactggtctaagtagtccaattaaaagacaaagattgggccgggcgcggtggctcaagcctgtaatcccagcactttgggaggccgagacgggcggatcacgaggtcaggagatcgagaccatcccggctaacacggtgaaaccccttctctactaaaaaaaaaaaaaaaaa
